United States Patent Application Publication US 2007/0048740 A1 - sequence listing, part 2

SEQ ID NO: 129 - DNA, 3734 bp, Homo sapiens
tttgtatttttagtagagacagggtcttgccatgttagctgggctggttttgaactcctgacctcagatgagccaccacgcccagcctcaagctctcgtttctgtcctcccgtcacctttgaggaagtaagtggtggttttatgccatgagagctgtggggtttcaggtaccgtgatgcaaaaacagccacaaaattagcagttcttgtacattgcagttgctatccttcaaggataagctcttttccagtttccgcctgctttggttgctttccagtgctattagttgtttattgtatggcatgtgcacattttataattattatctgagggaaagtgtccctgactgttttactctgttaatgctgcatgctgaaaaatctcaccatgcacatacaatattcctccttagtgaagcctgagaaattgttctacctttgtgatacatgctgtatcttgtacatacttctttgttgtacctgtgacaccttcttgcaggtttgtgtttacttacattttcttgcaagtatgtgttacatgcctctggtaacttctgagcagaaacagtgtttgtcttggcacttccataaataaatacagtttttggcattaagtggcttcacagtaaatattcttagaatgtgttatttaaaaactaactgatggatatttttaccttgatttttgttttccctacaatataaatcataaaacagggaaaattgtagtctttctatattaggattcgtatgactgccacaaggaagcagggtcaaaagtagttcccaatatccagtccacctgttctttttcttttccttttttttgacagagtcctgctctgtcgcccaggctggagtgcagtggcatgctctgggctcactgcgtcctccgcctcctggtttcaagctattctcctgcctcagcctcccatgtaactgggattacaggcgcacaccactatgcccagctaattttttgtatttttagtagacatggggtttcaccatcttggccagggtggtttttaactcatgacctcaagtgatccacctacctcagcctcccaaagtgctgggattacaggcatgaaccactgtacctggccaagtccacctgttctgattacagttccatccattctagggatcagtgtctttcaatgatgtgactgtggacttcactcaggaggagtggcagcacctggatcatgctcagaagactctatatatggatgtgatgttggaaaactattgccacctcatctctgtggggtgtcacatgaccaaacctgatgtgatcctcaagttggaacgaggagaagagccatggacatcatttgcaggtcatacctgcttggaagaaaactggaaagctgaagactttttagtgaaattcaaggaacaccaagagaagtattctagatcagttgtaagcatcaaccacaaaaaactggtgaaggagaagagtaaaatatatgaaaagacatttactctaggcaaaaaccctgtgaattcaaaaaatctacctcctgaatatgatactcatggaaggattttgaaaaatgtttcagaattaatcatcagtaatctaaatcctgcaagaaagagacttagtgagtataatggatatgggaaatcactcctgagtactaaacaagagactactcatcctgaagtcaaatcccataatcaaagtgccagagctttcagtcataatgaagttcttatgcagtatcagaaaacggaaactccagcacagtcatttggatataatgactgtgagaaatcattccttcaaaggggaggcctgattacacatagtagaccttacaaaggagaaaacccatctgtatataataaaaaaagaagagcaaccaatattgaaaaaaaacatacatgcaatgaatgtgggaaatctttctgcaggaaatcagtattgattctgcatcagggaattcactcagaagaaaaaccctatcaatgtcatcaatgtggaaatgcatttagaaggaaatcatatctcattgatcatcagagaactcacacaggagagaaaccctttgtttgcaatgaatgtggtaagtccttccgcctcaagacagccctcactgatcatcagagaacacacacaggggagaaatcgtatgaatgtctgcaatgtaggaatgccttcagattgaagtcacacctcattcgtcatcagagaactcacacgggagagaaaccatatgagtgtaatgactgtgggaagtccttccgccagaagacaacactctctctacatcagagaatccatacaggtgagaaaccctatatttgtaaagaatgtgggaagtcctttcaccagaaggcaaatcttactgtacatcagagaactcatacaggggaaaagccctatatttgtaatgaatgtgggaaatccttctcccagaagacaacccttgctcttcatgagaaaactcataatgaggagaaaccctatatttgtagtgaatgtggaaagtccttccgccagaagacaacccttgtagcacatcagagaacacatacaggggagaaatcttatgaatgtcctcactgtgggaaggcctttagaatgaagtcatacctcattgatcatcaccgaactcacacaggagagaaaccatatgaatgtaatgaatgtggtaaatcattcagtcaaaagacaaatctcaatctacatcagagaattcatacaggggagaaaccctatgtttgtaatgaatgtgggaagtcctttcgccagaaagcaaccctcactgtacatcagaaaatacataccggccagaaatcctatgaatgtcctcagtgtgggaaagcctttagcaggaagtcatatctcattcatcatcaaagaactcatacgggagagaaaccatataaatgtagtgaatgtggaaagtgcttccgccagaagacaaatcttattgtacatcagagaactcacacaggtgagaaaccctatgtttgtaatgagtgtggtaagtctttcagttataagagaaacctcattgtccatcaaagaactcacaagggagaaaacattgaaatgcaataaatgatgtggtttcttatatgaattctttacaagctgttgtaaacatttagttttaaaaagaaaagcatgctgaaacatgttaatgtaattttaaatcacaagtctaataattattaaagtaccatacggaataactgtctactgtttactagcatataaaataagtatgatcattattattgaactctatcagctatgaagctaaattttaaagtcaactgctcttcctactgactcaaatagtttattttttaaaaatacttatataatacatgcagagacaagatacacaatgattataagtattaatctccataagagaaaatatttatgaactatatttctcattgcactctgtaataaaaagcagttagttgttacttacctaagagttaccacttccgtagcctataacatcaaaacgtagtttttgcatgttttcaattttataaatatatattttatcagacatcatgaattattttgtgtcttgcttatttcactcaattttttaagatctgtacattattgcatgtggcagtagtgtattttcattttgcatactattccattttaagaatatattgctgtttatcctattgatggatatttgtattttttatacttttgtgtaataataaaaatactgctgt

SEQ ID NO: 130 - DNA, 4977 bp, Homo sapiens
catgtggtttttatgaggttcacaggcccccagacagccaggacctaaaagtggtttttaatggcagtaatgcccacatgtggcaatagcctgtcatcttcatcttcatctcccaatcaggaaactgaggcaccgagaggaaggtgcccttcaaggtggcgggaacagtctcccccaggcccccaccatgcggactccccagcctcctccccttgccgtgctcccgagcctgacctcagccccgacaccgccaccctctctattgtgccgtccccatcctgcccgcctcccctttctaggaatccctggggtgcggagtcttcatcccacgctgccccgtccctgtgtccaccatgcccaccccaccttctgagccacctggttggggtgtcctctgccgaggcttgggttagttacaggggcccgcgggcaggttctccctcctccccagcctcagtttccacctccgtggagtgggtcctggggcagtcatgagatggagcgtgttctgtgcccggctggcctggcaggggcatgcatgcacaggggtgggcacagctccttgtgtggtcctggtgccccaagctctgtgcccacctgcagcttgggcctgggcgatcagcgccgtctcactctgtcacctgggaaatggcttcttgtcctgcatcacttgatcatccctgaggggacagcaggtggattggttctatcctaaacctggcgaggccccggcctctagacaagcctccctgtgacaacaggtctaccagggcctggactcagcccctgtgccagagggcagcttggtgaaattcccagttgctgagcgcacgctggggagctgcctcgcagcacccagggcagacatgggtggatttgtgggtgcggaggagccctccttacctgcccaggagcccagggactctcacactgatgagtctgcgttccggggaaggttgcgtttctctggcagtgagcaacttgacaggtggtgtctgtggctccctagataggctggggacctcgggcccggatcagcccggctgcttcatccctgggagcacagacctgattgtggagcctggaagctccaagctccttgaacttcatccctgtggcctggacggggagcggaaaagagtcacatgaccagggttcctcctgcagggagcccccagacccaagggcctcagtccaccttcccctcccctcccctcccctgccctcccctcccctgcccttacctgccctgccatgccctgccctccctgctcctggggccctgtgaggaccccgtgggtcacattgggggacatcggttatcgccctcacgattgctctgaatgtaagaaaaacctcctgcggggaccgggaacacgagctggcctgtgctgtggggtgagaagaggggccccgaggtgcgcagtcaggttccccgggtcggcgacccctgagagcctggccctcacccgggcccctccctgagtgtgtcccctcccgcagtgcctggccgccggctccatcatcatgaaccgggagctggagagcatggccatgcgcccgctggccaaggagctgacgcgcagcctggaggacgtgcggggcgccctccgtgaccaggcgctgcgggacctgaacacctacacagagaagattagggaagcgctgaggcacttcgacgtcctgttcgcagagtttgagctcagctacgtctcggccatggtgcctgtgaagtcccccagggagtactacgtgcagcaggaggtcatcgtgctcttctgcgagacggtggagagggccctggacttcgggtacctgactcaggacatgattgatgactacgagccggccctcatgttcagcatccccaggctggccatcgtgtgtggcctcgtggtctatgcggacggacctctgaacttggaccgcaaggtggaagacatgtccgagctgttccggcccttccacacgttgctgcggaaaataagggatttgctgcagacgctgacggaggaggagctgcacacgctggaacggaacctctgcatttcccaagacgtggagttccccatccgcgcagacgtgcagggacccgctgccctggcgcctgccctctctgcccctctcccccctgaggggccactctcagctaaggccaaagacccggatgcagagctggcctgctccatgcagtacgacgaccaggggctggagcagctcagccgcatggtccacagggcgggggacgagatgtcctctttgctttcaccgcccattgcctgccagtccccagctcacaggccaggagcggagggcagcccaggcggggaggcctctccaggtagaccgcgcctgcggtcaggcagtgacgaggaggagcgcgtgttcttcatggatgacgtggaggggacggcagaagccctggccaggcccgagtccccagctggcccatttgggtgggcaggcagtacctgggccgacccccaggagaaagggcagggtgggccaggcggagcggcggggatcagcttgcccgcctcggaaaaggaggaggacttgagcaacaacaatctcgaggccgagggcacagatggggccagcctcgcgggcaccagctcctgcagctgcctggactcgcggctgcacctggacggctgggaggtgggtgcggatgacgcagagacggctgagatgatcgcccaccggacagggggcatgaagctctcagccacggtcatcttcaaccccaaatcgcccacttccctggactctgcggtcgccacccaggaggccgcctcggagcccgtggccgaggggatggatggcggcccccacaagcttagcactggggccaccaactgccttctgcattcctgcgtgtgctgtgggagctgcggggacagcagggaggacgtggtggagcgtctgcgggagaagtgcagcccgggaggcgtcattggtgcctcgtacgctgccggcttagccaaggccagcgacagggcccctgagagacaggaggaggcgcccccaccctcagaagatgcctccaacgggcgggagcccaaagcccccacttccgacaagtgcctgcctcacacctcaggttcccaggtggacacagcgagtgggctgcaaggagaggctggggttgcaggtcagcaggagccagaggccagagagctgcatgctgggagccccccggctcacgaggcgcctcagggcctgtcgggctccagcagctccacagctgggtcctgctcctcagacaagatggggccagaggcggccccagcagccacgcatgctgccccacaggccacaagagagaagatccggtccaggtttcacggcagccacgacctcatccaccgcctgttcgtctgcatttcaggtgtggctgaccagctgcagacgaactatgccagtgacctgagaagtattcttaaaacactgtttgaggtcatggccaccaagcctgaaacagacgacaaggaaaagttaaggaaggtcacccagactctgcggagtgcggccttggaggactgtgcactgtgccaggagaccctgtcatcctctgaactggcagccaagacccgcgatggggactttgaagaccccccggagtgggtgccagacgaggcctgtggcttctgcacggcgtgcaaagcacccttcaccgtcatccgccggaagcaccactgccgcagctgtgggaagatcttctgctcgcgctgctcctcgcactcagcaccgctgccccgctacgggcaggtgaagccggtccgagtgtgcacccactgctacatgttccatgtcacgcccttctacagcgacaaggccggcctgtgacgtggtgccaggggcagccccaacccacccgggccaggaacccccaggaaggtggggccacgctgcaggcaggtctcactgcgtctcatgaggccgctgccgctgctgcaggggcacccagacctccagagcatccagagcctctgtcctgcccacgctagcctccctgcagggaccccgggccggctgcaggggccaacaagaggtcagctttgcccagcaggggacccggaggagcctggtggctgcctcagggcagggtgcctggcggagaaggcctgggccctcccactggtccctcggagatctgctggggctatgggaatcggggcgggtgatggaggtggacaagagtggggccactctgccgcctctgctgttgcggtgaatctggaagccggagcaagggccactccacaggctctttggcacagcagggctccctatgtgcctcccaaacgtcaaatgcaggctacccattctccccatcagctgcccacctcgttccccagccctcacccctcacccctcaccatccttcctcaggacttggctaaacaacatgcatctcatttcttcttggagtggggagatgcgggaagctgacccagtggtcctctaggcaggcagggtgctcctggtgtctgcccaccactgtccccttgctgatggcatgggggtccgaccaggcactgacaccgcaggcagaggttgctcggggccttgggtcgggtttaccaatcagccaggacgcccggggccaccagctcagctaccacttccccttccctctgcaccctctggaaccctggcccaattcctcagaccccagagtggcctgggacccaagctgccgcagctgagtggccccagcggacacctcctcaggcttaaatctcaggcttcacattgcaatgacgattgcagttttatttttggagatgacacacctactgcttcttttctaggataaatctaattactgtttactggtggagtacatatgcatagaaacggcttctgtcggggggagagtatataatggaggaaatattatgtattgagattatatttattttctaaatgctgtaatttgaagccatttccataaatctatttaaggattgc

SEQ ID NO: 131 - DNA, 3571 bp, Homo sapiens
ctgagagaaggccggctcctgtgctctgcactctggcccagggctgctgttccgctggctgacgccctgtccccaccccagcatgtcctgcttccaggctgcttgacccggctgggctgggtgcctcttccccacccccgccccagtctcccgggccccatcccagcctggcccgtcataactgccgatccccagaactgtccctggtgtgcagcaggcatgcagggtgggcctgcagagcgaggtcccagcaccggcggcatctggcgctgaacacaggaagatgggacgtttgctgaatgaatgcacgtccctgatgaggcctggacttcgacggatgaaggggctggtggggtggagtcagggttccccgaaagccctgggtggagagggtccccaaagtggggtcagacagcctgtgaggctcacagtcctgccctgcagccctttggtttggaccaggtgccacctccccatctccctggccccagccctcagctaaccagcccatgccaccgcctggaaatgggccagagggcagtggcgacctgcccaagtccacacgcaggccacaggccacactctgaaccccggggcaggctcagacgggctttgctcagcctgccttagggcatagagggagactgagtcagggccctcccaggaaggatgggtgtgcggccttccacgctcgggactttgggccacgatgtccaccccagggtcttcgcagagcagcgggaaaggaccctgctggcaggcacagtgcccgtctctgcccccggctctgctccaaccgcccccagcccaagggcggcacgccgcagggggtctgtgatccccccacgtccccggctcctttcacccacacaccacactgggaggcggcagcccgagggcaggtttattgacaacctcacgggacacaagcaggctggggacaggacggcgacaggctccggcggcggcggcggcggcgctacctgcggtaccagatctgcagcctccgctcccgcttgatcttcctctgcagctgcaggatgccgtagagcagggcctcggccgtaggtgggcagcctgcagggaccttgcctcagtctcgcttcccgcagccggagcccgcgtgaccgcgtgcacagcgcagccggctcggctttggaagggtttcccgggccggcctctgaaggtggaggctgacagccctgggtgggcgcagtgccagggactgggagccggcgcaggggaggtccctgcaggaagagtggggtcctcccctgggcaaggccccactgccctccacccgtggctcatcccgggctgtcacagggacctctcggacaagacgctgacctcactaacccggcccccggccccagccctcaggactcaatgggggccagcgctcagcagacacacttagcagtggggagcagggcccggggctgccctggacggagatggaggcagggaggctgggcggagggaggggaggtggcccagagcccgggcatcccacgaggacccgatgaccctctttctgagccccaagccagagctctttgctggggatcccccagtcccggctgccacgcaggttcagaacaaagggcttgagcaagaggacgaagcccagggcccaacggggacagcaggagtggaaacaggggaagacgccaggggcatgggcagagctcctgaccccaggatggacctctctgtgctgtcaagtcacagggaggcccaggctgccctctccactgcccccggggtgacctgaaccgtgcagaacgctgaacaaatcaacgccctttccagggaagcggaatccaaagtcagagcctgttcctccacttttgagaggcaccaggatgtgcctctcgcttgcccaaacccccagactcgggactcagggctgggctctctgcgcatgagctaatgccgcacgcagcacagggtggccaagaacgggactctgtcccctgtcccacatgagcgccacctccaagcctgcctaccgtggaccactgtcaaggtgaacgcccggggggatggccctcgtgggaccacgtgaggtgcaagagtcccacgggatcaccagatataaagaatgttcccggtgcgatgtgaatttcaggtaggaccatatgaaactgctgtaaaccaggcgtgtgtcaggaattccactcagcttcccctgctccctctgatccctctgatgcctgaatacatcgccgacttctcacaggggacaggctccactaagaggcagcgctccgagtcggcccatccataggatgggggagcccgccgtctgctgggggtgtgggactccctcacaggggccgccgggctccgtgtggcgctggccctgtctccagctccctcgtgggcggtgcggtcccggccctacctgggatgtagatgtccacgggcacgatgcggtcgcagcccctcaccaccgagtaggaatagtggtagtagcctcctccgttggcgcagctgttggggaggcaccgtgaggggagtgtgccgaagacccgcctgcccaccctccctccacgaggcctcgccccatccccacccgccttcaactgcaggccaggcacctacgaggctggaacttgtcacggagaagcaatgagcaaacacgcacaggctcccagagcctctgtgggaccagtggggcgcaagctcacacgtggctgataactcggggaaaagtgctcccctcccgagggggctcctgaccaccgattcccggggctgggatgtgtcagatcacatgtgtcaacaaaaagccacttcagacagccacagtgccaacacccagcccctgtctatggggcggctgagcctcaccctcgcctgattccggctctgtcagtgaggcgctggggtccacccggggcagggagctggaaaccccaggagaccacacagactccactcccagcactgcttcccacagccgtaaaaatggacataccctgaatgcccagcagtgggagacggttatgaaaactctggaatattctaattaactgtttagaattagattagtaatatgtccacacagtgggatattattcagccaagaaaaggcacgaggctcggacacaggccacagcacggatgcaccttgaggacgtcgcgctcagtgagagacgccggacacagaaggccatgcggcgtgtgatcctgtttctgtgaaatgtccaggacgggcccatccacagagacagggaggggaggtgtgggcaccggggctcggaaggggatgcagagtgactgctgatggggacagcatttcatttgggggtgatgaggatgttctggaattagaggtggtggcctaaaaaccactgaactgctcgctttaaaagggtaaacttatcaagacctgatctctacagaaattttaaaaagtaggcacagtggagtacatctgtaatcccagcactctgagaggctaaggttgggggaccgcttgagcccaggaggtcaaggctgcagtgagctatgactgcaccactgcactccagcctgggcaactcagtgagactctgtctct

SEQ ID NO: 132 - DNA, 4233 bp, Homo sapiens
ctcaactcacaccgtgtatgcaaatcaactcgcactgcgtatgcaactcaactcgcactgcgtatgcaactcaactcgcactgcgtatgcaactcaactcgcactgcgtatgcgaatccactcactgcctatgcaactcagctcgctctgcgtatgcaactcagctcgctctgcgtatgcaacccagctcgctctgcgtatgcaactcaagtcgcactgcgtatgcaactcagctcgctctgcgtatgcaactcagctcgcactgcgtatgcaactcagctcgcactgcgtatgcaagtcagctcgctctgcgtatgcaactcagctcgctctgcgtatgcaactcagctcgcactgcgtatgcaactcagctcgcactgcgtatgcaactcagctcgctctgcgtatgcaactcagctcgctctgcgtatgcaactcagctcgcactgcgtatgcaactcagctcgctctgcgtatgcaactcagctcgctctgcgtatgcaactcagctcgcactgcgtatgcaactcgcactgcgtatgcaactcaactcgcactgcgtatgcaactcaactcgcactgcgtatgcaactcaactcgcactgcatatgcaactcaactcgcactgcgtgtgcaactcaactcacactgcgtatgcaactcagcttgctctgtgtatgcaactcaactcgcactgcgtatgcaaatcaactcactgcatatgcaactcagctcgcactgcatatgcaacgcaactcaactcatactgcgtatgcaactcaactcacactgtatgcaactcagctcgctctgcatatgcaattcaactcgcactgcgtatgcaaatcaacttactgcatatgcaactcaactcactgcgtatgcaactcaactcgcactgcgtatgcaactcaactcgcactgcgtatgcaactcaactcgcactgcgtatgcaactcagctcgcactgcgtatgcaactcaactgttgcaagtacttatttccggccacttcctttttctaactaccacaccaagccagtatttctcctccctgaagtcagcccaggatgaggcactagacagcaggacatgctgtatgcccttgggcctgctggaagtatgcagactagccagccccagacttcatcctgccctgtcctgcctttcctgtgaaaaccctgtggcctctgcctcccctggctctgacttctgcctcctgcccagctctgcagctccccttgggccctgcctggagtgatgtgccgccttctcttgacactgtgagtgataaactttccatgtcaggaacctgtgtgtgtcactcactcaccttgacgagtccgcgtctaggccccaccagtggtgtggttttcctcatagtctctctacctaagcacatgtctgtgacaaggtcttacccagcccagggattcttgaactatctgtaggaactgccatgttgactcctgggcagttttattctttctctctactcgttcaaccttattagggagtgacgttttttccaaagtggttgtgaaacagcatctccttggggtgttggtttgcacttctcttcattactgatagtatgaacatggttttgcttacgctggctattttcctttttggatgaaatacctggtcttgttttttcctggtttgtttgatctttgttcttttttagaaatagtgaggctgttgtgaggtgagtcaccacttgtgacttagaagattgcagtggtttccacttcacctgtttccacttttgtgatgatgccttaaggaaaaagattgtgccaggtgtggtggctcaggcctgtaatcccaacactttgggaggccgaggtgggtggatcacaaggtcaggagatcaagaccatcctggccaacatggtgaaacgccatctctactaaaaatagaaaaattggctagatgtggtggtgcacgcctgtaatcccagctccttgggaggctgaggcaggagaattgcttgaagatgggaagcacagattgcagtgaaccgagatcgcgccactgcactccagcctggcaacagagtgagactctgtctcaaaaaaaaaggaaaaatatttcttaattttggcatactcaaatttatacaacctttcctttatcttcatcagaaatttcttttctcctaaggccttaaatatgctgtactattttggcttccacagtttctatgttttatcccaagttgcttaatccatttggagttgatttttgttgaccgtatctgtagagtgtaatgtcatttttcccactatggacataaaaatttttgcaaggcctcttttttttaatgaagaaaagaggtttattttgttcacaattctgaaggcctggagggtcccagaagcttggcaccagcacccactaggctccagatcggggcctcatgctgacttccgttttcacacaacgagtgggaaacaggtgtcctaacactgtgagagaaaaaatccgaaagtttagtttttcccattcgcttgccctggcctccaggcagtcctgcagcagcaaacacatcatcagccttaggagctggcctgtgaggttgaccactctgtaggtggacgagcctcgcccgagaagagacatgagcagttctgcgtaggctttaagacagaatcaacatggaaagcacgacccacatggtttcaatagaacttgcctcctgaacctgactaggttactcgcctgatgaaccagtatctccatcacccgtgggactgacagacccagagtgtcataacctaaaattcagaagtgtagactataatcttaaattattcagcatatgtgcaacagccttggggagcagtgttatgataccaaatggctaacattcatgacctcagtatcctggaagaaaaggagaaagtgtgatgtagtaaaaccacttgaaaaaataatgatgaaacatttctcatatttggtgtaagataaaaacttaagtttgaagaggttccatgagccccagacaggataaacctaaagaaaaccaagcccaggccgggggcggtggctcacacctgtaatcccagcactttgggaggccgaggtgggcggatcacaaggtcaggagatcatgaccatcctggccaacacagtgaaacctcgtctctagtaaaaaaaaaaaaaaaagaaaaatacaaaaatttagttgggcgtggtggcgggcgactgcagtcccagctactggggaggctgaggcaggagaatggcgtgaacccgggaggcagagcatgcagtgagctgagattgcaccactgcactccagcctgggcaacagagcgagactctgtctcaaaaaagaagaaagaaaagaaaaccaagcccctgccaccacgaagctgccgaaagctacagagtgaaagtcttggaaggaggctgagaaagtggacacagtgcttccagaagaacaattcaattgaccgggtttctcgtcggaagccatagaggccaacaggaaatgtaggagcatttttcaagttctgaaataaaaagaaatgccaacccagattgctatatccaacaaaatatcctttaggaatgaaacagaagtaacgatgaggcaatacaaagaattgcctgcagacctggtttaaataaatggttacagaaaactcttaaggaaacctggaacaaaggaaaagcaatagaagagtaaatacctgagtaaatagatcagatcattctactcttgagttctttaaaatatatattattgtcaaaagcaaaaattatcacatggggtttcaactgatgtatatttaatacataagacaactacaacatgaaggtgaggggcaacgtggctggccggcgtggaggttccgtgctccatttcagtggcaaaataccattccagaaggactggaaaagctaagtctgtatatttcaattactaaagaagtgtacagctgggtgtggtggctcacgcctgtaatcccaccactttgggagagtgaggtgggtggaccacttgaggtcaggagtttgagaccagcttggccaacatggtgaaacccgatctctactaagaaattcaaaaattagctgtgtgtggttgggggcacctgtaatctcagcttctcaggaggctgaggcaggagaatcacttgaacccaggaggtggaggttgcagtcagtcgagattgtgccacggcactccagcctgggtgacagagcaagactctgtct

SEQ ID NO: 133 - DNA, 4976 bp, Homo sapiens
tgcaagctcttctcacttcatcattcttcctacttcagggtttggtaggtgtctggggcccagcctgtggtgaatgtgtgcacagttgaatgagtcagttgcttctgtttgttcctccaggtatttcatcgctgatttgccccacttgcaggacagctttgtggacaaactccttgaccttatgccccgactcatgacatccaaacctgcagaagtggtcaaaattctacagaccatgctgcgacagagtgcctttctgcatctcccacttccagagcaggtcagggtctatttggcccctgtaggccaaatctgtccagacggtcaaaaatctttaccttggtgatcttctttgaccaatggagcagctgggctaggctcttcctctgagtggctcccacatgcccactcattagataaggagacagaaaaaagatgtgttttcttgtccaggaatgacctggctttagaatcataggattttcctctggcttacagatccacaaagcctcagccaccatcattgagccagcgggcgagtcagacaaccctttgcagtttaactctgggttggtggttgccctggatgttgatgcaaccctggagcatgtgcaggatcctcagaacactgttaaggtccaggtctgtcgggtttgggtcctcgtggagcttctagactgaccttgtgttgaagtatttaatgttagtacccctatagtctctacttgagggacagaaactgggacaggagaagaaatgagcctctgtgggaaagaacctaggcttgaatctcaactactgctgagtgtggtttgaagcaagttactttaaactctgagtctcagattctacaactgacaaataggaggagttgacataaagagataatgaatttaaagcccccaggacccagtaagggttcagtaaatgataagaccttttctaatcttgtaatgtgacgttaagatttggtcttttattacagaaaactataataaacaagttcctttcaggctgtgagtcagtcagctggcagataaaatttatggatgggaaaaagcgattactaggaaatattctttcccaagttacatagatgtaatagagacacatgagaaatgtagtagagacactaatcaattcagacagtgcagttaagccccacaaagagtactactccttcattcatccatctgtccactcattcatccttccttccatccatttgtgcaattgtgtttactctattgcatgcactaagtgctgtggttgccaaggtaaatatatcacagttcttcctctcggggtgtacacagtttcattcagagacatacaaatgggcaggcaattataaaacagggtttggtgagtagacatgcacaggatgggtcatctcctagactgtctcctaaaaaaccctttcaaagcacctctaccacatgcagggctaaaccttttacagtattcaatttggagtgtggtggaggctcaggaaaggaaaggagaagggcacaagggatatgagagaagggccaaagggatatgagtcaaagcagggatgcaagcactggcaggaagtacaataaggggacagaaaaataggctggaacaggcagagaaggcttcctggaggaggtaaggatgaatcaggccttgaagattacgctttttggctatggtgacaataaaggaacgggccttctggcttccaagcagaaattattataaattatgagacctgcagagaactagttctgagctagctgtgaagttgtattgcatattggagtgtttttgttttgttttgtttttttccacattagtggttgtccaccttcactgcactttaggattactcagaaagcattaagaacagatgaataggtgtcagcctacattaattaaatcaaaatcctgagaatagggcctatgggcactagtgtttaagagttcataggtgattctaatacgtagtcagtgataccagcagaactactgttttacattgtccctgaaaaaaaacttcactgatcacctgagtgtagaggagattgtaggcaggttacttaagggtcatctcctagactgtctcctaaacccccttcaaagcacatctaccacacgcaaggctaaaccttttaggtaccttataggtagagggacgggaaactcactgccccatcgtgggacaggtccagtgctttgaaagtgccatccagtccagtcaccacaccctgagtcattcctctgttccaggcactacttacttcaggtgctcgatagagatatagcagtaaacatgcctcagagatgacactgagattacattccccaataaaatactgtagatctgttctttaaagcaaagcctgcagaactccattcattaactatttattttattttattttattattattatactttaagttttagggtacatgtgtacaatgtgcaggtttgttacatatgtatacatgtgccatgttggtgtgctgcacccattaactcgtcacttagcattgggtatatctccaaatgctatccctcccccctccccccaccccacaacagtccccggggtgtgatgttccccttcctgtgtccatgtgttctcattgttcaattcccacctatgagtgagaacatgcggtgtttggttttttgtccttgtgatagtttgctgagaatggtggtttccagtttcatcatgttttatggctgcatagtattccatggtgtataagtgccacattttcttaatccagtctatcgttgttgggcatttgggttggttccaagtctttgctattgtgaatggtgccgcaataaacatacgtgtgcatgtgtctttatagcagcatgatttatagtcctttgggtatatacccagtaatgggatggctgggtcaaatggtatttctagttctagatccctgaggaatcgccacactgacttccacaatggttgaactagtttacagtcccaacaacagtgtaaaagtgttcctatttctccacatcctctctagcacctgttgtttcctgactttttaatgatcgccattctaactggtgtgagatggtatctcattgtggttttgatttgcatttctctgatggccagtgatgatgagcattttttcatgtgttttttggctgcataaatgtcttcttttgagaagtgtctgttcatatcctccgcccactttttgatggggttgtttgtttttttcttgtaaatttatttgagttcattgtagattctggatatttgccctttgttggatgagtaggttgcgaaaattttctcccattttgtaggttgcctgttcagtctgatggtagtttcttttgctgtgcagaagctctttagtttagttagatcccgtttgtcaattttggcttttgttgccattgcttttggtgttttagacatgaagtccttgcccatgcctatgtcctgaatggtattgcctaggttttcttctagggtttttatggttttagttctaacatgtaagtctttaatccatcttgaattaatttttgtctaaggtgtaaggaagggatccagtttcagctttctacatatgactagccagttttcccagcaccatttattaaatagggaatcctttccccactgcttgtttttgtcaggtttgtcaaagatcagatggttgtaggtatgtggtgttatttctgaggactctgttctgttccattgatctatatctctgttttggtaccagtaccatgctgttttggttattgtagccttgtagtatagtttgaagtcaggtagcatgatgcctctggctttgttcttttggcttaggattgacttggcgatgcgggctctttttttgttccatatgaactttaaagtagttttttccaattctgtgaagaaagtcattggtagcttgatggggatggcattgaatctataaattaccttgggcagtatggccattttcacgatattgattcttccaacccatgagcatgggatgttgttccatttgtttgtattctcttttatttcattgaacagtggtttgcagttctccttaacatctgttaaggagattaattaacatctgttaatgagaactttcctcgattaaatattctgtcattggagattggtacatttctttgtcaagggcaacagtttttaagccattcacatacacacgttcctgggagaagtgacactggggagattttttttttaacccctgaaaataaacatatcggagaatacattcatgatctctccacaggttctaataaaggggggagacctgggttctgcacctggccttgttgtcgtggttacggttgctttcaggcgatggcacctgttctccaggtgtgtctggacttctacttgctttagccatatatggccaccagggggagcagtcaccccacagttgcctggagcgccctcgctctccaaattcacagcttgaaatgtcacctgtggccgtctgcggtcatccacggttttctttcttaccttttctttctttctttccttccttccttcctccttccctttttccttcgttccttccttcctttttttttctttctttctcttttctttctttctttccccctctctctctcccttccttctttgtctttctttcgatccttccttccttctcccctcccctcccctcctctccccttcccgacggagtttcgctcttgttgcccgggctggagtgcagtgagccgagaatgcaccattgcactccggcctgggtgacagagcgagactgtgtctcaaaaataaaaataaaagttagcaaggcatggtggtgtgcacctgtggtcccagctactcaggaggctgagctgggaggatcacttgagctcacgagttcaaggctgcagtgagccatgattgggtcactgcacaccagcctgggtgatggagtgagaccttatctctc

SEQ ID NO: 134 - DNA, 3384 bp, Homo sapiens
acagtccttctgaggaagggcatgtgaggtgttcgttgtctgtggtagacctgggtctgtgggaggctcaggattctggtccggactggagtagaacctggggagctattggctggcctctgttatttaaagccacagaatggatgtaaaaccaaggactagcagtcatactgagacggtgaaatggtggaaattggaaccttagggagcagcactgggctggatggaagaggaagagcctgcaagagaaaagagctgcggaggtcagagggagcggctgtgccttgggccaggggagcagtgagccacgttccttatcccaagcagactccttggagatctggagaggccggagctgagggccgggaccccgagggcctcggaaggagttgtttcagcctcttggggcaacagccagatcccagtggctctggaagtaatctgtctagatgtgagatgatgaaggaaggaaggatggctgtacttgaggagggagccgggtcacagatggggcaagaggcacgatcgtggtgttgagtgaagagaaaggactgaagacaaaggaagtgccggagcctgtcctggagaaaggagaagggacctcttgtctgtggagtcagaaaagcaggaaaggttgaagggagaaggtgctacttactcactaccaggggcctgggacacaagcctgtttgagggtttctgaagaacagtggagatgctgagattctgtgcaggcctttctgactttgcaccagtggcagttcgcagcctccaggacttggctcgcatcgccatccggggcaccattaaaaagattattcatcaggaaactgtgagcaaaaacggaaacggactaaagaacacccccaggtttaaacgaaggagagttcgccgccgtcgaatggaaacgattgtctttttggacaaagaagtctttgccagtcggatttccaacccctcagatgacaacagctgtgaagacttggaagaggaacggagggaagaagaagagaagaccccgccggaaacaaagccagaccccccagtgaacttcctacgccagaaggtcctgagcctccctctgccagatcccctgaaatactacttgctttattacagagaaaaataagtctcctgtttgaaagggggaaataggaagagcagattgctgagtgtgaagttcgtgctgcctgtgtgctgttgaagggtcacctggaggcagacgttgtggggaagggaactgctgggctcatccacaccatggttttcttctagttcctgattgacctctaaaattctattcagttgtatgatttgtttacatagttccacaagaccttcattgcatagaagattgttttcccaaagtggagagaatcttcatagagaaaaagagaaggctgtttctttttcggctctgacgaaacactgaagtctgcgtaagagagactgtttgatgaccgtccctcatgcaacatgcacggtactcactaaaaatgaaaactgaagtggaaactaacctgtgttgcttataaagtgtgaaagcacaagcttataaatgtataaaatcttttctgggtgtgacgcacctgcgtccaagtttgaatttttatgatatgtaccacttaattactggcactgagtatcactgaatttcttagttttctagtggggaaacattattgagaagccctcccttattttaagtaagttgattaaatcttatgtgagttgccagttgtaatttttcaaaggaaaaattttgatggggtggaggaatgaattgccagataatctttctggaattccgagagaattccaaagagggtttttttttttttttttaggacatcttttgatacctttaaaagaaccactgtcaagtaatccttaaaagaatatcttggaaaaggaaacagattttttcctgtgtgtaagcaataagtgaagttacatttgccctaaccctagggatgattctttacccagttttaaagcccatcatggtattctaaggtgttgacaccctccatcctcagagcaggtcgaaaatattaaatagactggggactctatgatgggcagcctgtgctttttgacttcagtttgctatttttctgtgatcacattagtactgattcatagattctatcttttataattctggagaaaaagatttgttagttttgtaatttttttgtaagaccaaatgtatgtattttagtagctccattgcatgagaagagtgtaactcacactgacttgtgatatcagccttctctgggccttgtgtgtggagagctttctatcttaccaagtggtagggctaaaagaacaacagcctttttggtagtcacatagcagaatgatcagagttacattgcttattccaaaacattggttctttttaaaacatttttttttacccaaagaaaagaataatagaaattactaacaataaatataaattcagagtgttgatataggattcagtatccagagtttatttttaatcttaatcctcagcttcttgggagttgctgggcttcagtgtctctgtggtttcaccagcttagcttgagctctggttattttggatcttttctgctttttttaagtaactgagtcatttttaccacacagtccagtttgcatgtatagctaggaaacatgtattgctctagattgggcagtttaagtcattttaaagaaagttagttcatagttgttgccttttaactcatagtcaagcttcagtctttcaaagagaaatgtgtgattttcatttacttgctgatattttgtagtttggagatccttgtgggcattattctaactgatacgtagacacttacttggaaatttttggacattatattaaatgagtgctatctgtgaaattggttatattaggtggcttgactaatgttttttctataattgtatatggactgcatttttaaaaaaaccgcatttgcctttatgctagattgtaaaaaattatattagaatgcataagacatgtttttccttcatatgctagacttttcctagcatttcgtatttctgtgttgtcagtgtgtgatttttaaaccggaatttggtttaaaaaaaatctggtggtaatatatgtgagaaatactttggtgtttaccttatgaaaataaaggattgtaagtaaagtttcctgcgcaccttataccagaattcagtataatacactactttctgttttcaaacagataaatcataatatagtctgtattatctgtaagatctgtcttgtaaaccacattcttgacaactatttgcttttgagtagtttgtattttaatatgtgacttttgtcttgaaaagtagtaaagccatagacttgtgcaaaac

SEQ ID NO: 135 - DNA, 4110 bp, Homo sapiens
cagtatcctggttgtgatatggtaatacagttttgcaagatactacccttaggggaaatgaggtaagacctggcatctctctgtattatttcttaattgcatgtgaatctacaattatttcaaaataaaaagtatgattgaagtaactatcaggaagcttagcctactgtggattaagacatcaaaattgcagcaggctttaacaaagctatactactacaaggatagttcacacttgaattagcttgaaacattacctatccatgtcatcttggaaagcagaaaatggaactttattggagtgggacactggatggccagggtttagcagagcctgcccaacaaaagtagcttcagaattggctttattctcaggaaggctcttcctggacagtggcaaacatagccatagcaaatactggctcactttctatcagccagcaaccctggtggaaagagggcctcttactcagttgtaccagcaagctgtctccaggagccggggctggagagacacccagtgctgctctaggccagtgtggctgagggtctgtctagtctgtccttgtactcacggcttccttttctcttgcagacgcccactattgcttggttctacttcctttatcccgattggccgtcggacttatgccagtgcggcggagccggttggcagcaaagctgtcctggtcacaggctgtgactctggatttgggttctcattggccaagcatctgcattcaaaaggcttccttgtgtttgctggctgcttgatgaagctttgaagcacccactgagtgggcggatcataatttacttcatcaaaatctcctgtaaatgagcatttaggtgttttcaatattttgcaattacaaataatgccacaatgaataactttgtatttttgttattattggggggttatcttttttttttttcttttttttgagatggagttttgctcttgttgcccaggctggagtgcaatggcccagtgtcggctcactgcaacctccacctcccgggttcaagaaattctcctgcctcagcctcccaagtagccgggattataggtgcctaccaccacatctggctaatttttgtatttttagtagagagggggcttcaccatgttggtcagactggttatctttagagtaaattccttgggagtgagattgctcttagatcagagtgtaaataaaatatattgtcattttaaagatattcccaaattttccatcctaggggtcatgtaattttacattccctccaggagtgcatgagtgcctatttccacacaatttcaccaacagagtatgcatcaagcttttggtttttgccagtctgataggtgggaaatgtacctcagtgttgtttttattgtatttctcttctgagtgcatacccctgttctttaaggacatgacccagaagcttcctctgcagatatcacctgtgctctcattctcttggccagaacttagtcacatggccttacctggctgcaaggaaggctggaaaatgtagtgagtattctgagacaatatgtacccggcctaaaatgtcaggcgttctactgctatagaagaaggatgaagggaagagtgggcattcaggacaacttgctttctctgctcggtgggtgagacatttttctttattttcaaggcagtaggaacccaggggaggaatttcccatactatgttgatatctttgtaatatttgatacccaacgtaaaatttcaataatataaacaagtaaaagaaatcatttatattgccatgctctaaacatcattccatctggatcagagaaggttttgtttgtccttttaatctttacttctttgaattgtgaaagtaatactacatattcataataaattcaaataatacagaagtatattatgtaaaaaagtgaagtcttcccaatctcttgctccaaggcagcttaaatgcaggtgtatacattatttgtgagttttgctattacaggtcgagtatctcttatctgaaatgcttgggaccagatgtgttttggattttggatttttccagattttggaatatttgcattatacttgctcagcatctctgatctgaaaatccaaaatccaaagtgctccaatgagtatttccctggagcatcatgtcagcactcaaaattcagattttggaacatttcagatttgggattattggattagggatgctcaaccggtattaacaaagcctgggtgagccatcttgcacatatatctttgcctccttccactggcgattcttaggaacatttcgtagatgtgaaagtgcaagttgcaaaggtgtgcaggttttaggttttgttcaaatccccaaactgctttcctgaaaggctgtcgctctcctgacagtgctcaagagaacccgtctggggagggttctgggaaatgggtgtggcatccctggtgctggattcttctgcagaatgtggacctacctcagcgggtcccagcaagaaccatgatgccataaaaatgttgtaaagtcccttgtcctatgttaggcttctgtgccattgtgctggcttatccagtgacacagggagccacagtcagattccacagcacagggcagaggctgctcgatgctgcagaagactcttcaaaagggccttcggttctagtcctagactgaccactaaccccggaaggggacaaacatgtcccctccctgggcctcagtttcctcttacttaccctaataggattggactggtgatcttaggtccttccactcctgcaacagtgattctagaattggttgactggtattttgaagaaagtaccagacaagctcattggcaggttatatctgttggtatctaccccttgacccattccatctgctatctgagatcagtcaggcaagtcagaaagcagttagcaccaccagaggctttggataaggcaccgtgggggttgaaagggggaatttgcttctagcccgattctgtagtgttagccccatgatggattccggctacatctgtacctaaacactctctctgctcttgttcagaattagtgttcctcttatctctcatatctcattgcctttggccaactcagggacttagctccagcagatgtctgccacctcctacgtcactggctccacgctctctcctgggtcatttcagcacatacacacacacacacacacacacacacacacacacacacacacacacacacacacacacacacacacacacacacacacacacacacacacacacacccctgttctgcagggcttcagcgtggccttcattcccgcctcgcctcggcctcttttcaattaagaagtgatgccacttgaggcagggtctgcatgatcacttcttgggtttgagtttgaaagctgccatccctgcgactgcccagggcctgtatgttgggaccgaagccaaacaccactgtcctccagggggctttcggcccggggcagggtccccagtgcccgccttcgaatcagactccgcgtttccgcctctccctgggcggacctgccgctagagggcgctcctcctccgcagctggcgccggcctccagcgccccagactcccgcgctgccgcccgagcctgaggtttctcacggcgttcgggattcgcgcttcggaaaccgggaacaaagaagcaagcagcacccttcagaaacagtgttctcgctctcctagcagctggcccgggcccggaggctggtgccaggagaaggcagaagagcccgggcagccggagtgggctacggggttcaggcagtgccaaggaagaagggcctcacaatgggcaattcagctgcctcccgggccgttgtccccgctgtcttcaaacaggggtcccctgtcccagctgccccaggaggagcgggggaggcaggcagggccgaaaccctccagagcccagagggggacgcttggtggccgctgcagttacataaccataggatgcttttgtaccgtggaccttgttctagcaggatcctttcggaattgcacttttacatgttgggcgaatttgtgtccgtgctgaagtttattaaaggaaaatagatggagccttgg

SEQ ID NO: 136 - DNA, 4058 bp, Homo sapiens
ctggtcttacagataagttcacaagcagctggttctctcttgtggatacatgggaccacagtggctgtagctagtttcctaagactccatctgccttatctgccagatccttcctttgccacacacacacacacagtgtctctctctctctccctccctctctcatacacacacaaccaaatgcttcattcttcacctagtcagaaacctggggagcccccaggagagctctgtccctgattgccacctgccaacctgccagtcttcttggcttgaggcatctcagtgctccagtgctcagctcaccttgccagctttcctgtagcctgattgggtcctggtcatactcatctgttgccactatttcatcagtttcggcctccatgccccaaaatgtgggatccttttttttttttagatggagtttcactcttgttgcccaggctggagtgcaatggtgtgatctcggctcactgcaacctctgcctcctggattcaagcgattctcctgcctcagcctcccgggtagctgggattacaggggcctaccaccgtgcctggctaattttttcatttttagtagagatggggtttcaccatgttggccaggctggtctcaaactcccgacctcaggtgatccacccgcctcagcctcccaaagtgctgggattacaggcgtgagccaccatacctggctgggttcctctgaattgtattttttttttttaagtaaagatggggtttcaccatgttggccaggctggtcttgaactccggacctcaagtgatccaccttgctcagcctcccagaatgctgggattacaggcatgagccactgcacctgctcagtccccttaattgtgatttactttaatatagtttcatttatagtggtggcccctttaatatagtttatcatttcttacagttgaagagtccagtgttaactgaacaggcagaaaactacacatttctctaaatcagcaccttaatttataaagtctcatgttggaaatgaagagaattgtgttgtttcttggcttttaagacttggaaaatatcttaaatggcctctctccatttaggacaaacaataaaaacttgcctggaataatcttcgaacagaaggtatgagataagtagtaagtaaacgtccacaggactccaaatagctctaaagatctgattcccctaggagacttgctgagggaaaatctaggaactaagatactgcaaaatggaaatagaccttcttggttgaccgaggctctagggtgaagcctgtgagtcagtgtctgcacctttggaaatagaggaaattagctcaacagggcttggggcatgtaggtatctgccaaatattttatatgaattgaatttggactcaatttttggtatgtataatatgtaacatgaagagaaaatttaccaggggaactggaaaatgcacttaacttttatggaggtgagaacaaaaactgaattaaaatctttccctgacttggtgtttcctgtgtatgctcatgcatgctagctataattttgtcatttctgtactgtgataattcataattcatatttacatgcttaaggtggggcctaatacagggcagggcgttatttacactgtagggtaggcattgagcagaagtggtgtgatattttttctgttcatttttctagattggggaaagtttaaattgaaattattggcatcactgatgataattaagaactgtttaaattccatttctggcgaattcctgaaggatatataatcaggaactctagggaaacctgaagggctgagctggagggtctagaattggggccttaacccgggagtccaaaaactttgccaaacacttatttccaccttccactcctcctcccgtgcccaccctcacagagcagtacttggcaccctagacaaatactgccagatctacagacatctaatgtctgcagatacccactccctgcctagcctccctaatcacataagactgggacatcttcgaaggcaaggataccccttgttcttactcatccttgtttctgcaaagcccacctacctcagggcctgactcattgtgggtcattcagtagatgtttgctgaatgaataaacattgtttgtcttttgttcttttaatgagtaactgctgtttcctttgcacccctccccaatacatttttctcttggctggcagctccttgtctgcttgctgaagatagaaccgcagaccacctgagcaccccctgcctcctcagctgctcactgttcttctgcatgtggccttcaggacctctgcccagcagttgtggcccatgtcaccctctctgctgttgtcaccagaaatttacccgcactgtaccctctggtccttcacagctcatttctcataatctattttaacaacaaagtttgagaaggttaagaatacaggatggtaggaggtggaaaaaacagtgggcgtgagcagtaagtcgatatgactaagctgagactcttctgagtcttctagatggaaggggaatttctccagagttacgggcagttaccacgttgcctcatggtcttgagcccctcttttaaaacccctgttgtctacattaagcggaagtctccccttggctgcattttgatgtcacttaaaatgttgctggggcccatgcttcctagaggaaggcaagcacagctagcattcccaggaaagccctcaactcaggggtttcattttgtttttatgatgggaaataactttcatttcgcggtcactgcccaccccactacttcctctttgaccccttcatctaagatgaacacatctgttattttaccctgtatagcaggtgcaaaagagaattaaaatggtgtctgaatccataaacggaatatattgcatagagaatcaaggccacagtaacaagtgacaggcgatcttaaaatattggaataatctatctttcaagttacagaagcttactagagataggggcaggtcattgttacaagcatctggcagtacattaatcatgagaaattaattaggccttaatgtgggtctaatgagaaatccttattatccatgtttgcttatgggctttgttggttaattatcaaatggaacactagagaccctaaaatgtgattataaaatgatttttaaaagtcctttcttggagtgtaatattctattaatgaatcagcagaaactgaagattatctgctttggagatgtgtaacaatccaatgtaattacaaacctgtttagagaggaaccatttagctatatatgatcaaaatagcccttataactgttctctgtgtatgtgtcttttatcttagttttctgtgttcctgggaattattttcttcctggagctcactgccggagttctagcatttgttttcaaagactggatcaaagaccagctgtatttctttataaacaacaacatcagagcatatcgggatgacattgatttgcaaaacctcatagacttcacccaggaatattggcagtgctgtggggcttttggagctgatgattggaacctaaatatttacttcaattgcacagattccaatgcaagtcgagagcgatgtggcgttccattctcctgctgcactaaagatcccgcagaagatgtcatcaacactcagtgtggctatgatgccaggcaaaaaccagaagttgaccagcagattgtaatctacacgaaaggctgtgtgccccagtttgagaagtggttgcaggacaatttaaccatcgttgctggtattttcataggcattgcattgctgcagatatttgggatatgcctggcccagaatttggttagcgatatcgaagctgtcagggcgagctggtagaccccctgcaaccgctgctgcaagacactggacagacccagctttcgggaccctcccgcgtgccgaactgatcttcgagctgcatggacctaatcacagatgcagcctgcagtctcgcctaatggagctgccattaggggagtgtaaaactgggaaatgctgctcactgacagaatt

SEQ ID NO: 137 - DNA, 4417 bp, Homo sapiens
atttccagtgatacagctgatggaaaatgtgtccaggaagggaataagtcttcagtccagaaacaatatagatgtgatgtgtgtgattatacaagtacaacatatgttggtgtcagaaaccacaggcgaatccataactctgataagccgtacagatgctctctgtgtgggtatgtgtgtagccatcctccttctttgaagtctcatatgtggaaacatgcaagtgaccaaaattacaactacgaacaagtaaacaaggctattaacgacgcgatttcacaaagtggcagagttctggggaaatcccctggaaagactcaattaaagagcagtgaagagagtgcagatcccgtcactggaagttcggaaaatgcagtgtcatcttcagaactgatgtcccagactcccagtgaagttctgggtaccaacgagaatgagaaactgagccctacaagtaatacctcatatagtttagaaaaaatctccagtctggcccctcctagcatggagtactgcgttttactcttctgctgttgtatttgtggttttgaatcaaccagcaaagaaaacctcttggatcatatgaaagagcacgagggtgaaattgtaaacatcatcctgaataaggaccacaatacagctctaaacacaaattaggtggaataatgactcgagcaggaaagcagtagaagaggattccttcaccacagtttcacctttacgctgtcagacaacttcctgccacagaagaagtcgttgatgtgatttttgaggaaatgacagatgtgactttggaaccaaacttgtaataaaaggaattccaaatggacaagcagtaatgatatttaaatattttgagtgagggggagtgggtcaaagaggaagtagaggtgtaatcctgtattaaccctctgtcaccccttcttagtgtcgagtgtatttattaataaaagcttattagagtgtagaaatgccagcaagagttaagaaagggcttttcaggaactattctaaaagtcataaaagggtcacagtcttaagcagagcttagttttcttctcacttgtcaaatgcagactgtgaggcctccagtgagaaatgggaggcagttctgggagggggttttttcagtgtcaccaacagagtcaacaaggaaacataattagagggctttgaaatgatctactgaaatacctaaattgatagaaattaatcatactcaatctaggacatgttcctttactccttaaaaaagaaaggaaagatctctaaattcaaagctagattgtaaataggcattcaagaagtattgtcttaaatttacgatgaatttcttgtgagcagaggacgaaacaggtgaattctcaccagactcaaaccagatctcaaatcatagtaatgctaaatcgtcttccgtgttctcagaggttcttttcagtgtctgtcagaacttggcatactttctccatagtacgtagaccttctaatactctgctaaatgaaaccacacttgttatctgaaagtgtgtgaaagaaacaatgtatgaaaatttacatttgatcatccggcattggaaatagtttgaactatttccaaaaatcccttaggggatgaggggtgaaatttaaaagctcctgaaaatgagtactgctgtgttgagcttttcttccctgggtatattaatttagttatatttagcagaagaggaatataaccaaatgtgactaaaatatagcagaaactcaggttgtttgtaaaaattttaataacaaatagcatttggcaagtctataggattcttcctatctggaaattctattttgttagagtgcgataggacatatggaaaaccaacacaaagtgctttagcattaaaactcaccatcaaatagatgtaatcttattaattacacattttgtattttaattatttcaaggagtgaagaaaacagggtgtttttgtttttgtagttctgattactcatttatgcattgttttgtttaagtaaattctgcctacaagtgaaaaggtcggtgcgctcttctgtgcaccatcctcacggtgctatttccgaatatctgaatattgatttctaacacctggatgaggctgtgaccgatcaacttggaacactgtaaaggttttcgaatgggatacgctgtaggcacgttttaagaagtattctgttcctaaagtccaggtatgattggattaatatttataaaattattattaggaattatttaagtggggccaggcatcttgcaacattttctgatttttttttctttctttctaatctcattttggtgatatttaaacaaacataaatgattgtaactttgcagcttttttatttaggtagctttaatttatttatgaaagttaatccatttctgatacgtggtttttaaaaatatgaaatggatttatatatactatattcctcaaatccactgtatgtggacttatattcattttctccttttttcggaattgaaacattttaatttcaaattcaaatagaacatttaaaatgatttcattattattacccatactgttgccactcatattgtaagtcagttttttcatcgctggtacaatgactcagtatttctttataaaaatctgttgttctgaaaatcaacaaccttagaaggattttgtcttagaaaatttccttggctttagttttatatcatatttagaaaataataatgaaaagcatccccaaaatttcaatgatgtgaatttttaaattacctttatttctttaaactaattccattgattgttacttaaattttccacctggaatcatggatttaaaatttccccacctcatggggaaaaaactaacccagaagttcaaagcctttaaagtttcatctgattctggccttagaattgtccttaaaagctttctcctggccgataggaggaagcatatatcaaggaggttctttcccttcccattatcattttgtggcaagccttaagttaacaatgtgtctaccaagaacaattgagttttctaaaagtaataatgaagattatgcaattctaactgtagaagagatagctattaaaataatcagtagcctgggcatagtggctcacacctgtaatcccaatactttagaaggtcaaggctggaggactgcttgagtccagaagtttaagaccagcctgggcaacacggggagaccctgtctctacaagaaattaaaaattagccaggcatagttggcacgtgcctgtagcaccagctacttgggaggttaaggtgggaggatcacttgagcctgggagatagaggcttgcagtgagccgtgatggcaccattgcactccaaccggggtgacagatgaggtcctctgtttacctccccccccaaaaaaaaaattcagtaggaattccttcatagaataacatgttatttattggtattgacttcttattagacagagctcatagtatttgttttctgctccgaacacttaaaaaatactaagacgtgatagtgaaaatagctttgaaaagaaactacatatggcaaaggtggggaggggggaagatgatgcattctgatcattataaagaatacttttcagggctctatcattttctccctttctctaatcatccagaatatggcgggtgtcccagtgttcaacagtatcatgctaatattccatttgatcggtagtccaagttctttggccagatagtgcaatgttgtgacaccgaccgaagcctttgttctggatctttcttcctattgaaagtggctgctggtggcttcataattttctgttttttttctcacaaagtaaatggtgggcatccatgtttacattgcaccttcccgtgctgtaattggcttgacaaagacaagcaggcttctctgttgagacttattgtgtttttagttttcatagacacttatttaatctttttaaattgtacagcaaggtgctctaagtaatattcgataaaatatatttaatagaaatttgcgtttgatattcatgaacatgaatacatgtatttttttaagaaataagtattgtgtaacactatggcattgcttctatagccaaagtataaaaatttctggaatactgacatgtaaagactacagttaattctgacactgtatcttattaaaataggatgatttgcattttgtaaaattatcctgcacatcaagctgcatgccttaaagcggaaactctaggactgtgttcatgggagagcagttcatctgttcagaacagtgaggcaaggtctgtagtgcttctttaactacctttggaaatactgtacaatgttagaataatttattttgctttacaggagtttgtcatgtattgactttaatattgtattttggtaataaattttttgtt

SEQ ID NO: 138 - DNA, 4815 bp, Homo sapiens
attgccacgtctgtctgcctgtcagcacagcgttggagccccttggtagacttacttgatgccaagtacccccctggtgtctgtggtcattgtgcatagatcttggtctaaaaggctgcctgaacttcctccatacgtgtcaccactgccaccctccctcaccccaccccaaacacacacacaggccttatctctaaactaaaagcctgtctagttccacctttcccactgcagtcaaccctcccataattataataattgtggccatcactgaatggccacctctgtgtaccaggccctgggtcagagcatgtcataagcgttatgtcttggaaggggctcttcatttctccttttttttttttttttttgagacagagtttcgctcttgtaccccaggctggagtgcagggcgcgatcttggctcactgcgacctccacctcccaggttcaagcgattctcctgcctcagcctcccgagtggctgggattgggtgcccaccaccacacccgactaattttttttttttttttgtatttttagtagagacggggttttgccgtgctggccgggcttgtcctgaactcctgacttcaggcccacctcggcctcccaaagtgctgggattacaggcgtgagccaccatgcctggcacatttctccattttttattgaaaaggatactgaagtcagaaagaagaagtcacttacttaccccagagcacacagctagtaagtggcagaggcaggacttggaccccagctggctgactccagagaccatgttcccacagctggtggggatagcaggtccagccacaaagctggtagcactcggcccctcccgtggagaagctcccagtctggcagagcagacacggtgcagcacaaagcctctagctgagatagtgaagtaaaactaacatgtacagggacatctgaggaggaagggattttaagtcaaagtggtggggccaggaaggctcctttctggggtcagaggagactccaggaccatccttcatgtaatatacccattggtgctggttccttatctaaataaaggtatcagccaacattgagcatttaccgagctccaggccctgtgctaggtgcttagataagttacctcctggagtcctcaagccagtaggcctagatactcttattttctaccatcttacaaacgaagaaactgaaggtccgagaggggaaacaactggcgtgagtgcgcatgcctctgaagtgatggagctgggatttcatttactcacttgcccatccgatgattttattctatccctgccacccgccaggccctgatctggatgatgaggggccagcagtgagcagcacagacaggcctttgcgtcatgagccttagatctcatggggaggggagccacagggaacaaacagacaagagagcaccagagggtgagggacactctgcagagagcctaaaacacagggcatgataggagccatggggattattttggatttgacaacccccgggtctgtccaatgccagtgctggagctcttggccactggtcctcactgtcactccctgctgagctcctgcaacttttggttgaggcatttgccccattataccttgttttatgtacttatgtgcttttctgggtttttttcttaaggggtcaacctcaccttattcttttctgtatcctagtggcactgaatacagtgctagataatgacagatgggagagagctggggattccattggaaggggcacccaagcccaggcagtggcactggctgaggatggccagttggggccttggcaccatgatgagaccttttagaggtgaaggctgtgttctggtgacaccagtgaagagaagggtcagccagtgcagggccagtgggaggagcacagtgtggacggaagggctgggacaggggagccagcaggagcccacaacatggtgctcctgtgaggaggtcagggcttagcctagaacagcagcaggggcacaaaaaaacacctgagaaactgtatgaagaggctgctgctggacttgggttggaggtggccctgagactttgagaatagttatgctaacaaaaaggaggagttttagaaggaaagctggttgtgtgggagataaaaagccaatagccttcactgagtgctcatcatgcatgaggccctgtgctaaaatctctgccttgtctcactgaattcccattacaatccagcagggtcagtgttctcatgatgcctgctttacagacgaagacctaaggccagaggctaagccatttgccacacaccacagaggcagtaagtggcctagacagggcttgatctcccatctgtctgcccagtctgtgcccctccaaccaccccacccccaatccactacctcctgcttttaatgacttggatgtggaatcagttacatctgagaacaaacgacatagtctaggggctgcagccctggggagaatgtgtgcctgagcccgtgaatttagggttttgggcacaaagcaaaatttggagctatagaagtggggttttactaaggagagaagagccaagaaattgaagaataatctgaggtgggagagagggcaggaggcagaagatgtcacccatcagaggctgcagagggcaggatggatagatgagcagaggccaaggccttcggttggggagaaggagatcttggctgagctcaaagggtggtttcctggaagcacaggaggccaggctctaagggttgagaatacaagtgaggaagtgaaaggagcaggaggctcttagagggctggagttttgaaaatcaagaaggaccaaggacaccatcaggttgagtgccctcctctcaaatgcagaaactgaggcccagagagaggagtttgccccagaccacggaactaggtgttctgacacccttttcattgcaccatgctgcctctcttgacatgaagaacagagaaagaataaagtgtgaagacatgccgtggcgattttaaggtgcacagactttatctgttggaggcagaaggatgcctcgctggaggtacgagagcggtaaggttgaaagagaaccagaacattagttcagatgttggctgtggcgtgtaccagtcaagggacttaagtgacttcaccctgagcctcactttcatcttctgtaaaatgataattataccataatgtcaataatattaggttgatgcaaaagtaattgcagtttttgccattggaaataatggcatataaacctgaggcatttcaatagagagaggagacataccaaacacagagcttctcaacggctatgaaaagatgatgagaaagtcccagagaagaaagaatggagagacttttctttcttttttttcttttcttttctttctcacttccattgtattataatcccagcccccaatgtgcattgtgggtgctggtggggcagacatgaccctatggcacctgcatgacagagggcctcggcctccacaaatgctcacaacttgtaaaagtcttttcacagggtcagcatccagcctgcccactaccgttgcccgttatcattgcaggttaattttgttgcagctattgatgtgtacgaagatggagaagctggtttgctgttgtgttacaactacagttgcatctataaaaaggtttgcccctttaatggtggctcttttttggttcaaccttctgcgtcagatttccagttctgttggaaccaggctccctatgcaattgtctgtgctttcccgtatctcctggccttcaccaccgactccatggagatccgcctggtggtgaacgggaacctggtccacactgcagtcgtgccgcagctgcagctggtggcctccaggtcggatatatacttcacagcaactgcagctgtgaatgaggtctcatctggaggcagctccaagggggccagtgcccgaaattctcctcagacacccccgggccgagatactccagtatttccttcttccctgggggaaggtgaaattcaatcaaaaaatctgtacaagattccacttagaaacctcgtgggcagaagcatcgaacgacctctgaagtcacccttagtctccaaggtcatcaccccacccactcccatcagtgtgggccttgctgccattccagtcacgcactccttgtccctgtctcgcatggagatcaaagaaatagcaagcaggacccgcagggaactactgggcctctcggatgaaggtggacccaagtcagaaggagcgccaaaggccaaatcaaaaccccggaagcggttagaagaaagccaaggaggccccaagccaggggcagtgaggtcatctagcagtgacaggatcccatcaggctccttggaaagtgcttctacttccgaagccaaccctgaggggcactcagccagctctgaccaggaccctgtggcagacagagagggcagcccggtctccggcagcagccccttccagctcacggctttctccgatgaagacattatagacttgaagtaacagagttgaatctcatttgccatctttagttttcttatggaggtttatactctttaaacagttctgatgtaatttctcaacaaaatgtggcttttagcctgtcagtgatctattggaccaaaccttctgcacactcggccagttccctctccaatgtccggtgccatctttcctgacctttgtttctttctgttcaggaaccatcagtccccttgtaataaaggtggtagatttcattgaggttttagattgaaactttgaataaatcaaaaatactcattctt

SEQ ID NO: 139 - DNA, 3867 bp, Homo sapiens
aaggggccctccgttctgaccactctgttgcaagctgaggaagcagttctgggaggttgggtgacttgcctcaaggcctccggtcagccagagtcagatgcagaaccctgctcagtctgcaaaggctcagggccccagagggaggatggtggaaggcacacggccccagggacggcgctcagaggcacagcgtggtgtgttccagggctccagggacagaggggcagcttcgctggggagttcctttggggctctcatggaaactaccggaggaagaggaaactgagggccagtggtgaggcgcctgggccgccgagctcagctctctctgggcacagcctggagtctgcagggaagtgggagaacccaggcaggtgctggaggaccagccaggcagtgcagaaccagagggcggggagaccggccgggcagtacaggacccgggggccgaagggatggcatggctgggcagtgcagaaccagagggcggggagactggccgggcagtacaggacccgggggccgaggggatggcatggctgggcagtgcagaaccagatggctgggggaccagccaggcagtgcgggactaagagggccagggaatggagctggaactgaagaacaggccagctcagccacggggcccaggagagggttgagccagacagagccacacatttgggcgcaggcaccaagagaaggaggtgcaggtgcatgaggctcagccttctgcagatgagacttagggggacgcgagggctgggcagaattgggaaagctgagcaggagacgtctcgcttttatgtttggctgaaacatgaaaacacgaagggccagtgggaaagggacctcacagacacgttgggcccgcagtgtctcttgtctcgctcaggcaagtttcaggctgaaaaagtgcccagaattgggtgaggtgggaggagggaaggggagagggagcctgtctgcacctttctcttcaagggagaagttgccttcggtcgggcaggagcagggcctcctctgctgtgtgttgtttattttctgtgcctttccttcccctgagctattctggtgcaagagaaacagtgagggatgtggggcgtgaggtgtccccaggttcccgggccggtctgcagtgccctgtcccgtgtaaggggctgacgacgaacgctggttggagcagtggtccgggggcgtggctgaccccacccaggcagggcacaggcggaccctggtgtcgatcgcctggtgggagcgtgtggacagcatgagacccgctggtcttggggaacacgctctgggcatccgtgtgggcagcactgcccaccatccttcgatggtctcctcgggggtcttcgtccctgtgcatggagccgtcctcactgagtgtaccagctcacaggtctcccaccttcaaggggtctcccaccttcaaggggtcaggctgaccctgctgagccagggttcacatagcctggctgcaggggctcctcacccactcctgggtctgatgtcctcacctgggctgtcctccgcttctcctcatggtcacgcagacacctcaggcccattggatgccgcaaaatgtcgttcaggtcccacctggccgagggctgtcccttctgcaagctccctccttggtcccgggtgctggcaccagcccatccaggcccatccaggccctcccctccctccaacacaggccttgctggcacacatttaggggtcagaccacgccagcaggagctggatgaggccacagcgagggagctggcagcaggcggcccctgagaatgtgggagagaacacaggagagagacggggcggggggggccacagccctgtcggggcagctgtgtcgctgtcaggatgtgcccgaagcactggtccctgagtccacatgtttctgttcaaactcctgtttggaaattcgggaggggatcaaagtcctgccctccaaggttcccgttgcagacacagctccacggtccaggctggcccggcctgcgcacttgcctgcctgattctgctccctgctgccgggcagtcactccttcatctcagtccctgggtcctctccgtcctctgtgcgcatcttgctcacagcctggttgctccatttcctgcggcacagctgccctccccacacagtctgtggtcccccctccatctcctctgctctcgctcccacccactctgtccttccctcattcctctgctcgtccagcccccgccagtgtgttctgccactccctatcctgggtttccaggggcccatgtggagggctgcaggggtctccctgttgtcctggaggcacctcccagagcatcatccctgcccagcccgcaggcccaacatcctccgtccagaccctgaggggctgtccccagaggcagcaggtcccacgcgtccgttcctagcgcctgaagtccaggcacatgcagcctggccttttggcagtggggctccctcgtagtgttgagtaggatgctgggggtcccccgatggagtcagggtgctgcagggggtcacacgctgtcccgtggaatcagtaatcctcatgcaagattcttccaaatgcacagcaactgcgtgagacagaacgtgcgtgtgggaagggcagcgatcccgtgcagtgtcacgcggcccctcggctccctccttggcctgtgcttccgtttctcctgtttccgaggtcaaatgatgcaaagtgtccttgaccatgagcccacgggcatgggacaaggtctctgtgtttgcactgtaagccacggaactgagtcaatgcgtaactggccctgtccccagcccaggcactttctgaacccaaaatagactcagagggaccgaggcagctgccggccctacaggagcaagggggaggagagcctgggctgtgcacctgcaggagggatcctgccagacccccgtaaaggccaggcccccggaagcagcagtaccagcagtcagtgcggcctgggaggggagctggctgcatgcttcacgcatccccgctggaccagtgcatgagcaccttttgggtaaaaggtgcaagtggtgtgtgcgtgttccaggcagcatgagaaggtttgccctgggtgagcccagctcctgttctcctccacctgttcaatattcacaatttggtgtgattgttactcagctgcagacggcctcctgaacgccattgaccgcacatgcttgttgattctgacataggtgttgaggacctagccacatcgtggaggcccccatgtgggtgtgtgtgctctgcactgatctgggaatgactgcgtgtgccccatcacacggatgctccaggatgtacctcagcagtcccctgccttggggctctcgtgctgctcccaaacctcttctgtcagcacagacgctgcgtttgcatctcggtcctgccccggtgccctggcactggttgtgcagggcaggtaggtgggatggcagcaaactgcggtgggcaccgcgtcgcaccaatgtgcacgtgttcacacacagataggactcggaattgtggagccatcgtattcgtctttcccttttaacaatccccccttgaaggccgggcgcggtggctcacgcctgtaatcccagcactttgggaggccgaggcgggtggatcatgaggtcaggagatcgagaccatcctggctaacaaggtgaaaccccgtctctactaaaaatacaaaaaattagccgggcgcggtggcgggcgcctgtggtcccagctactcgggaggctgaggcaggagaatggcgtgaacccgggaagcggagcttgcagtgagccgagattgcgccactgcagtccgcagtccggcctgggcgacagagcgagactccatctc

SEQ ID NO: 140 - DNA, 3419 bp, Homo sapiens
gatcgcaaacccggaagacgtgttcgggcagctggagtgtacgggcccgcgggccacggccatgcagcccctggaggtaggtctggttcccgctccagctggggagccgagactgacccgctggctgcggagaggcagtgggatcttggcgcacctggtagctttgggcttcaccatctttctgacagcgctgtcccggccaggaaccagtcttttctcctggcaccctgtattcatggccttggcggatgtatgagagcacctcctttttctcaggcctccaagccagacatgaggcttactggctctctcctatgttcacagttctgcctctgcatggctgaagccatcctactcttctcacctgaacactccctgttcttcttctgctcccgaaaagcacggatccggctccactgggcagggcagaccctagccatcctctgtgcagctctgggcctgggcttcatcatctccagcaggacccgcagtgagctgcctcatctggtgtcctggcacagctgggtgggagccctgacactgctggccactgctgtccaggcactgtgtgggctctgcctcctttgtccccgggcagccagggtctcaagggtggctcgcctcaagctctaccatctgacatgtggactggtggtctacctgatggctacagtaacggtgcttctgggcatgtactcagtatggttccaggcccagatcaaaggtgcggcctggtacctgtgcctggcactgcccgtctatccagccctggtgatcatgcaccagatttccagatcctacttgccgaggaagaaaatggaaatgtgagttcctgcgaacgctgaatctaggtgggacgcttgccttgaacatcatggttcctttggtgatctataagggatctatttaagaagtggtcaggttttcgcacttcttggctggtccagggactgcagaaaccaaagctgctattgttgaggaataattcagtgggtcaaaatggggagatgtactgggtatgagtggaaggtgatggagagcctgatcctgaagcctctacttgatgagagacagagttttgggtggtgatagtgatgtgctggtggtcatttcttgcttgtgtgcctgatgaaaaactgggttcctgtaagttatgaatggcatccagggatatttgggttacttttaagaaagcagtgtgatgtagtggagagagcccatgggtcttatttatgggatatggtcctcttaggctctgttgtacaaccttaggtacattccatatcttaagaccactgtttcttcatctgtgaaatgtttctaaacaatctctaagtcccttccttctctaatatacagcgtctgtcaggtcgatgtctcagaacactctcccagctgtggaccacgtggaccacttagcagactcagggggtagttctttactctccctttactaccctggagggacagctctgcccttgaggcccttcagaaatttgtgctgatttggtccctgtgccagggcacagggggtcaggcactgtggaaagaagggactcaggtgagggtcttctggactctaagacggtaaaggcactaaggtcactttaaagcttttggagaagcaggagggcattggcttaaccaagccgaaggctgctggctgggctgcctagcccagctaagatcttccttcagcccacctcaggatccgggcttgagggctgcagggcctgcgtgcgctccctcccccgaaatcacttctcagggcaaaggagccccaggcatctcatgctttgcccttcttagggctcaggttcttgccttagcacatagcttctgggagcttttttgaagcatttcataagggccaaggaagtggggcagggcttttctgatccaaagaaaacaaagtttctctggttacccctcttcccttgttatctaagctttcctcagttgtcatctcttcccagctctttggtccaagagggggctgagtttggtgccagctggcaaatgagggctggactctcttccctccagagaccaccccgctccttgctgcagctgaaagtagttccccaggctgccctcggtggtgaggactggatgctagactgctgagctgtggtctgggctcagttgagaagataggatctcccttgatcatggcaaggcctgacaacagctgagccaggaaagtgctgctgaggcaagtcgacatagctcacagggaactctgggaagcctggggtgtaggcgctggagctccagttcccaggagcaggggcaggtgttcctagatgttagtgttgtggatgtccttggtcttctgaagattcaggtcctcctctccgggtagcttagaagtaaggaggttggtttgattcaatagtacaagaatggggacagcaagggcagaagtgtcctctccacgtaactcattatgcccctcctgggggagattgcatctccaggacaagcatctaaaggaggcccctgctgtgcagaggggtattgttcctgtctctttcattgtcctccctcctctcaaactctccagtgtggtgtgaactcagaagaaacggttactggggctgcatggagaatttcacctgcggtgattttgatccagggactgcatctcctctttcctcatcacagccagtgctgagaggctccttctacctgccgcagggtaggagggccaggcaaagttcaccagcttgctctaagagcaagcaggcaatgccgtaaagcctgagcctgcctgaggtgctgcctcctcccaggtggtgcgggggctggtgggcgggcgggcaggcgtgctgacagccggcagtttgcgtgggctgtgccatctgatgtctattcccagccctgggaggaagggggagtcatttatattctgcaggaggaaggggccccagctgtcgcctttctgaccagcaggcctggagggcaggggcacagagcagagaggagggcactggtggtctcctgcttagcctggtctgactgcagtgtagggaataggtcaccaggaggagcccttcatcctggcaggccggattgtggagggacttccctccccctcttttccatttctccctccatcaccacctgccctcacatcctggggcagcagctggacagccattagacctcagtgccagggcactcttcctccagctgggatctcagtggctcccagctgcatgggctcctgcttgtgtgttccctcctccgccatcctctgttccccgcacctcccttattctgctcatgtctggggtattcacttggctcctcagcaaggaagcaaacgccttggaggagaagcacatggttgcccttttgtccttgctccctggctagggaaagctgctagtggtcagcctgttttgccttttttt

SEQ ID NO: 141 - DNA, 3691 bp, Homo sapiens
cagaacagagccgcatgttttctgattgtgaaggtcttcataggtgggtgggtgagtatgggaagcctgaaaggagacctaggctatgggactaaactagctgccccaggcagaattgttaagtgagtgccttccttatgagggcccttcacttaccctgcctcttgccttcccttcctctcctctctgtgcccaaagccttcctctcagatactccctcatacctttcctatcctgctctctgcctcaaaattaccccatatttaaatttcctgctttattgtaccatggtctctagtgatgatcaacagaaaggcaaccatatggttttggttaaagtaattcagactaagatgttagtgactgaaaagctggggtcagtagcttggcagcttgcttctgaaaagttacacacctctgctctctacagagtcaccaacctgtctgtgattgccaaaaacagcagactcggtgctactcccatacaattatgaagaagagattgccaacagcatggtttcctaattttcattttcacactgaactgctagactacatttgacatacactggtgacattcaaaggtatagttctggtaaaataaaattgaacatatggtggcaccagcactgagagcttggttcttttcctgatcagcagtttggctcttcatcagttaactgcctgggcctcagtttctcagctgttaaattgaaggaggtggatgagttataacgttctttctagttcttacacagaatgagtttcttgagttccaatatgctggagaagaaaaatagaagagtttgaccactaatttataacagaagtagtatataccaggacacgtgataaattatagacattttctgttagggagacttgtctgaagactagttttattactttcatttcttcctcaaagatcctttcataaaaaacaaacaaacaaaaaacaaaaaacaaaaacaaaaaaaaaccaaggctgggcgcggtggctcacgcctgcgatcccagcactttgggaggctgaggtggacggatcacaagttcaggaaatcaagaccatcctggccaacatggtgaaactctgtccctactgaaatacaaaaaactagccaggtgtgttggcgggtgcctgtagtcccagctactcgggaggctgaggcaggggaatcacttgaacccgggaggtggagattgcagtgaggcaagatcacaccactgtactccagcctggcaacagagcaagactccgtctcaaaaaaaacaaaacaaagcaaaacaaaaaacctttcactaatttcttcttggcttgttcagttcctggtatagtgtccgtgcttctctctccccactgtgaatctcaaatgtagtcctgtgagtcattaaatatatttttattattagaattacagcttcatgtataaaatctgaatccttttatataacagttgtaatgacattctgagtaacaaagtcaacatcttgtacagattcctttctcattagttatcacaggctggtgggggaaaacttgtttcctctgttatatattggaacaattcaagacagaagggaattgattttattgagggtgtcaccgtactgggacatttctcagaaaaccctgagactgctttgggtttgggggagggagaagaaagaggattttgttttaaagtcatttctttggggtaccgaacaccacatcccatcactcatcattaatagatgttttgcccttttggattctggcttttaactgttttggattctggatacttaactgttcccaggcaagtaaattgatctcaatattctggttatttattgctacataacctccaagcttagttgtttaaaacacagttgtttattattatagttcacagttctgtgatttggccaggctcatctggacagttctcacttggggtctcatacagttgtggtgagatgtagttggagttggacttaccggaaggccctctgggcaggatgcctgagatggtatactcatatgactggaagctgatgcttgctgggagcttagccagagttgtcactggagcacctacctacacgtggcttcttcctgtctctaagtcttaaagaagcttccagccagttaaggttccacttagaactggcagtgccacttttatctattccattggttagagcactcatgcagactgctgaatttcaaagggtgaagaattagaagccaccttttgatggagaagtgtcaaggtcacattgcagaaagtcatgtaggttgtggccatctttgaaaaatatagtctactgtattaaggcactgagccttaatttcttgtttataaaggaaagataacattaatggtgttgtagttttaaagattcagtgagataatgttttattcggcataatatctcaatatttaacaaatagtgaatatcattactgttgttgtctccagattttatactggttccatacagggctatagaacttctagaatgccttagtctagtactttggcatcattactactaggtaatgataatacccttaagatctgccaagaagatgaggcaaatggattcaatagattttatagtgacttgttaggaaagaactcaatggaaacggtggaatgatttgggagaaccaagtcatttttctgttttctttgctacaaaggattagaaaagcctcagttacttgaggccaactttctcttttgatatgctttcagatattaccttgtgtctttaagtgcaagtttatccagggttgatggcaggatcttgcctctaatttgcttccacagggcttaattcagagaggagggagactcaggaaaccttggggcggtgggggagggggggcatcaagtaggaagctttatcttatgattcactataaattgcaagatgttctggaatgatgatacatcagcagtttataagtcataatttttgttttaatttgctagacatctgttagcttcgatggcaaccatatgggaatctaaattgcgttttgaattacagggagatggtaggaagaaagctaaatatggttatgaaagtgtcatatgggaaaagtgtaagaaaggtataaagtggggaaagtaattgaatataggcttgcttagtgtggccactccctctgtggggcagtatgaaggcgcagaagcattctcacttgatatactccgcagattgaaatgaagccaagtggggagaagttggaaaaccaaatcatgtttcaaccaccataaacttgccaaaatgttgcactcatttagatgggtcactttgttttaatgtccacagtaataggtagtccctggcaaaaggtgaaagcaatctgcatttttaacagaacttttcactaatgatgtttttcttgtaagcaccccaaagagtcttccaagaatattatatctttgtgacagatgaagaaattggagtacagagatgtggagtaacttttgaggtgttgaagagcatgtcaaggttcagtttcagagtgttaagtctcttccgtaatgatagccccagctttttgggtggagacttattttagaagatgcttgttattctaaaataaaacatcaagtaagtcatttacatctgttcataatcgaaaagtgataaagtttttgcatatgccacaattaacaccacccacaagcac

SEQ ID NO: 142 - DNA, 3727 bp, Homo sapiens
aggagtgatttctgaaattgtttagtgcagtgaggaaaagacagtgggatattacaatggagagacgctgggcattgtgcagcaagacggagaagtcagggagggctgagctggatggaagtggtgggaaggagccagcctgcagagaagcagagcgtgtgctctggcagagggagtggcagggcaaaggccctgggcaggagcagggtcagggtcacagctgtgtggctggagttcagtgggccagggggagagtgatggaaggcaaggtcaaggtgggctggggccaaaccctgcagtgctttgtcagccatggcaaggatttggggttttattctaagtgcatctcagagtgccggcatctttatcttggggtgatgttggcatattcccaccaggataaattaacattctcaccttaacagatcattgggtagagactagaaatgtaccgagcagtgcgcaaagaagatgaggagggttctacagtttctccagatacataccatgacaatttgtttttttaaaaaagaagaaagcctgcaggtaagtacagccgaaagtaaagagggccacagtagaggagggaacaatgccacacaacatgaacagcaaggagggagcattccattctgagcagagggacgcgaggaggtggggcctgaaaggacacaggaggcactgaccccccgaggcaagggagatgtgccttctctgggagacagcggcttgggatggtggtggggcaggttccccggggaagacctggaccaggggctgggggtgggagttggagaggagagtgcagtcttgggagcagatttaaagttaagtggcctccatggaccccacatggcccagtcagtttggaccctcctgggagatcctgagttctgagcctaggcggtcttgtcctgcctctgctgagcacccgggccatggcagccatcaggatgcaggaaggtggggtcccctcccagcagctgggaaagcatgaaggaaattcatttctctgcagcagctatagtgatcgtgaggagaagtaactgaaaaggtcagacacacacttcacttacacagctcataagtcagtaaagaagcaaagcctgagacttcctcaggaggtgagtaaatcctctgccttgccaaggcctgcaaagctaggcttggggccggccagcctaggggagtggcttctcctgctctagctcccagtgccctctggcttggctttctgaagagagggctagaggagctgtgcctctagagttcaaaagaaaagtaccttagggagggagtatagggttgcagtcaaaagaatgggctctggactcataaaaacatcagttcaaattcagactcataccacttatttgctgtgtgattttgggccactcacacaacctctctgagctgtcgtttcccctccatactgtagggctgataatagtacccaaaccataagtcattgagaggattcaatgaagatcatacaagtaaaagagttagatcaatgcctaggttcccactgcatattggctgtggttgttatctttatcatttaaatcatttattattattaacactttaattgtacagcctccaaaatgacccctgtgatcccttccccctggtattcatgcctgctatttaaccagaatagggttgatctgtgtactaataggagattgtggggacagcagaatgtgacttccaaggctaggtcctgaaagatgctgtgactttcgcctgagtctcttggatcactcgctctgggggaggactgctgtcatgtcatgaggacactcaggcatccccatggaaaagtctgcatggtgagcacccgagacctcctacccacagccagcattaacttacctgctctgtgagtgaggcagcttggaggaagatccccccaccccagataacccctaaatgacagcagctcccaccaacatcttctctccaagctcatgagggagtgtgagtcagaaccacctagctaagctcgtgaattcctgacctacaaaaaccgtgcgagatcacaaatgttcattttttttattgaagccattaagttttggggtgatttgtaatgcataaataattaatacaattattatactgaaaatttctcactaggaagtggccactcattaggcagccccagccttcaggctctgtccagcccagtaaaagtcagtcatttttgtgccaaagatccctgaaagagacagcatcatgtttgggtatcacctcctccagagagccttcttggccaagtcaagagcttttctccatgtgcccacagaaaggctctttgtaatcctctaccacactgcattgtcattctgggaccaatcatgttttcatctaggctttggctactaggaggctcagacccaaattttcaggccactgcgaagactctcaatttattcttgccctagtttactcatctatttgctttgtcctgttttgtgtgtcccttgtgtaaattatcacacatcctttgtgaaatgaggcggcatgaagcaagtccttgctgaaggtccagggcatggcaagagaacctgagtttaagaagcagacatcacctgctggcagcaggcagtatcctctcagtcagccttgatgtccccttccctggatcctcacttctcatggcaatctccccgtctcctcaggtggggatgggatgaacaggtttgattagcccttcactgtaaatgcctgtcctctgtcactgcaccaggactgatatggtttagttgtccatggctatcatccaaacttgaaggtggcacttgtaaggaaaaaacaaaccaacaagctatcctaaaaggaggctggcagcatgaggaaggggcttgccatcccctgtgccagtgcgggaagaccagcccaagtgcccaccccactgcgggagcagactcagctgtccccaaacctgaatgcaggtaacaagggcagcagcctgagcatctcagagcccagaggcagagcgttagccgattgcttccagcatcatctggggcacagtggggtcttggttcctcaatgggcctgagtggatctaactctgcgaagttagatcccaacagccatcacagtttgcagacaatgtcattaagaccatccagataacttcctaactccagttttgtgcccaccaagcatccttctgatttcaaattggcctcgcatgccatgtgcaactgggagagagtgtgtggacagaaatggggccaattgactatttcccttggctgtcatatttttcattaataaactaactctccagccacaaatacacactcagaatgcctcttgctactccagatcctccattcactgtgaaggcaatcatggggattatgaattccatctcccaggtgtggattaaactgcatgccaggggaggtttctgtggttccaatctaccccgcttagtacatcagagctcaacaggatcaggtcaaagctggaaggatcctgagagcccacagaaataatgactcctgtgctgaggttcacaggagtagcactggggtctgtgaattcttggcaaaaattcagaaaacctaagggaatccatgcattagctgataatgaggccatacagactaactaaagcatcagccacctcattaaactgggaagcttaatactgtttttattgcacaatcatttctaaatgtcttttattaataaaattggggaaatg

SEQ ID NO: 143 - DNA, 4118 bp, Homo sapiens
ttagcagaagatgaatttattaaagggaccctggattgctcatggaaattccaggggagctacagagccattgtggaagcttcccagcagggacaatggtcagaacctggctgccgctgctgccacttctttgaccatggcctggatgcttcggcttgcaatgcttacccactggggctggatgctgggtgctgctgagaactctacctcctctgtgatcttgctgtggccaccactgtccctacaggctctagggtccctgcttcctggcattactggctctggattgaaagcctgggcctctgatgaatggaacgtgtgtgcatgtgaaactgcctttgcaaagatgatgacagtgagggaagtctagcatgggtgactccatcttgcctctaccctcacaggctggctgtcctcactcattcctgggcataggccaagctaaccatgggaggaatttagtttacagtttaactctgaagcaaagatgatattagtccctccctaaaatgaaccccctcctagctcagggacctgcctttgtaaaactaatgaaaggccacaagattaggattatgggaggggcttgaattttgctaagatgtgggtgtagctaaccgatgaccagccattgacccctagcttgcctttctataatcctttgctgctcaggagtcatgcggccagaggtcacaagatctgtgacttccccaattgctcctatagataacatcactattgtaaaaccaaatattggtcttctgagatatttttcagacttttgcattctgaaatgattcatgactcaactggtcctgtgacccccacccagaggtggacttagtgcacaaggtctgttttctacactcctatgattttatccccaacgagtcagtagcacccattctctgctcttaccgcccaccaaattctccttaagaaccctagcctctgagttcttgtggggactgatttgagaaataaactcccatcctttcacttggctagctctgtgttgttaaactctttctctactgcaataccatggtctcagtgaattggttttgtctacgcagcaggcaggaagaacccttcgggtgattacaaattagcctgctccagagctgctggaggtgggggtgacacacttcttgtgcctgtgtcttctttcttgggaggtcggctctgttcccaagactgatatcatggggaactcctctaatgtggcaaagcagtttgaatgctgggcagccaggggagtcacagatggttgcatacacatctgtgttctgcatgacactgctagacatggcggacaataccaagacggatcagacccagcacctgtcttccgagaccttacgggctcatgattctcttccttttaacatgcacatttattaggtaccatagtgtgcaaagcttgttcactcgaattatttcattaggtccatctgatagtcatgtagggtaggcggaactgataggatttctgttttatatttgaagaaactaggtctgtcaatagtgagccaggtttaaaaaaaaaaagaaactaggaagttaggtgatgagcctaagacatcaccactggtgaggagcagagctgggacatgagcctatcttctgactccaggcccagtgctaagccaactaaaggggcataaaggggagctgagatcagggaaggctctgtggagtggcactgcccctcagtcccttgtctgcaattctaaaatccaaaggactctgaaaacaaagtctctgtcttttttttgtaatgggatctcattctgttgcccaggctggagtgcagtggtgccctctgcagcctcgacctccctggcacaagtgatcctcttgcctcagcctcctgagtagctgggactacaggcgtgtgtcacaatacctggctattgttttttgtttgtttgttttcaagtttgggactaaaactcaatttggcagcaaaacctgacccgaactgatgtgatttgtaatctttagttatccatttaccgtaagatcaatgtgtttagctgcagaaatcttaatgtttgttaatagggggttatcctggtccataaagggagggagaggaggaggtgttacctaatattgggtccatggactacatagcctaaaaaaatctataaaatttcaaaacacacctggcttcaagggttatggataagggagtctgggttggatctgaaagggggcttggttgtggggtagaatttcgatgtttggaagggatgtggagggatgttatgaagaggaagcctcacgccataccaccttgggtcttggtgttaagtcattatcaaccattacatttgctttaaagcagagatgacttacatttctgataactactttcccttaattcatgattcacacacatttggagggctggactttctgggtttggttatttcccctggtaccaatccccgccttttcccagaaatcacttgactttcccgaaaactcagaaacacaccctttggctgaaaaatagcattaagcaatcggtgaaattccccattcctcctttccccgctggagccctggatagagggctctctggcctgggaggaggacgctgtccttgtttcaaaagcagagggagctccaagatcaaggctgagtttccctaagtcatggtctcccagccccctctgtttagatcagggaatttcagacatgcacactcgggtagggaatcttatgaacagaaccaggacagggaggctggccggaggttcctgcagagggagcgtcaaggccctgtgctgctgtccctgggggccagaggggttgcccagcatgcccactggcaggagagagggaactgacccacttgctcctaccagcttctgaaggtaaaatccttacaaacgaggagcagagctttgatggaggaaaaaggaaaggcagaaaacttcacgtaggagggcttggggcaatgatagagggctgacaaaggcagcataaaaaaaggcagaatatagacaacctatttctcttaggctcaccccatccacccctacttcacccccttacctaccactgttttcagggttaaagcaattttagcaaccctttactaggaactgtggggagatagcttgtattttcagtaagttggcggtggggggcagggacaaactccaaacaaactctggaaaacgaatgtaggaagtttttatgttccttgtcatttggctgtcccttttctccttcctcgcacaaccctgtatcagtggggcagcacttccttctcagaccgcttgtcccagggtccctgccttcccctagtgaaagaagctcctgcctccatcggtgggcgttgggagcatcagcggagatgcacgcaatgataaacagcagacagggctgcttgaggagatgaggtgatcacggttaaagaagaggggctgtcctacatggatgatcatgatgcgccaagactgttgaaaacctgagtggaaatgggagcatcgttcttgagggcaggagagagactgataccgcgggggtggggctggtggaggacaatagaggaagaagaaaactgggagaaagtactcgattcctttggagaaaaattaggagaaagtctagagaagcaatgagggaaggatacaatttagctatagtctagaaagttagtcgaagttaactagggagggtgtgaggggcacggtgccatgtggggatgttggtgatatggccctgtgtgttatacctttgaaggtgacactgagccccaggtgacgccgcaccaccaaagaaggtgcttgtgtttgtcagacaaatacagccaggcctgccaccccttaggctccaaagtccggaggtgcagaaagccaggaccaagagacaggcagctcaccagggtggacaaatcgccagagatgtggtaagtgatcaagggtccctgagatgacacagactccattcccttcatcttctcaagaaaagcgctcaagggccaggcatgatggctcacacctgtaaccccagcactttgggaggctgaggcgggaggattgcttgagcccaggactttgagaccagcctgggcaacataaggagaccctgtctctatt

SEQ ID NO: 144 - DNA, 3379 bp, Homo sapiens
cgtttgctgggggcttgtacattcactcgcccccattcacttctctcccttcgtctctctctacactctgccctctcgtccggccgtctccctcctttgtcctctgtcctgctccgtctctctccccctgtccgcatggcctttcttgcaggggagcctccacctcgcccacctcagcctgccttcttcactcagagtaagtggggctgcttccgatgccttggcccccgcccccgccccctctctctcactcctctcctggaaggtacagagcctgggcggctgggccggaggggaggtgggtgggtgtgtgctgtgagcttccgtggctgccctggcctagcatgcctgccccccctcgagcccgccccccggagcctgggcttctgctcacgagtgtggccctggcttccgcctcggcctcactccctcccagacctgtctgagcttctggagcacgagtgtggccctggcttctgccttggcctcgctgcctcccagacctgcaggcgctgtctgggctttgtggccgttggtcaggagtactgtcctctccaaggatagtccttatagcccctgatggcaggaggcggctccgtgcctgcactaatggtgtgccgtgacaggggcggggatgagggctcactaactcgccagggcgcaggagcagggccgccggggtcttgtgctggtggaggcagcgtcaggcaggagccagtgttgcttgctgcagcttagacggagcgaggcggggctcaccggcccacatggggctgccgggcagagcaggttccgccctcctgatggagtggtcggaggtgcgctgagaacctggccgccggtggctgacctcagacctcggagggagttgggagtggagggttgctgggggacacttggctttctttcccacgtgccacctcccctcgtgtcccagaccctgcctgactgccttcctgttgggctctccctttccatcacagaaccaacctatgaccctgtgagcgaggaccaagaccccttgtccagcgacttcaagaggctgggcctgcggaagccaggcctgccccgagggctgtggctggcgaagccctcggcgcgggtgccgggcaccaaggccagccgaggcagcggggctgaggtcacgctcatcgacttcggtgaggagcccgtggtcccggccctacggccctgcgcgccctccctggcgcagctggccatggacgcctgctccctgctggacgagaccccgcctcagagccccacgcgggcactgccccggcccctgcaccccacgcctgtggtggactgggacgcacgcccgctgccccccccgcccgcctatgacgacgtggcccaggatgaggatgactttgagatctgctccatcaacagcaccctcgtgggcgcgggggtccctgccgggcccagccagggccagaccaactacgcctttgtgcctgagcaggcgcggccgccccctcccctggaggacaacctgttcctcccgccccagggtgggggcaagccgcccagctccgcacagaccgcagagatcttccaggcgctacagcaggagtgcatgaggcaactgcaggctccggccggctccccggccccctctcccagcccggggggtgacgacaagccccaggtgcctcctcgggtacccatcccccctcggcccacgcgcccacacgtccagctgtctccagcccccccgggcgaggaggagaccagccagtggcctggacctgcttcccctccccgggtgcctccgcgggagcccctgtcccctcaaggctcgaggacacccagccccctggtaccacctggcagctccccgctgccaccccggctctcaagctcacctgggaagaccatgcccaccacccagagctttgcctcagaccccaagtacgccaccccccaggtgatccaggcccctggcccgcgggctggtccctgcatcctgcccatcgtccgggatggcaaaaaggtcagcagcacccactattacttgctgcccgagcgaccatcctacctggagcgctaccagcgcttcctgcgtgaggcccagagccccgaggagcctacccccctgcctgtgcctctgctgctgcccccacccagcaccccagcccccgccgcccccacggccaccgtgcggccgatgccccaggctgccttggaccccaaggccaacttctccaccaacaacagcaacccaggggcccggccaccacccccgagggccactgctcggctgccacagaggggctgccctggcgatgggccagaggcgggccggccagcagacaagatccagatgctgcaggccatggtgcatggggtgaccacagaggagtgccgggcggccctgcagtgccacggctggagcgtgcagagggctgcccagtatctgaaggtggagcagctcttcgggctgggtctgcggcccagaggggagtgccacaaagtgctggagatgttcgactggaacctggagcaggccggctgccaccttctgggctcctggggccctgcccaccacaagcgctgagatgcgtctggagagccagagggcctgcctgaaggaatcacctgagcctgtccgtccaccaggagtggggagatgcccccatccagtcctggaggacccgctgctcctgctgcccccggggatggagcaaggccaaggctgcgggaggctgggagccctgccctgcccatccctcccgcaccagcgctgtccctgcacactttggttcagtcccggtgcccctgccaagatgtggaaggggccgggtgaagacaggcttgagggctgccccagcaggctctgggtatgacctgcctctggccctggtcctgggcggggcctgtgggtggagtagtacccccaggccctgccctgggtgacagactgggaggaaaccaggctggacctgggcaggcgggatgtgttggccacagggagaggcggaccggcacccggtgggacctcctaggactgggccttcttccagggggcccctggcagcagctggggtgtcgggcagaatgtgacttgtggccttaccatggacttgaatgggacttggctggcctcaggatcttgtgcctggaaatagcctgaggtggctcaggaagcggagaaagggtgccagaccattctctggcggggaccagggcccaaggccccagggctggaaggagaccaaggggcagccgccctggagggacatcagtgcttcctcttccacccaattcccccacgcggttccatgttttcccaccagcctgttggcgaagttgctgctccggcattcagtacctgcttcttccagagaaataaagttagtttctattttatgtt

SEQ ID NO: 145 - DNA, 3453 bp, Homo sapiens
tttccacatcttggctattgtcaatagtgctgcggtgaacctgggcgtgcagtgaacctgggtgctgcagtgaacctgggcgtgcagtgaacctgggcgtgcagtgaacctgggtgctgcagtgaacctgggcgtgcagtgaacctgggcgtgcagatgtttctgctgggctgatttcatttcctctgggtctatacacagcagtgggattgctggattgtgtagtagctctagtttaaattttctgaagaagctctatactgtttctataactgatctcagtgctgggaccccttgagcttagccccctccttctgagactgcccatggtgcccaggcagggcactccctggcctgactgtgcttgccttgcagagtcggtggctctgaggctgcgaggtgggacctgctgctgtgctgggtggctggacgtgttctacaatgggacctggggcgccatgtgcagcaatgccctgaaggacctctccttgtccatcatctgcaagcagctggggtgtggggtgtggggagtggggctggctggagaacaggcccttcccctctgcgggcaccgggaccgcctgggtggacaacatcgagtgccgcaggctgcccaactccactctgtggcaatgcccttcccacccatggcacccgcactcttgcgaccttcgagagcaggtctggattacctgtgcaggtgggcattagaggtctctgggggtgcctgggaagaggtttatctgtcctgacaggtcacttacaggggatgccattcaatcagagcctgggcctgggggtcactaggatccacagccttccttgtgaagcttctctgggcaccgaagctctcagagctgctgtttaacccgcaggattgtcagaggacaggccacaggctgctggggagcccctcaactgctcctcctggctcggctgcccaggtacccctctgtccttgtcgctgtcctccttcccatcccggtccagcccccgcagtgaccgcagccccttttgcagaggagggcgcactgcgcgtgcgcgggggcgaggaccgctgctccgggcgcgtggagctctggcacgcgggctcctggggcaccgtgtgcgacgatggctgggacctggcggacgcggaggtcgtgtgccgccagctgggctgtggtcgggccgtcgccgccctgggggccgccgcctttggccctggctccgggcccgtgtggctggacgaggtggggtgccggggcagcgaggcgtccctgtggggctgccctgcggagcggtggggacgcggagaccgcgcgcacgaggaggacgcgggcgtgcgctgctggggtgagtggggggcggtgggaagtcggtcatggggccggcagagggcgctgggatggagtcagtcttgagtgtcacttcggtgggcaggagagctcgcccaggtgttagtgggttggtttccaccctgggatttttctgggataggctgatttgctgtggaggcctgtttgggacatgcactccctggggtttccccctaatcttttttgggaattcccttttgtttattccaatccttgttcatttcgggtatgtgtcacctgggtgttggcaggttcagttgttccctgcacctcattctctttgcagaaaacaaacagttaaccacagtgatgaccttagcaaaagcagcagcagtggtaactttccctgagccactcccattctctgtgctctggtcacctcttgtgacttgccctggcatctgcctgggggccatgttttaccaaggaagggggctgtcccttgaaagcagacacccccagtggacactagccattttggggtgctctgcacagctgaaaccagcagatgcccccccagcacttccgactcgcaggtcctccatgagggagagggtgtggctgggcccttggagccaccctgtcctgctgagggtgtgcagttcccccccaccacccagctggctcaagacctctcctttctcagagcctggcccaggccccccactgcctgcagctcccttccggacattctgggtggtcagtgtcgtcctgggatcccttcttggtcttctccttccgggcctcatggcttttctgattctgcctcgagtcacacaagccatgcagaggggtctgggaagatccgaggtatctcctggagaagccatctatgatgtcattggggaaatgccgccagcaggactgtacgaggaaatcatggaggccgaggctgtgctccaagatgaggaggacggaagtgtggtgaaggtggacacagaagccgcagtttcaggggaggtgtctaacctcctggagggacagtctatacgtgcggagggaggacacagcagacctgtttctcagggatatgacgaggctgcgtttcctctggaggagatgacgttgtaaagcaacctgaggatgagatacaccagctggctgtcgaaatcacagctcttcattttcttgtacaattgtagtggatttcgtgagaacaccttggatgcctttctcttgcaatgtcctccatgtccatgtaaaatccagtccttccaggccctgcctggctctaaccctcatccccttcgagggccatctgctgtggacagttgtgctgtgtaaccttcagatttcccacacattacagcaaatgcaaatacacatagaaatcagtggttccttttgtggtttagagacacatggtgccatcttcatcttccgctccacagctcgcttctggcacccagcagtgggttgcagagctccccatgccagaaccttcctctttttttcttaaaaactcttcttaattgaatccaaagtatcttttaaatgttctacttgtgtaatcatgtcatctgtgaatattcagatttatcttctccttccaatccgtgtacatttaatctctttttctgtgccttatttcgggggctgggacccttcagtccagtgttgaagagaggcagccagtggaggtcttgtctcattcaaggactcagagcaaatgtgttccacatttaatttcactatgaaatataatatttgatgttcagttttgtagatgctatttatcagatcaaggaaagcccagtctatacctaatttgttaagggttttgctttttatcataagtgtcgacttttatcaaattcttttttgtatctattaagatgatagatgattgattttcatatgttaaattaaccatgggttaaacaaacttacctttatcatgatatattattctttttgtatttcacaggaattagtttggtaatatgttgggtcaatgtttaaaaaagaaaatgatgtgtaatttttttcttttattgtagtatttctgtttaatttttggtatgaggattattcaggtctcataagagttaggagtatattctcttttaaaaaatatttgctaatttacactccc

SEQ ID NO: 146 - DNA, 4024 bp, Homo sapiens
taaaatactatcatctggcaggtataagagagaaatatgggcccctgagagttgggtgatttcactgtgaccaaatctaaaatacattaattcatgggcaccagtcagcaagaagctttgtgtgtcttgtatggtttcgatgccacagctttgctgttaacccgtcttccagtcagcagttttttcagtaactttcataaaggtctaaaacatgtttatcaagccaccatttgtcagaaagctgagagggttaactaatttgacacgatgcaaagtcacacattaggattatctcaacagatgagagacttccaggcccaagccagcaagaagaggtttaagagggcaaaatgtaacgttatgtactgggctttggataatcagctgcctgagtacagggtgagagtgatgtggtttcatagcagtcattgtgaacaatgtctgaggatttcggttggccacagattggagatgagagatgagagtgatgcaacagccagccacaccagcattctcttgagacctctgcataggaaacatgaggtccagtcacaggaactacggcctgtgctcctgcagcctcagggagcatccaaaggtggtgtgcagccctggggccacattttaaaagggacctcgaccaacccagagccaatccagagaaattgtaaccaaatggagagccattaaaaccaagaagtaattgtttcaggagtctgagaggtattaaaagaggatggcagtctgcagaactgtgaccagtgaatagaagcaaccaggaagcagctttatctcagtgtcaagtcaaacattcaaaaaccagagtgggcagaccagctgccagcacaccaaatccagcccacagatgggctttgttttaactgcagttgtcctcctcacattaccaaaaaactaaactaaaaattgagtttgtcagccatgctgaaaaattgggagagtttgcatttttaaaaaatctagacttttgacttctcctgaagaatcagaatatctgaccctatggggccttccttctactgacagcagtctctccacagaatatgtgctgtcacggtcaccacagtccctcctggtgtctccccagtgctgaggcctggtgccaggcaccaccaccatggcacccaccatttggtctctctgagttggtgagagggctaatgggccaagcaggtaaaacagtgcctgttccttggtgaaagcccagcaaacgttacctgcaattgttgtatattatcagcctggcccttgcagatactggagtttcaaacctctgttgtaaaaatggaaccacctaactgtggagttaggcctcaggaaatatttacttttttaccattgtgggtattaaaataaaggctggtagaatgctgttcattcagtgccttgcagaaggtcctcttctgtgtgaaaggctggttccctggggtaggagctgccctccactcttggtgcatggaaatgaggcccgtgagaagtgcgaaggtgcaggagaaatctcgagagaaggtggtacactctgctatttttgctatagagtgacatctcactgttagaaaaaagaccatcccttcagaagttattctcaacctcacagcctgtggagaaaccaggctgatgctccccctaggggaatatcaggaacagcctcattcttccttctttctctctttcccccctctctcagctccatccccagtgggtcactgcatctcactaccaaccatcatagggagcgtgctgcttcccactgggatgacccctaacctgggagtctcctctcagccactctgctataccccacccttcacactgcccttgaggccctcctgtgccaaggacccctcaccctcccatagtcgtctctgctctgactcactccttgccagcctgaacctcctctatcctctgtctcagatgtggcactcttgccacagtgctggctttcccagtgggggccttgtgtccattctgctgctgtcccctagtatgagagagtgtgtgtgtgtgtgtgtgtgtgtgtgtgtgtgtgtgtgtgtgtgtgtgtgtgtgtgtgtgtgaaggcctgcggggggagggaagaagctggagagtaatttggtaagaaacattttggaaaacagaagccaaaagtaaatcatattttataaaatgatactttttcaaaattgaaggccttaattgcctaaggtgaaatatagccttaggaatagaatatgtatgcatatgtatgtatataaatatacattaactctctcttttccatttttgaatgtttagtttacagctggatcctgaacacttaaaatagcacctgacacatagtaggaactcaaaaatagataggattcaagaggaagcaaataatttttaccgaaaaattggtttttgtgtttttttcttcttactgggtgttttgtgcatatttttattgtgctctaaataatcattctaacattatcacccctaagttgttgaagcacatttatatggaaatcttggcaattagaatggtaacttcatatttgattttaaattaacagaatcttattgagatcactataaaggaagtgatcccattttcttagagccattagtttatttagttggtttttgaaagagagattgaattcaaacattgttaaagtcagaaaccttgcagacaagaaggaagtgggagggaaatgtaccatcaaagccttggcctcctgagaaaggagtgactctctagacctgggtcagaaagaagtgtctgaaaaggcctaatttcattgtcagagtccatttataaatcctagggacctagttgtggttttttgtttttaactcttaattgtatgtaaattgtatacacataaataaaacaggcttgtaatgcctaaaggaagctctccatggctctgagactgggagcgggcgggccttggctgagcatgcaaatactgacagctgaagtcacttgttggaaagtccgcaaactctggttacagctgcatttgtcagtagctttaagggaagtgtaatcagccagagagattaatttgcatctcaattagaaaagagtctggaggaagcactagggtctgttgcgggaaggttgtggaagaaatctcaccaagcacaaaagcctcctggcgcttcgtcctccagctgagtggaggacaatatctgaggtttcgtttccatagggaccagaagcctgctgggccccagaagaatctcgggtttgcaccgtaatcatttggtcatgatgacacaaattccactgttgttcccaaatacatttttgctattagaaagctgttagaaaagtggaaatggtcatcatatcaaaagcatgcaagagggtatttgctgacccaacttacctttttcatagtgctgctaggattgctaagcatttaacatttattaatgtctgagtattcaaagagcaaaaggtcattccataaatgacaatatttctttagcattcagatggttactttgggaatgacagagcttcaaagggagccattattcctgattcttccacacttttcagcagtaggcaaacaagattataaattttaaaacacaggcaaggaagagacatggaatcttctggccatgaagcatagaaaaaagtctggccattacaagactttttataatcctaatgaatcctaataaaaatcataatttaaaaaagcacaaagtagtctaaatttattaattttccctttaaatattatctagtcattttcataggctttgatacttatatcacacggctcctttgttttcagaggagttcttaatattatcaaaagcgggtacaaagcctggtgagatctaaagctgtctgaaccgtttatccatgccaaatcacttactcaaccaggaaggcccacccttggcatttttggaagaagacttttatttcaggtttattttgttctctcttaaatagttaattcattggccccagcttcaaagtgagaaaacaaacaaaaaacagtgagac

SEQ ID NO: 147 - DNA, 3810 bp, Homo sapiens
ttattcaatgaggttgtgcagatgaactttgaaatagccagtttcagcagcctttcagggactcagcccatcacgtggcaggtggagtacccacggaaggggaccacagacatcgccttgtccgagatctttgtcagccagaaggacctggtgggcatcgttcccttggctatggacactgaaattctgaacaccgccgtactcacaggaaagacagttgccatgcctatcaaggtggtctctgtggaggagaacagtgccgtgatggacatctcagagtcggtggagtgcaagtccacagacgaggacgttatcaaagtgtctgagcgctgtgactacatctttgtcaatggcaaagagatcaaaggaaagatggatgcggtggtgaacttcacataccagtacctgagcgcccccctgtgtgtcaccgtgtgggtgccccggctgcccctgcagatcgaggtctctgacacggagctcagccagataaagggctggagggtccccattgtgaccaataagaggcccactcgtgagagcgaggatgaggacgaggaggagcggcggggccggggctgcgcactgcaataccagcacgccaccgtgcgggtcctcacccagtttgtgtctgagggcgccggtccatggggccagccgaactacctgcttagtcctaactggcagttcgacatcactcacctggtggcagacttcatgaagctggaggaacctcacgtggccaccctccaggacagccgggtcctggttgggcgagaggttgggatgacgaccatccaggtgttgtctccactgtctgactccatcctggcagagaagacgataaccgtgctagatgacaaagtgtcggtgacagacttggccatccagctcgtggctgggctgtctgtcgccctttaccccaacgcagaaaacagcaaggccgtaacagctgtggtcacagctgaggaggtgctgcggacccccaaacaggaggctgtattcagcacgtggctgcagttcagtgatggctctgtgacgcccctggacatctacgacaccaaggacttctccctggcagccatctcccaggacggggctgtcgtgtcagtcccccagccccgctctcccaggtggcccgttgtggtggccgaaggggaaggccagggcccactgatccgagtggacatgacgatcgccgaggcctgccagaaatctaaacgcaagagcatcctggctgtgggcgtcggcaacgtcagggtcaagttcggacagaacgatgctgactccagccccggcagggactatgaggaagatgagatcaagaaccacgccagcgaccgccggcagaagggccagcaccatgagcgcacaggccaggatgggcacctctatggcagctctcccgtggagcgtgaggaaggggctctccgaagagccactaccacggccaggtccctgctggacaacaaagtggtgaagaacagtcgggcagacgggggcaggctggcaggagaggggcagctgcagaacatccccattgacttcaccaacttccctgcccacgtggacctccccaaggccgggagtgggctggaggaaaacgacctggtgcagactccgcggggcctgagtgatctggagatagggatgtacgccctcctgggggtgttctgcctggccatcctcgtcttcctgatcaactgcgccacctttgccctgaagtacaggcacaagcaagtgcccctggaaggtcaggcctccatgacccactctcacgactgggtgtggcttggcaatgaggccgaactcctggagagcatgggggatgcaccgccgccccaggacgagcacaccaccatcatagaccgcggaccgggggcctgcgaggagagcaaccatctcctgctcaatggtggctcccacaagcacgtgcagagccagattcacaggtcagccgactccggggggcggcagggcagagaacagaagcaggaccccctgcactcgcccacctccaagaggaagaaggtgaaatttaccacctttaccaccatccccccggacgacagctgccccacggtgaactccatcgtcagcagcaatgatgaggacatcaaatgggtgtgtcaagacgtggctgtgggtgcccccaaggaacttagaaactatctggagaaactcaaagataaggcttaggcccctctagccaaagggccctgcccagatgccttccttgtactggaaactggcccaagtggggcagaaggcgttgtcagtggggttaagaagggacggtcccagggtccatgctagaccagttggaaagttttgaagtcaggaaaagacgtttttgtatcaagggatttttagcagttaatggtggtggatttttaaaggtcaggggaataaagtctggggcatggggagtgcagaccaagttactgaactgcacaggcaaaattaggaaggttattttatgagtcaaaacatactacagacaagctaccaaaaattatttgttaaaaaatgcaacaagacaaataaaaagagaaataatcatctgtttatatttctaataaaggagcaaaatataaaaataggacctgctaagagacattttccattctaattcacgattcacttttccaaggacagccttcaactgtcaccacacagctgggggggagtcatttcttaacaagggatgcctcttgggatagaactagggagttttaaatctttacttgatcatcttttattttcttttccactttttccttttctctctctctctgtgtcctagacttccattgcatttatatttaatgtttatttctgagaatcaagcagtatatttttcctaaatgaaacataaattatattcctattcattagataggttcctaggaacaatgccaattaatccattgtttaagtagtaacttgaatgtttttctatatccctccagctttgttgatagtggcgggttttgtacaattggagggagccctcagagccttctgggggaggagaggaactgtccttaatccatcaccactaccatagggcaaagccagcaggtgtggccctgtgaggggctgtacagacgggatgtggccaggagaacagagccccacctggaccacctgacccctcgggattccacccctgtcatcgtggggatgttcctatataggagaaagttgggttaaatcaaaaaagaggccacgcccaggtgtaatcagagccaacctggtgggctgggtctatcacaagacataactgatgctgaacatgaacaaagataaaaactgtttggagggtttttgagttgtttttcttatgttgttgggtggggtataccagcataaactctaaagataaaatctatgttagattgtcaatcaactgtgtttttgaacagcataattgtgtagcagcacattgcaaaaatgcattcatccaaagcgacacatgtggcaacgtagaccacgccagtgaaataagccccttcgtgatcacctgactccagttctccgtgtgctccattggctgcggctgcaggaggaagatgcctgacagccctcatgctctccgcaggggggcgctcacaaagatgccaggggtgtttattgtgtttatttttttaattactaaaatcagtagctaagaaagggtccttgaagcctcctaacctgggttggacctttgaaaaatatatttgtagcacatattatagatggaaagaagaagatatttatttatacctgtgatgccaattgtcattaaaaggcttttcatggcttgac

SEQ ID NO: 148 - DNA, 3274 bp, Homo sapiens
gtcagcgctgaaggcccagagcgcgctgcacgagcagaagactctgcccgggatgaaccggccgatccaggtgaagcctgcggacagcgagagccgaggagatagaaaactcttcgtgggcatgctcaacaagcaacagtccgaggacgacgtgcgccgccttttcgaggcctttgggaacatcgaggagtgcaccatcctgcgcgggcccgacggcaacagcaaggggtgcgcctttgtgaagtactcctcccacgccgaggcgcaggccgccatcaacgcgctacacggcagccagaccatgccggtgagtgctggccccttggggcgggggcgagggcagcggcgggccgagaccccagcacccgccacgccccgccggctgtccagtctccccaagagacaggaaagcatgacccttattccgggcctcagacaaggacgcggaagcccagggatgttaaggaactggcctgaggttacccaggtggaaaatgcccgcggtggggttcacacctcattcccctgggcgagcgccgatgccgcctcctccaaagcgccccgaggagcgggcggggtgggcgcaggccagaggcaccgacagctgcgggcggaggctctggagcaggtgggtctcacgcgccgccccggccgcagggagcctcgtccagtctggtggtcaagttcgccgacaccgacaaggagcgcacgatgcggcgaatgcagcagatggctggccagatgggcatgttcaaccccatggccatccctttcggggcctacggcgcctacgctcaggcagtaagtggcagcgcgcacgggcagcggttctcaagctcactcccctgggagcctcagagagcgggacatgaaaccgaaaatactactctatcccttgccctctccctccagagtgaggaggggccgggaatgaacccatgaacccggggggtgtaacttcagaagggtttgaaagaaggctggcccagttggggtggctgccaggaggaggtgggctgctgtcttagttctaaggggcagagctgagagaggccccacagaaaagtgggttaccctgagccttttcctctcagccagatcaacgttgaaccccaggaagcacagatgagagggtgaggttcaggtcattggttgcaaaccacccctactccatggaacggtgacttcaggccttctggtctctcctggcagggctcctgtgaggtgccctaaagccctacacacccacacttctgatatcccctcaggcctctggcccacctacttctttcttccacatgggggcccactctgtcagcctctcccggagctgcctgcagactggtaaccacagctcccatgtgggtggcactgaggcaggccacggttctgggtctgaaaatgcaagcttacctcacttctgcagtactgtctgccttggccacattccgcagcctcccctgtccgcactcacctttgtgacaacactaggggtgcctggggttctattcataattctcctgtcacttctaccaacagactccaaattaaaaccattctggacagaaacctgtgctaagtgagttctgcagaggctcatccagcatgtctctagtgctttggatgtcacttccccacgaatgacaggctgtacacagggctgactagcacccacagagccagtctcctcctctgcccctagcaacaactttggagttccaaagaccctagcattacttttaaatacagtcatctctcagggtggtggactctaatagctgttgaggtacagggcaagaatgggagaggcatcagggctttctggagtggtagttgggagcttctggggctcagagcctgggagattggtctccaggagctgaggcccctgtcggggagggatgccccctggaagcacgtgatattttttccactccctctgccccagctgatgcagcagcaagcggccctgatggcatcagtcgcgcagggcggctacctgaaccccatggctgccttcgctgccgcccagatgcagcagatggcggccctcaacatgaatggcctggcggccgcacctatgaccccaacctcaggtggcagcacccctccgggcatcactgcaccagctgtgcctagcatcccatcccccattggggtgaatggcttcaccggcctccccccacaggccaatgggcaacctgctgcggaagctgtgttcgccaatggcatccacccctacccagcacagagccccaccgccgcggaccccctgcagcaggcctacgccggagtgcagcagtatgcaggtccagctgcctaccctgctgcctatggtcagataagccaggcctttcctcagccgcctccaatgatcccccagcagcagagagaagggcccgagggctgtaacctgttcatctaccatctgccccaggagtttggggacgctgagctgatgcagatgttcctccctttcggcttcgtgagcttcgacaacccggccagcgcgcagaccgccatccaggccatgaacggcttccagatcggcatgaagaggctcaaggtgcagctgaagcggcccaaagacgccaatcgcccgtactgagcgccggcgggagcgtcccccgggggagaccaggactcgcacagggcaggatgctgaacgggctacattaaaaaacaaacctctctctatatatatttataaatgagaactgttggatgacacctttgacatatcagccaatatcaatcaagctgaagactccagacactgtctgtgtgactgtaacatttcttcaaggaaagtatagcgtctatggagttcagagggcacgtgtttgggggaaaatatatatgacatgaagaagaagatgaagaaaaatgagaaaaaaacacacaaaaggcaactttaaaacaaaatatcacgagcagacggggaggctgaagggctgggagctgggaggagacgctgcttaccgatcccggggcttttccagcccacgggcgcctgacgcaggctggggcaagtggtgcgtggggcctggtccccaaggggcggctgagaggccgccactgagcatctctatctgtcattcctttagctatttagggaccaaaggaccaaactttttattgcagatgtgtagctctatgtcaaatagagggggaatggaggaccccctccttcctgcctcatggctgttcttgaaacagcttagagcgattctatgaaaaaatgtaataaaaaattaaaaaaaaaacaaaaaac

SEQ ID NO: 149 - DNA, 3349 bp, Homo sapiens
atatgaaaacatttccaatcagattttctgctgaatatattggcaaaggaatttcatatggggctggagatctagaagagatattgcagagaatccgagaggaaacttaagagaatgaaaggaagtgtgataaacagcactgagaccagtaaaaatctgggaagtcagaagtattgcagttgtccaggcaaaatttataacaagctatggcaacagcagagtggactgaaagagaagatagacttcatagggtttgtctccaaagcacttggtgattgcctgaatgtagaagacaggcaagaatgtaaaagaggactctcacaaacacagctttcgaacagtagacacatttgcaaaagagaaaaagttctcaccactccaggaatccaagcagaaagtcaacacccctcttatatgtgtttaccataagaatagtttcttctctagagggtaagtcaaactgggtgtcctctttttcccatctgcgtccaggattgtgcctttctatgtggtagagtacgtctgtgtgtgtatgtgaaattgtgccaattatcaacttattgtttgagcttcaaattcttgtgttgcctggtctgtgaaaatggatctgggccctttacgtgtttcctttgccagctggcataaggtttatcagtagagggcaccagagcaacactgcagggagaagggtcctctttcttgggtcaggtggctctttcaccaggtcctggagagtacctgttttttttcttttctattttttttttttttaagatagagttttgctcttgttgcccaggctggagtgcaatggcgtgatcttggctcactgcaacctctgtgagagtacccatttttactctactccatggccagtgaagttttctcccgtgctaaatgcctgcaggacacagctttttctaccaattggccaccataggagtatgttttgtccagctctccactcaggcactggtggctcagttgggagcctaaacagcacaggcctgtgccccagcccaagccactgccataccctctctgcagcctcactggtacaaatgctgggggccccacgggactggccgtctagcaagcagaccacctgacctcctcctgtgcggaggcttgagcctccccagcccacactgaccctctccccagctctagtgcatgcacactagggccccagtagccactgttgggtctcccagcccaagctgtgcacagaagagtactaggttcttgcagctctccagcctccatttccagcagtgcccacagcagcgccttggccgcctccgctcatccgcccattaaccttggctcctgttgtttccttaggccttccccacacagacaccatgtgatccaggccttgtgtcaacatcaacaccccagctctctctgtattcccaattccctctgtgtactatttgccagctttggcttgcttgtgccccagagggttatttctgcttgcttagtgactgtggaccaactctggcctgcacaaccttccccctcaaacttttctgctatccagtaggctgcaaccacaactccaagaaggactgaaccctagccttggggagggaaccctccttccaagtttatccttgggtaatccccctcagctgtaggattttctttttgtatttacatttatctttggaaaataattttttttggggggtggggatcgagtcttgctttgttgcccaggctggagtgcaatggcacgatctcagctcacggcaacatccacctccctggttcaagcatttctccctgcctcagcctcctgagtagctgggattataggcacccgccaccacagccggctaatttttgtatttttagagatggggtttcaccatgttgccaggctggcctcgaactcctgacctcaggtgatccgcctgcctcagcctcccaaagtgctgggattaaaggcatgagccaccatccctggcaaaataattctttaatttaaattactgtatggtttctgtctccctgtcgaacgtagattgatacaagtgtgaaggtatatgtgtgtgtttttaaaatgagggaaaagacatgaattttgactgcatatatttggtgagcccagagataagccaaataaataatgcaagtcaaaactattaattatgaatactcagctggggctgtgaccctgaatctagacacagaaatctaatggtctacatcagaggttggcaaactacagcctaaatgccaatccttgctgatcacatgtttttgtgtggccttgagccacacaaaatgtaaatggtctttacatttacatttacacaaaatgtaaatggtctttacatttacatttacacaaaatgtaaatggtctttacattttaaatggtcgcaaagaatttaaaggataataatattttgtgacatctatttgtatccataaataacattttattggaacccagccacactgatttgctaggtattgagtatagctgcttccatggtacatggtaaagttgagtaattgcaacagagaccaaatggctcgatagccctaaaatgctctctgcccttaacaaaaaaaatattggaaactaaccagtcttatacatattttaaaaaagtttgcccgcccctgatctagactgaaacttgggaccattttatcaagtaaataccagatgaattgcctgtttaatccccggctctgaattcatgacctcttttcccttatttgtagattggcaaactaattgagttgcaaggcatctagaatagccaaaacaaccttgaaaaagaaaaaggaggaggattcacactttttctgacttcatatagatcaaaggaatagaattggaagtccagaaataaaaccatgtgtcaatggtcaaatgattttccactagggtgccaagattattcagtgggggatagaagagtctttttaacaaatgatgctgagctaactgtatatctacttagaaaagaatacagtttgaccctaccttataccatatataaaatatgaactaaaaatatatcaaaaatctaaatgtaagagctaaaactataaaactattagaagaaaacaaaggggtaaatcttcataatcttagatttggcagaaaagatttttcttattgcaccaaaaacatgagcaacaacaacaacaaaaagataaattagacttcatccaaattaaaaaacttttgtacaggatattaccaagaaagtgaaaaggccaggcatggtggctcatgcccgtgatcccggcagtttgggaggctgaggtgggtggattgcttgaatccagcttgggcaacgtggtgaaaccctgtctctac

SEQ ID NO: 150 - DNA, 3519 bp, Homo sapiens
ttaaatttaaaattgaggcctggagagaaaaaacctggattttgggtgccccgtgtttgggcgaatcctcggaactttaatttcgacaatgtgggaaacgctatgctggcgttgtttgaagttctctccttgaaaggctgggtggaagtgagagatgttattattcatcgtgtggggccgatccatggaatctatattcatgtttttgtattcctgggttgcatgattggactgactctttttgttggagtagttattgctaatttcaatgaaaacaaggggacggctttgctgaccgtcgatcagagaagatgggaagacctgaagagccgactgaagatcgcacagcctcttcatctcccgcctcgcccggataatgatggttttagagctaaaatgtatgacataacccagcatccattttttaagaggacaatcgcattactcgtcctggcccagtcggtgttgctctctgtcaagtgggacgtcgaggacccggtgaccgtacctttggcaacaatgtcagttgttttcaccttcatctttgttctggaggttaccatgaagatcatagcaatgtcgcctgctggcttctggcaaagcagaagaaaccgatacgatctcctggtgacgtcgcttggcgttgtatgggtggtgcttcactttgccctcctgaatgcatatacttacatgatgggcgcttgtgtgattgtatttaggtttttctccatctgtggaaaacatgtaacgctaaagatgctcctcttgacagtggtcgtcagcatgtacaagagcttctttatcatagtaggcatgtttctcttgctgctgtgttacgcttttgctggagttgttttatttggtactgtgaaatatggggagaatattaacaggcatgcaaatttttcttcggctggaaaagctattaccgtactgttccgaattgtcacaggtgaagactggaacaagattatgcatgactgtatggttcagcctccgttttgtactccagatgaatttacatactgggcaacagactgtggaaattatgctggggcacttatgtatttctgttcattttatgtcatcattgcctacatcatgctaaatctgcttgtagccataattgtggagaatttctccttgttttattccactgaggaggaccagcttttaagttacaatgatcttcgccactttcaaatcatatggaacatggtggatgataaaagagagggggtgatccccacgttccgcgtcaagttcctgctgcggctactgcgtgggaggctggaggtggacctggacaaggacaagctcctgtttaagcacatgtgctacgaaatggagaggctccacaatggcggcgacgtcaccttccatgatgtcctgagcatgctttcataccggtccgtggacatccggaagagcttgcagctggaggaactcctggcgagggagcagctggagtacaccatagaggaggaggtggccaagcagaccatccgcatgtggctcaagaagtgcctgaagcgcatcagagctaaacagcagcagtcgtgcagtatcatccacagcctgagagagagtcagcagcaagagctgagccggtttctgaacccgcccagcatcgagaccacccagcccagtgaggacacgaatgccaacagtcaggacaacagcatgcaacctgagacaagcagccagcagcagctcctgagccccacgctgtcggatcgaggaggaagtcggcaagatgcagccgacgcagggaaaccccagaggaaatttgggcagtggcgtctgccctcagccccaaaaccaataagccattcagtgtcctcagtcaacttacggtttggaggaaggacaaccatgaaatctgtcgtgtgcaaaatgaaccccatgactgacgcggcttcctgcggttctgaagttaagaagtggtggacccggcagctgactgtggagagcgacgaaagtggggatgaccttctggatatttaggtggatgtcaatgtagatgaatttctagtggtggaaaccgttttctaataatgtccttgattgtccagtgagcaatctgtaattgatctataactgaattccagcttgtcacaagatgtttataaattgattttcatcctgccacagaaaggcataagctgcatgtatgatgggttactatcaatcattgctcaaaagaatttttgtataatgacagtactgataatattagaaatgataccgcaagcaaatgtatatcacttaaaaatgtcatatattctgtctgcgtaaactaaggtatatattcatatgtgctctaatgcagtattatcaccgccccgcaaaagagtgctaagcccaaagtggctgatatttagggtacagggtttatagctttagttcacatctttcccatttccactagaaatatttctcttgagagaatttattatttatgattgatctgaaaaggtcagcactgaacttatgctaaaatgatagtagttttacaaactacagattctgaattttaaaaagtatcttctttttctcgtgttatatttttaaatatacacaagacatttggtgaccagaacaagttgatttctgtcctcagttatgttaatgaaactgttgcctccttctaagaaaattgtgtgtgcaagcaccaggcaaagaaatggactcaggatgcttagcggtttaaaacaaacctgtagataaatcacttgagtgacatagttgcgcaaagatgttaagtttcttaagaaaccttttaataactgagtttagcaaaaagaataaaactatatagctcaatttatttaaaaaaatctttgcatgtgtgatgttatcattggcttcatttcttacccaaggtatgtctgttttgccataaatcagcagagtcatttcattctgggtgatcctaacacaccattgctacgttagatttgaaatgacatctctgttaaaagaatcttctatggaaataatggtgccctgcaaaatcttcctttgaactcacaggttagggatcacacaacttacttaatcgttttttgtttttgttttttttccttatatgtcaatggcccatgtcctccgggaaaattagaaaagcaaaatgattacaaagtgctgttagatttcttgtgctgggccagccaagtagaagtggacttgacttggacctttaactattttattacagattggacatttgctgttcagatgttttttaacagagggattatctcagaatcctgtgacctccaggttgttttataatctatttttctctatttaacattcctcagatagataggcaaataggacattccttctgtgtcacagaagtatcgtggtagtggcagtctacagtttatatgattcattgtaactatgagataaagaacaaccagtcatgtggccaaaaggattagatttgatttgatgttcacttggagtttactttttgtacatacaagataaaataaatattggatttgt

SEQ ID NO: 151 - DNA, 4247 bp, Homo sapiens
tgatgcctggcagcccacgggccgaaggaagaatcggaaaaacaaagagaccgtccggcacatcacacagcaggtggaagatgacagccgggccagctccccggtgccgtccttcctgccgacgtcggggtggccgttcagcagccgagactcaaatgcggacctgtccgtcaccgaagccagcagctccgacagccgaggagagagggccgagctctatgcacaggtggaggagggtctcctgggaggagaagccagctatctgggccctcccctcaccccagagaaggacgacgccctgcatcaggccaccgcggtggccaacctgcgcgcggcgctcatgagtaagaacagcctgctgtcgctgaaggccgacgtgctgggggatgacggctccctgctgttcgagtacctgcccagaggggcccactcgctgtccctgaatgagttcacggtgatcaggaagaagttcaagtgtccgtactgcagcttctcggccatgcaccagtgcatcctcaagcgacacatgcgctcgcacacgggagagcggccctacccctgcgagatctgcgggaagaagttcacgcggcgcgagcacatgaagcgccacacgctggtccacagctaggacaagaagtatgtgtgcaaggtgtgcagccgcgtcttcatgtccgccgccagcgtgggcatcaggcatggctccaggcgccacggtgtgtgcaccgactgtgctggccgcggcatggccgggcccctggaccatggcggcggaggcggcgagggctctccagaggcgctgttcccaggcgacgggccctatctggaggaccctgaggacccacgaggggaggcggaggagctgggcgaggacgacgagggcctggcccctgaggatgcgctgttggcagacgacaaggatgaagaagactcgccgcggccgcgcagccccccaggaggccctgacaaggacttcgcctggctctcctaggcccgcccgccggcagggtcggtggctgcctcgctccgtccacccgtgtgtgtgtccggtgggtctccactgcggggccagggccacgctcacccctctcgcggcccctcctctgcttccccctgaacccaccccccacggaaaccagccctgcgggctaagcaggtgcgaccccagcaagaggggtgctctgggaccagacatgaagtgagttgggggagggcacagggtgggtttgagtgaagggagagcacggtcctaagtccccagcaggtggtgcgggtgtgtgagtggcccctgtgatggccagcctggcttggacacgtgatgggcctgtggccgggtccagtgggcactgggcggggtggtgtgttcggcccagaggcccctggcctgagcaggtgcagagttttacagacacccggtcagcccggctggagcccgccctcccctcccctagcagccaggtcactgcctgtggctgcagccgtggcccgtggtgcagccgtggcccatggcagcctgtagaatccaggtgcacagagagccctgccaccgtcttacctctgggctttggtgcttaacacacaacacagctgcagaccctgctggaggccgagggctccaggtgctatcttaggtggacacagccctgggggctccttccaggaggggaccctcagccctgtgccccccaccacttcaggccacaccaggttccctctgcaagggcctcggctcagtcgtgtgcacttcctcggagagccttgggctgccacgtccaccccgggctctgcccgtcctgttctgcccatggcccagcccggccgctcctgctgacccctcctggacgggctggagctgggctcctgcctttgctgctaacactggaggcggtgttcctaactgcagtgtgctgcttacacctccccgcgtgggtaaccaaatttttaagtagtcagagacatatcgaggtagttacataaaattattttgtttggcattatttttctcactcgaagaaactatatagggttgtttttcctttagcttgtgctcaagtcctcttgctgtgttttcagaagcactcacatgttctttcttttcctgagtgaaaagcaaaggtcccacggtgtgtgctgtggtgcaccgcctggctttgggggtcccggaggcaggctgcctagactcacagcctcgggaccgttgccacggcctgtcttctcgttcaggcctgcctctgacagcactcaccatgaggacattccatccttcaccccctcctctggcacaagccaccactgcggtgctgtgccttcagatgggaggtgggcgcggtggccgcctccttccctccaggacctgcccgtgtgaagaccccccggagtgctgagcttcagggctgcgtggaaagagtttttactctctttttctagcctgtataccaggcttttccccacattgtcaggtagagcaccagcttccctgaccgctgctgctcggggagggctggggctggccgggggtcctgtggaggagtacatggaggactccaggtacagcgcaggagtcacggcttttgttttttgacattggcccccggttctaccaatgacagggtgccctggctggagctgtcatcacacacacccctcagctcggaggctgtgggctcctcaaagctggagaaagaggccaagatttttctgcacacggagtgtggggataggagccgggccaagcgctggcccctcagcggtgagccctgcccactcttaccgagcaaggtgggtggctctggcacgagtcccccagggggagagcatggctaccagggagctgcagcggagccctccagccctcaccccaggccagccccaccccggcctctttgagaattctcagaactttgtacctttcccctgatttttaaaccctttttctaaacagactgactttcttacaaaatgcatttggaaaccagacctttgctacccaccaatgtctctgggttttgtaccagtccctgctctcaggccaccctgcccaggacccgggcccgcctccccctccacactcaggatgtcctgctccatctggccggctcactccgtgtggcctgcctttgctgaccgttttggggttccccgccggagctacaggggcattttcttccctaaaaccaacagtgtcccactgacctccccaagtgtttgctgcgtggcagatttcctgttcttgttcgcagtttgccgactgaagagtgtgggatttccgaggcccaggtgagcacgtccatctcaggaggcgtggagggaaaagacatgtcatgaagggttttttttatgtgactgatttttttttaaatcgatgttcaaactaataaatatttttttatgaagaggaaaaatgtgtagattacatttcacattttgtatttttgtttgtgtctgtttgtattttggtgtttacaacaccaaagtgggaaatacagtccattggggatggtgttatttgggggcggggagggggcagggacaccacgatttttctgtcaagctctggatcctgaccaggttgtacactggggctctctgagctttgggacacaggacactgccagggctacgtagggaactgactcagaagacgcagcttactgcttccaactttgcacatcttcctctttaaaaaactgagaaaatgcaaaaactggaactttttgcaatattataaaagaagtaatcttattttagctcattctgtgacatgtgcgactcttaagaaagccatacttaatggtggtggttttttttagatcttatattgtgttttgtatgcagcccttttagaactacttgtagtgagggtgctgtgtgtgcttttcttaaatatttatttttttcaacatgctttcaacctgtcaacaaaaacaaaacacacaaaaaaagggcagtgtttgaagattgttgatttttttctggggataatctatattatattgacttcctattacttattataaacctgtgtttgtattggagatgtgtctactattgggggaagaggttctcgtaatcgctcggtgggaaatcatggctctgccgtcctgcctctctgtggccgtgggttcacgtggcctctgcggtgagtctccaagtttctgcctaggcgcctgtgcgtttcctttctgtgacgggattagcttagacatccttgcaaagcgatcactttcaataaattgggaaattgctgctcc

SEQ ID NO: 152 - DNA, 4268 bp, Homo sapiens
attacagcccaggaatgaggcctgaacagaaggaggctctggcaaagcgactgctggcccctgaactgtttggggaagtgcctgcctggccccaggagctgctgtgggcagtgctgcccctgctcccccacctccctctggagaactttttgcagctcagccctcaccagatccaggccctggaggatagctggccagcagcaggtctggggccagggcatgcccgccatgtgctgcgcagcctggtaaaccagagtgtccaggatggtgaggagcaggtacgcaggtggcatatgaacttctgggtgtgttgcgctcatctggaggagcggtgctgagcccccgggagctgcgggtctgggcccctctcttccctcagctgggcctccgcttccttcaggagctgtcagagccccagcttagagccatgcttcctgtcctgcagggaactagtgttacacctgctcaggctgtcctgctgcttggacggctccttcctaggcacgatctatccctggaggaactctgctccttgcaccttctgctaccaggcctcagcccccagacactccaggccatccctaggcgagtcctggtcggggcttgttcctgcctggcccctgaactgtcacgcctctcagcctgccagaccgcagcactgctgcagacctttcgggtatgagagtggcaaggaggatgagataatcagggataccggctctttctggttgggaggaaggcatcttccctgaggccagggaaggcctttcatacctccccacttacacacacacacagacacacacacacacacacacacacacacacacacacacaaccaattctcatgcaggttaaagatggtgttaaaaatatgggtacaacaggtgctggtccagctgtgtgtatccctggtcaggtaagtgtgagatctcccaactgagctcctctccccattctggggcagtttcatatggctggtgctacctcccacactaccctgcagtggccctgagagttctggttagctctgtgcccattagcagccctccccagtgccagatgcaggacagcatgatccactcacattgtcctagactaatgtcaaagctggaagggcctgagaaatcttccaggccacccaccctgctttcagatgaaaagaccaaggctgggagaagctaagggactttgtttgcctggtgcctaactagcagcaacacttgaccacagcagcctgcagtgtgaggctcttaggcgtttattgctacagtggcaaatgccattccacttctgtcctagctttggtccctttccacccccatggttccttttctctgagtgctaagtacagactctctcacctatcactacactgctatacccatcaccgccagcagcctattcccaccacctggccagactgcctgcttcccctgctcccattaaagctgctacaactggattccttggctcttctggcaaatcgaagacgctactgggagctgccctggtctgagcagcaggtaattctccccacttaatttcagaacttcctccctcaatgtagtctaccttctttacctatcccttagccctatttggccagcttatccctactatcctttatttgattgtttgagatacagtctcactctgttgcccaggctgcagtgcagtggcatgatcagagttcgctgtaacctcaaactcctgagctcaggcaatctttctgcctcagcctcctgaatagctaggacgacaggtggttaccaccatgcctggctaatttttaaatttttttttttgttttttgagatgaagtcttgctctgtcacccaggcttgagtacagtggcacaagcttggctcactgcaacctctgtctcccgggttcaagcgattctcctgcctcagcctcccgagtaactgggactacaggcactccccacaatgcctggctaattttttttttgttttagtagagacagggtttcaccatattggccaggctggtctcgaactgctgaccttgtgatctgcctgcctctgcctctcaaagtgctgggattacaggtgtgagccaccatgcccggccaatttttaaattttttgtagagacagacaatacaaaaatgtggacactatgtggagacactatgttgaggtactatgctgtccagattggtcttgaactcctggcctcaagcaatcctcctgccttggcctcccaaagtgctgggattacagacctgagccactgcacccagccccctagtatctcttataatgtgacttgcttttctttttctttctccttcccttttctttcatttctttctcactctcgagagaagagtgggcatctgggagagtgggaggctggtgggtcccacagagtgaggaggcaggactgggtccaaggcagtcctgcctctccactctagggggtatccttggacagtgtctcttctgggaaggggctcgtctttctttctcttgtaggcacagtttctctggaagaagatgcaagtacccaccaaccttaccctcaggaatctgcaggctctgggcaccctggcaggaggcatgtcctgtgagtttctgcagcagatcaactccatggtagacttccttgaagtggtgcacatgatctatcagctgcccactagagttcgagggagcctgagggcctgtatctgggcagagctacagcggaggatggcaatgccagaaccagaatggacaactgtagggccagaactgaacgggctggatagcaagctactcctggacttaccgctccaaaggagactccagtctcaggggaagtgctggagaccttaggccctttggttggattcctggggacagagagcacacgacagatccccctacagatcctgctgtcccatctcagtcagctgcaaggcttctgcctaggagagacatttgccacagagctgggatggctgctattgcaggagtctgttcttgggaaaccagagttgtggagccaggatgaagtagagcaagctggacgcctagtattcactctgtctactgaggcaatttccttgatccccagggaggccttgggtccagagaccctggagcggcttctagaaaagcagcagagctgggagcagagcagagttggacagctgtgtagggagccacagcttgctgccaagaaagcagccctggtagcaggggtggtgcgaccagctgctgaggatcttccagaacctgtgccaaattgtgcagatgtacgagggacattcccagcagcctggtctgcaacccagattgcagagatggagctctcagacttcgaggactgcctgacattatttgcaggagacccaggacttgggcctgaggaactgcgggcagccatgggcaaagcaaaacagttgtggggtcccccccggggatttcgtcctgagcagatcctgcagctcggtaggctcttaataggtctaggagatcgggaactacaggagctgatcctagtggactggggagtgctgagcaccctggggcagatagatggctggagcaccactcagctccgcattgtggtctccagtttcctacggcagagtggtcggcatgtgagccacctggacttcgttcatctgacagcgctgggttatactctctgtggactgcggccagaggagctccagcacatcagcagttgggagtttagccaagcagctctcttcctcggcaccctgcatctgcagtgctctgaggaacaactggaggttctggcccacctacttgtactgcctggtgggtttggcccaatcagtaactgggggcctgagatcttcactgaaattggcaccatagcagctgggatcccagacctggctctttcagcactgctgcggggacagatccagggcgttactcctcttgccatttctgtcatccctcctcctaaatttgctgtggtgtttagtcccatccaactatctagtctcaccagtgctcaggctgtggctgtcactcctgagcaaatggcctttctgagtcctgagcagcgacgagcagttgcatgggcccaacatgagggaaaggagagcccagaacagcaaggtcgaagtacagcctggggcctccaggactggtcacgaccttcctggtccctggtattgactatcagcttccttggccacctgctatgagcctgtctctacagtagaaggagattgtggggagagaaatcttaagtcataatgaataaagtgcaaacag

SEQ ID NO: 153 - DNA, 3673 bp, Homo sapiens
ctcctcctctcagcacctggcgcggcgctacgcggccctggccgccgaggactgcgccgctgctgcccgccgcttcctgctatcctcggccgccgccgccgccgccgctgccgcctcggcttcgtcgcccgcctcctgctgcaaagagttggggctggctgcggccgccgcctgggagcagcagggccgaagtctcttcctggccagcttggggccggtgcgcttcctggggccgcccgccgccgtgcagctcttccgggggccgacaccgtcaccggccgagctccctacgccccccgaaatggtgtgcaagcggaagggggccggggtccccgcctgcaccccctgcaagcagccccgcagccgctctgccctccgccctcttctcccacctccgaaggtgcccccaccgaagctggcggggacgctgtccgagccgggggcaccgcccccttgtccgcccagcagcagcatgaatgtggcgacgcggactgtcgggagtcccccgaaaacccctgcgactgtcacagggagccgccccccgaaaccccagacatcaaccagctgccgccgtccatcctgctcaagatattttccaatttgtcactggatgagcgttgcctttccgcatcattggtttgcaagtactggcgtgacctttgtttagacttccagttttggaagcagctggatcttagtagtcgtcagcaggtcactgatgaattgttggaaaaaattgcatcaagaagtcagaatataattgaaatcaacatttctgattgtcgcagtatgtctgataatggcgtatgtgttttagcatttaaatgtcctggacttcttaggtatacagcctacaggtgtaaacagctttctgacacctctattattgcggttgcctctcactgtcctttacttcagaaagtgcatgtaggcaaccaggacaaactcactgatgaaggactcaagcagctgggctcaaaatgcagagaactcaaagatattcatttcggccagtgttacaagatctcagatgaaggcatgatcgtcatagctaagggctgtctgaaattacaaaggatatacatgcaggaaaacaaattagtgacagatcagtcagtgaaagcatttgctgaacactgtcctgagcttcaatatgtaggcttcatgggttgttcagtcacttctaaaggagtcattcacctaaccaagctaagaaacctttccagcttggacctacgtcatatcactgaactggataatgaaaccgtgatggaaattgtcaagaggtgcaaaaatcttagctctctcaatctctgtctgaactggatcataaatgacaggtgtgtggaggtcattgcaaaggaaggacaaaacctgaaagagctatatttggtgtcctgtaaaatcacagattatgcactgatagccattgggcgatacagcatgacaatagagactgtggatgtcggatggtgtaaagaaatcacagaccaaggagccaccctgattgcacagagcagcaagtctctgagatatttggggctgatgagatgtgataaagtcaacgaagtgacggtggaacagctggtgcagcagtacccccacatcaccttcagcaccgtcctgcaggactgcaagaggaccttggagagagcctatcagatgggctggacccccaacatgtctgccgcctcctcctagcgctcctgcctcgcctagtccactgggatcattcagcagagcagaggagaattgtacatttggggagctgatctctcggaagggttttaactgtcacctgtctgtgtgtgttcaagtatgtgtatttgtgtcttgtttgcatactgcataccaaaagtgcagttgtcatttgttcccaagtgagctggctttttttcttagaaattaaagattatgaaagccacaaactttttagtttttaacttcaaaggcttctttctctttaaaaaaaaattatttttaatatagagtcaaaaaattggatgtattattttgagcttctaattgctgccacttggagatgtccaagtaagaaggccttctttttacatgggatgaattgtgcacttctactgatgatgactacagcagaagtgatgttatacgtacaggcacttacactctctcacatattcacacgtgtgcacatctacaccagggctctgatctactctagatcgtttcctgacagagaagccttcttccaggccactaaggtagcatgttatccactgtggcactgcctaactccgtgtatcctcgggtggccaacttgctatctggtgggtgacttggggactagaaagaataaagccttttctaaatttgttatatagaggcaacagtctgaactctcctggccagctcacgaaagttaattatacattattctacaaatgcattctgttgagcactaaatattttagttggttttatgttaacattgtgttagcttttatttcctggatagtaactggtcaggatatattttaatgatatttgaaactaatcttagcattgaagccaccaatgtaattaatggtgtgcagttattttaaaaactacagatcatttcattattttcttaattttggtaattattaaagtctatttctgagatacgagagggtagtcacattaatagaagattcatgagtgagatataagtagacaatctttctactgttgttgctctttttgctttgctttgggttcttgaacaggttttttggatatatgcatgttgtcattttggactagttctcatgctactgcaaagatctattgctagctaatatatgagttaagaaagaaaattagaaaatctgttcattgaaattctgtttacacttgtcagaaataagcatttctttgtttaattaaggattgccagcttcagttaagacaagacctatcagtaaatgaatatatgttttgatttaacacatctttacaattaattcataatagggactcaggctcaaataactgttcctgtgtctagatttataatgaggacatcagggagcctttttaagctaaagagtgattatctttcacagtagaactagaaacaaaaccctaacttgtgaagttgctatttatttttccctgagtgaatataactgttatttggtctttaacagatatactgaggtttgagtttcactttctttaagtctcacattgctaacatgacattagctgtaagaaacaagatagctttacatttgaatgccatttactgatttctaatgattctctttttttgtaaacaactgtttcctttgattatgtcaacatgtttctgatgtggcatttttgttttaatcccaatcggttaggaaaatctagtcagtaagcgccatgagtattcttcccataactaaatgggtttctaatttaatttgaagggaataaaatttgtgtaagaaaaaagctgtttaacattaataaactatatttcttcttacacattgaactgtatcattttcatatccacttccccaccactgaaatatcttatttcacaatattttaactgatttttaatccaaaactaatttataagacagtatgtatagtaatagtagcttgagtgaatatgcaaaagtttaatttttatatatgtcatactatattttaaatagtt

SEQ ID NO: 154 - DNA, 3920 bp, Homo sapiens
aatcagtgcatcttagaggtattacaaaatgtttgagctcaaaagattcttaccctcggtcaggaaagcttcaagaggaattgctacttactcagccttccagagagtatgaggcacaaatagagggcacaggtgagcatagggtgtatgaaagcagcagcttgtgaccagggtaaggatgtgtgagcaagtgcagtgtttcactcctcttaggttaaagaaatgccttcaacttttgttcataatctgtatttctatttcttttgtccacctctgctggtcataatggtccttaaaaactatatatatagacataaaatgcattatttcttttcttttctttttttttttttttttgagacggagtcttgctctgtcacccaggctggagtgcagtggcgcgatcttggctcactgcaacctctgcctcccgggttcacgcagttctcctgcctcagccttccgagtagctgggattacaggcacatgccaccatgcccagctaattttttgtatttttttagtagagacagggtttcgccatgttggccaggctggtctcgaactcctgacctcgtgatccacccgcctcagccttccaaagtgctgggattataggtgtgagccactgtgcccagctgaggtttgtagactttctaaagctctggtacttaacacatacacacacacacacacaccccctcacacacatgctccaattcctgatacctttgtgcacaactccttttttatagaaatggacccagagatcttccatggcaggaagtatgtgataaagatactggaatttctttgtctccaaatcttgtcagaaataatgtgagccctcacccccatagaaaacctcatgtcattgtttttatttggttttgtttgtttttgttttctaaattgagatgcagtctttgggaggcctaggtgggaggaggattgcatgatgccagtagtttgagcccagcctggtcagtagagcaagaccttgtctctaccaaaaatataaaaattagctgagcgtggtggtgtgtgcctgtggtcccagctaattggggggctgaggtgggaggattgcttaagccagaagtttgaggctgctgtgagccacagttataccaccacaccctagcctgggggacagagtgagaccctatgtgaaataaataataaataggtgagatagataaatagatagatagagagatatggagctggctgtgttgcccagattggtcatgagctccagcaatcttcttgcctcagtctcctgaatggctgggactacaagtgctttctgctatggcctgctatttaggatttttattagggggcactatggttagatttgctagggtaagtatattctgtataacttaagtcatttgctggaaaagacagttaggccgggtaatatgggaatagtctttttatcgaccaataatgctttttcaagaaagaaaaatagtaggtgattaatttttgttcaaagagatggaacataaaaacgtgacattttcttaaagttgtgtgtaactaatgatgctaaagagccatatgcactttttatcgattgactgtgcgggatcctgctttgttgcctaggctggagagtagtggcatgatcatagctcactgcagccttaaactcctgggctcaagcgatcctcccacctcagctactctggaggctgaggcagaagaatcatttgaacctgggaggtgaaggttgcggtgagccaagatcgcgctactgtactccagcctgggcaacaagagagactcttgtctcaaaaaataaataaataaataaataatgaaaaagaagttacgtggccagtcttaagactcttgccagaacaagaatctgacaaatggttttaaaaatgtatctaaaagacacaagtatatttttaatttactctcctgatagcttgaaatctgtttataagtaacgttggtttcttttaacagattgcctggaatggaaaaactagtgatgtgttttttgtcttccataaggactgagagagtatattaaaatataattatcaagacacttctttgttgaacatagaaattacatagtctacatgatcgtttagttactgttgaacacatttcctgagtatattctagcttagggagcttaataagtgcttgataattgagacaagggacctagcttataaattcagtgagtttaccgggtggtaattcctttgaattatgatgaagagacatagacatttggggctttttgtttttttccaaattgaggaggaatagggcagagccgagttttctcattttagctttgtttagccatcatttttaaacagctgaatggggttaggggcagtccctggccaaggcatggagctgtgctaaccagcccacatgctgatgtagaacaagtgcacattggagtggtcttgacattttgctaatgttgaagtcatgccttatctttttggctttaaaaggagaaaattatcaaagccccatcgttctttggcagcaaagagggtaatttggtgaatactgatgttttactctcagggacactatcaagtgcccagaatttccttggtgctctttggaacatagaagaaaacctgactgaggcattcttgagttgctttttagtctgtgaactataatattcatgagacgcttaacacttcccaaagtggcagggaggaaactctttgtttcttctgattccaccggaagagagagtggacaggacccaggacttttcggagtagagttagtgattcatctcttgtttgtgagatagatggggcttgagtagtgagtatccctttgggacatttttttgaggggaagtgagaggcagcatgcttcatttatgcacagtgattgaggtcgctgaataatagattatatgttgcaaacattattaagcactataagccttgttatgtcagctgctagatatcatatgtatttattttactatattcagttccaatatgtgtgtatgacttaatatcttcattaatagattttctttttttctgagacggagttttgctcttgctgcccagactggagtgcagtggcgcgatcttggctcaccgaaacctctgcttcccggtggtaggtgattctcttgcctcagcctcccgagtagctgggattgcaggcaagtgccagcacacccggctaattttgtatttttagtacagacggggtttctccatgttggtcaggctagtctgaaactcccgagctcaggtgatctacccgcctcagtctcccaaagtgctgggattacaggcgtgagccactgcgcccagcctgatagattttcttactacaaatattcaataacttttaaatttgtatcatctgacttacaaatatcttttcattgtgcattcattcataagtagactgaaaatttgtaaatttgagatgggcaacacaactcctcacaattatgtagctatttcttttatctcatctctaaacctacccttccattatctgctttgtgatgctcgggctgttgtactcattatattaatatataacccagtcttatatataactcgtgtaatatagtgaattcggctttaaaatattctaatattcagctgggtgcagtggctcatgcctgtaatcctaggactttgggaggccggggtgggaggattacatgaaccttgtagttagggaccagcctgggcaacattgggacaccctgtctctataaataataaaaagattggcatggcgtggcggcgtatgcctgtgttcccagaagtgtttgggaggttgaggtgggaggattgcttgagcccgggagttcggggctgtagtgagccatgattgtgacactgtactttggcctgggtgacagagcgggactctgtctt

SEQ ID NO: 155 - DNA, 3168 bp, Homo sapiens
cctgcaccctccctagctgccctttgcatcacctctgctcccagctccctccagggctccatcatcccccatcccattggatgcccagcttctgtggagcttgggaagggggtggcagtattccctgggcagggggatggaagagaccacagggtcataggccacagtcctagtcccccttcttacccccacccctggggaagggagtccatgtggtgactcagattagatcactcgacctccctgagcctcagtttcccttgctgtatgatgaggagaatcagcctgctccagacccttctccatggtggctttatagatcagggctgggaggtggaggaggggacaacaggtgtatcacctgccaagaaccacctgacacctcttgccttgtccatctccccccgcccccatccactacagtgcccagggagtgggcagggcccacgctggggggatggcctcgatcctccctggcctcgaccctcttctctgtcctccttgtcacccttggtggggaggggagctggcattccttgaagacaacttgcctggccttgccccatgtccctagtgccctgccctagtcaccaggagtctttattttctagccatctcctccatgccttcaactcagctccttctcctcccaggccctgtctcaggccttctgtccagtgggctcccttcccacttcctctctgtcttccctcctagtccaggcagactctcctgaagtggagcctgacattcagggggtggggctgggctggcagggagtggggatcaccgtggggaggtgcagagtttctggcccccgctctgtgccaggagctaggcaggagccccctgtctccaatcctcagtccagctgcctccttccccccatcgcccttcccccatcacacgccctcatctccgaggctttagttggagtgacagggagactcaacagggcgctgggtattagcaatttggggggatattacacaggaatgtttacagaaaggcaattgcccggaaaatgactttggttgctgtggtatggggcggaaaagatggttttagaaaacagacacagatgggcttctgatccaaggacccacagccagccagcagaaactgaggagtatgggcacacaaggaaggcagagccaggggcacccagggacagggaggccgattccttcactagcaggggaagcaaaggatcccctctcctaattcgggttcccagagcctctgcctagtttgatacatatctggtcccggttgacctttgtcctctggcctccaacctccaagcacaccgtgtgcttcccgactgcagcaggcacccagcaggatggagtcatcatgcacaatcgaaggtggcagtgcctcggggctcctcctggctgacttgggctcctgtagcattggctgcagaggagggactgggggagcctcatgctgtgtgtttgtgtgtgtgtgtgggtgtggcctaaggcaggcaggtcctccacccttccagctgtctccatgctcctctcctgctgccctgcctagccccatgtcctgtgggcttgtgagttggtgtcttcaccctgagtgcctcctgccctcgcttcctgccagggctataacccagctcctacccctgcccaggcagtgggtcggggcacacatgtgacagcctctcaggtccccaagggaggggttttgtccagcctccttatctccacagagagggttacagggacctgatttccagatcttgagtttggggctggggaggactcacatcaggggccccagagagttctcttctccctttcctgagctggtggcttcgttcttcctctactttgtccatttgcctctctccttccttctccctccctctcctctcctctccccgttctcctcctttgcagatgacatcatgtgtgaatgttgcccaggggcagccagaggacagagtagagggttacatccggggtaaagatgccagttggggaccggcttggtggcttatgagatggtgtcactaagatgttgggatcttaattctcataatcagttacagtgatctcatgtaaaagaatgtggtggaggataaaaataaatgaggctgataaataaacgtagaatttggaattgttcggacaaatgacaacgtcactcttcccaagcacctgtgccgtcctcctagccggccactggggggcgcccgccacttcccggccaccccagcctcaggccactttcaccttccgcgtttcccaggcggggcaggctgagctgagggtggcagaacccgccttcctcaccctgcccttcccctcattcggattctggatttcgccagttcttggcatcttccctgtggcttgaatctcggactcaaaaaatatagtcagccttgcacactgaggttccttggagaaaagagaagccctgagccccctcccttatgtctctggtttccccaaccccatccctgggttggggggaaccttcaggcccaacgcccctccaccagggtatcctagctttgcttcccttcccccagagttccctgcctccgtctctctctatcgcaatgcccctatccctctcccagcagaacccagccatgcttaagaccccagcccgggtctctcatgccctccctgcctggaacaggacgcattgatctgtgcagggctggcaggtgcctggatccgcttgctagattggaatcgatccctgtgtcttttccctgggctgctcaggtccgaggggggtcagggccactccgaggacttgctgatggctggaacaggcgtaggggtaacagggaggtcaggctgctacaggcccatcgctgctcaggaatgtctttcattgaaagcaacctactttggcctggcgcggtggctcacgcctgtaatcccagcactttgggaggccgaggcgggcggatcacctgaggtcaggcgttggagaccagcctggccaacatggtgaaactccgtctctactaaaaatacaaaaattagctgggtatggttgtgggctcctgtaatcccagctactcagaaggctgaagcaggagagttgcttgagcccgggtggcagaggttgcggtgagccgagatcgcgccattgcactccagcctgggccatagagtgaaactctgtctc

SEQ ID NO: 156 - DNA, 3466 bp, Homo sapiens
accattccacgcggctcgagcccgcgtgcgggcctctttcaggccgctcctagtggacgcagaggcgggccgaggacggtgccagcccccaggccccaagaggagctggtccccaggacagaggagggagaggagcaagaggctcccctgggccccttccaggccccacctccaggtcacaggcgcgagatggagtccccaagagggtggaccctgcaggtggccccagaggaaggccaggtcctctgcaatgtgaagactgccacgaggggcctctctgagggggctgtgtctggaggctggggggcctgggaaaactccacggaggttccgagggaggcaggggacggccagcggcagcaagccacactgggggcggcggacgaacagggaggccccggcagggagctgggccccgcagacggtgggcgggacggggctgggcccaggagcgagcctgcagaccgggcgttgcgcccttcgcctctcccagaggagccgggctgccggtgcggggagtgcggcaaggcgttcagccagggctcttacttgctgcagcatcggcgcgtgcacacaggcgagaaaccgtacacgtgccccgagtgcggcaaggccttcgcctggagctccaacctcagccagcaccagcgcatccacagcggcgagaagccctacgcttgcagggagtgcggcaaggccttccgcgcgcaatcgcagctcatccaccaccaggagacacacagcggcctgaagcccttccgctgcccggactgcggcaagtccttcggccgaagcaccacgctggtgcagcaccgacgcacgcacacgggcgagaagccctacgagtgcccggagtgcggcaaggccttcagctggaactccaatttcctggagcaccggcgcgtgcacacgggcgcgcggccgcacgcctgccgggactgtggcaaggccttcagccagagctccaacctggccgagcacctgaagatccacgcgggcgcacggccacacgcctgtcccgactgcggcaaggccttcgtgcgtgtggcggggctgcggcagcaccggcgcacgcacagcagcgagaagcccttcccctgcgccgagtgcggaaaggctttccgcgagagctcgcagctcctgcagcaccagcgcacgcacactggtgagcggcccttcgagtgcgccgagtgcggccaggctttcgtcatgggctcctacctggcggagcaccggcgcgtgcacacgggcgagaagcctcatgcgtgcgcccagtgcggcaaggcctccagccagcgctccaacctactgagccaccggcgcacgcactcgggcgccaagcccttcgcctgcgccgactgcggcaaggccttccgcggcagttccggcctggcgcaccaccggctttcgcacacgggagagcgacccttcgcctgcgcagaatgcggcaaggccttccgcggcagctccgagctgcgccagcaccagcgcctgcactctggcgagaggccgttcgtctgcgcccactgcagcaaggccttcgtgcgcaagtcggagctcttaagccaccggcgcacgcacacgggcgagaggccctacgcttgcggcgagtgcgggaagcctttcagccaccgttgcaacctcaacgagcaccagaagcggcacgggggccgcgctgcgccctgacccgaggacgccctgagcgggaggtcgcggacacacggcattgcggggtctcgggcgtgagtgcgctgtctgctggcccagactttttcgggccgccggtgcgggcgccctcctgctgggagtgcaggggcggccttgggtgtggagaaccctggccgcacagtccctttgacgatagtccaccggccacccaggcctgtctggggacatgtaggatgggctcttaccccagggagggcggcaggctccacttcggcgagaggttcgtccatgcagaggtgggcaagaactggggtctccgacaggtgtggctatttctttgagttctctggcactgtcaaaagcagccaacccaccccccagtccacatggtcaccactgctgctaccagctgctcagtgcagtggccactgtgtctcctaaggtgctcgcttcagtcagcacttcatctcaggcaaccacaggtgacagttaaacatgatgaaaccgcatgctatggctttctagtgtctcatattctgttggcaagaagctcagcactgcattcctgaccgaggtcagaaccagatcaatctcagaatctcacctgtgtaggtctgtttcatgggacttttcttttttgggggagggggcagggtttcactctgtcacccaggctggagtgcagtggtgcaatcactgtttattgcagccgcgacttcttaggctcaggtgatcctcccacctcagcctcccaagcagctgggatgacagacttgcgtcactacacctggctaattttaaaattttttgtaaggacagtgtctcaccatgttgcctaggcgggtctcaaaactcctgggctcaagtgatcctcctgcctcagcctcccaaagcgttgggattataggcgtgagccaccgcacctggccagggaaccttctttataccaagtaccacaccagtcagagtcaagtcaggaaatagaaaccacactaggtatttcaaacagaggggatataagttagggactgattgtgcaggttttgcaaggctcagagagcaaaagtggatgttgcagaatctcagagctggatacttgcaggaagctgctaccacccttagggctggagaacccagggaagctaagaggagggtgcaacgaggctggtgttgggactgccaaaggaaacacagaatgacagctccatctctgcagacctcagatttgaccaggcctctggctgcctgggcagcctcattgccaatgggctgaaaggttctgtcactgttcagtggtctgacttctgagttctgtgcacaccctgagctctgctcctctggcctggccaccagtccttgtctgagtgccccaggtctggttatgacttcaggcctcagcacctggttgtctcttctgcaaagaatgcattctcccccagtccacccagaacacacagcctccatccaggtattggctctgagcaggacagagagcatgcagcaggtgctcagcaatatggaaatgggaccaaacagagggagtctccacagctccccgtccctcacagcagaagccagagccgctgcagtgcccagctggtcttcatcacgtctatgagctctgcaatcgctctgcagtcgcctcaactcctggtctcctctgctccttctcactgcacccgcatctcccatgtttgcactggctgttccctctgcctggaatgctccttacccagttatcccactgtcttctttgcatctggcacacagtagatgctcaataaatgcctgtggaatg

SEQ ID NO: 157 - DNA, 3100 bp, Homo sapiens
aggtgccgcccctgccacagcctctagcagctctcagtggccccatcctgaaagtgggttgggggtgtggggtcctgcctggcctcccctccctggcataacttctctggccagcactcggactggggacccaggtcccttggagagcagctctccttgcctcccaagggctcagatgctgctggcagagttgtctcgggagcggggtgagctgcagggtgaacgcggggagctgcggggccggctggcgcggctggagctggagcgggcacagctggagatgcagagccagcagctgcgcgagtccaaccagcagctggacctgagcgcctgccggctgaccacgcagtgtgagctattgacacagctgcgaagtgcccaggaagaggagaaccggcagctgctggctgaagttcaggccctgagccgggagaacagggagctcctggagcgcagcctggagagtcgggaccacctgcaccgcgaacagcgggagtacctggaccagcttaatgccctgcgccgcgagaagcagaagctcgtggagaagatcatggaccaataccgcgtgctggagcctgtgcccctgccccggaccaagaagggcagctggctggcagacaaggtgaagaggctgatgcggccccggcgggaggggggcccccctggggggctgcgcctgggggccgatggggctggcagcaccgagagcctggggggccccccggagacggagcttcctgagggcagggaggcagatgggacagggtccccttccccggcacccatgcgccgggcccagagctccctctgcctgcgggatgagaccttggcaggcgggcagcggcggaaactcagctcaaggttcccggtggggcgaagctctgagtcattcagcccctgggacacccctaggcaacgattccgacagcgccatccaggccccctgggggcgcccgtctcccacagcaaaggtgagggacaggggtcactgtaccagccagccccccaactctttgtggacccaccagctccttgggggaggaggcttccttcttgtcccctgtgtctcctgcaagctctgtccacttccgcactggccctgggcccagtggttgccttgtgcctcccaggacctggtgtgggatgggagaactccgctgagaccctgcaggaacacgaaacagatgccaaccgagagggtgagtgggggactgtggaaggagtagtattctttgtcctgcctggggcccctggcagaacctcattcatccattctttcattcgacaatgatcctttaccaagtgccaggtgacgtgctggcaggggacacagcagggaacgttctggtgtgaggaggcagatagtaaacaatttgcctaaaaataattattatctacaacagccctgtccactagaaatatggtgtgaaccacatgataattttaacttttccagtaggcttaccagaaaaagtgaaaagagacaggtacaatggattttaataacatttaactcaatatgcctacgctattaccatttcagcatgtagccagtgtaaaaatcatgaatgagctattagacgtgattttttttttttttttgagatggaatttcactctttggctcactgcgacctcctcctcccaggttcaagcgattctcctggctcagcctcccgagtggctgggattgcgggcatgggccaccacgccaggctagttttgtataattattattattttttttggtagagacggggtttcaccatgttggtcgggctggtctcggactcctgacctcgggtgatccgcccgcttcagcctcccaaagtgctgggattataggtgtgagccacccagccagacgtgatttttttcatagtaagtctttggcagtttcggaggccgaggcgggcggatcgcttgaggccagaggttggagaccggcctggccagggtggtgaaatcccgtctctactaaaaatgcaaaaattggccaggcgtggtgtcccatgcctgtggtcccacctgctcggggggctgaggcgggagagtcgcttgaacctgggaggcggagggtgcagtgagccaagatcacgccattgcactccagcgttggtgacagagtgagactgtctcaaaaacaaaaaacaaaaaacaaaaaaacatagtaggtctttgaagcacgtcacaggccaaccccatctcacctacttagctccgccctgggcagctcagccctagacccggctggaccatcaggaggcgctaatgctctgggaagaaaggagagcaggggaggggtcaggagctcaggagctctgggcaggctggttggagttttagtaactggggtgctggggtgggcctcagagaggatgtgaaattggagcaaagacttggaggggagagtttgtcgtgtggacatacctgagaacagcattctgggcagagggaaccgctgagggaacagcaggcgtggtgcagctggaagcggggggtattggcaggtcgggggtgggcagaaggtgctcgagcctgtgggcctcctgggactctgggagtcctcctgagggaagcagatctcagctgagcctttccctctaggccccgaggtacaggaaccggagaaacgtcccctcaccccatccctcagccagtgacaccgtgggaacagcaggcttgggagtgcagccttctcggcactggagtgtcagcagaggccccaggcagcccaagagctcagggagccagggaccccaaggggagtccttggacaaggaggcctgggccctgagatcctccacggtcagcgccggggcccggagatggagctgggacgagtgtgtggacaggggggatggctggcccccacgagcagctccaggctggagttctggttcttccaggtggctcccgttgaggcagcggtctctgggggatcccccagctgaaggaggctggcaggagttggcaagagaaccccctgccctgtccaggtgggaagctgagtcccagtgctgggggactgtggccggggctgatcttgagccttaactggacatgaggggcatgaaaataaagctgaactgcagcc

SEQ ID NO: 158 - DNA, 5109 bp, Homo sapiens
gctctcctgccgcttcgctccgcgctctcctgccgctccgctccgggtctcccgcgctcctctccccggctcggccgagcgcgctgccccgacgccgccacccagagccgggccgcgccgggcgccgagatgaaggtgctgggacaccggctggagctgctcacaggcctcctgctccacgacgtgaccatggccgggctgcaggagctgcgattccctgaggagaagccgctgctccggggccaggacgccaccgagctggagagctccgatgccttcctcttggctgcagacacagactggaaggcctcgggcgagctcgccacccagatccttgctgcccaggagaacagggcacggagcctgagatggacctggtgttctgctccccagagacccgagagccgggccccaggctggttgcctctgggaacgagggccgggtgggtctgcagggggtgggcatgtcaatgtcagcaagctgcctcctggccccgcttcctctccctggtggcctggagcccctggcagcagggtgagggtggggagggcagagctggtgtgtgcctgaccatacccctggccctgctatctgcccagggcccctggcccccggcccccaaactccattttcagcatgtggggaaaccccctgtatctgcgtgggcaaggtgggattttcatccctggtgggtggagaaggagcagccccttgaagcagggtgataacccaagttgccccagaaagcagcagctccccaggcctccacaaggttaagcgatggaaccttcctaatgggaaggctgggcgtgggggtctggtccccaagatgttgggcttggggccctctcgggccctccatactccccaaggtgtgggtcaagggctctagctgtctgggcagtgcccatgcaccctgccctgccccgcattggtaagctgtgcatgtctgtgacgaccctgtgtttacctgacatgggtgagtctgtacgtgtggtctcggcttttgtattcggaggatcccgtgtgagctgcagctgttggcgtgtgcctatgtgctgggggcggatgcaggggctggggaccatcaaggatgatgtgtggctggggtgggaggagcagtgacagggctggggcaaggaggacttcagaagccaattggagccaggcttgtctcccagcagccaatctgggagctggggctcctggtaagcgagtggctgctcagaaaccctgcggggaggaggggctagctaggctgggccaggatccctgtataaatggcccaggagctgtgccccatcacagagccgaccatctcccactcgagctgcccccgccctctggacccgagtgactcaggcctttgtttgtccttcctggtagaggcgggttccctccctcggcaagatgccggagtgctgggatggggtgagtgagggcgctgcgggcatcaaggtgggccgggaggatggtgcatccttatgacccaccgcagggaggaagtgcccccctcaacccacatctggtggcagcccggccttcaaatagcctcaccctggggtcactgagacacggccagagtgctccaggttccctggtgatcctgtttgcaggagtggctgggggcagctgctagtcagagcccatagcaggggctggggggagcgtgtggttggggggtgggtgacatatctgcaggaaatggaacgtggaaggcactgtctgacttggctgcattgcccgtgtggacccgggcgctagtgcctgcatgtccctctgaccgtgtgccctctggtgtgcgcttggatggtgtctgccttggtgatgcctggggccatcaggccagggggcgggggtgtccttggtgagcccccgaggctgtgtgcccagtgtgcgtgccgggtctgtgcgtgcaggggctgccgtcccagtgggcggccgtctagcctgtttggatggctgcgccagtgtgatgggaaggacaggcggcctcttccttaggagccacctcacagttcccagggctctgctgcgccagccgggcagaggcaaggaggtctgggccacacaggaatgacagcctttcaggcaggggtccctgctggggaggaacgaggaggggttgcctgcctgccttattttgtaggtgggggaaggcaacgctggagccgtgaagctggcagggctaggggaccccaggtggagcccagggcacctcctctcgccggggcatcaggaacatgacatcgagacaccctacggccttctgcatgtagtgatccggggctcccccaaggggaaccgcccagccatcctcacctaccatgatgtgggcctcaaccacaaactatgcttcaacaccttcttcaacttcgaggacatgcaggagatcaccaagcactttgtggtgtgtcacgtggatgcccctggacaacaggtgggggcgtcgcagtttcctcaggggtaccagttcccctccatggagcagctggctgccatgctccccagcgtggtgcagcatttcgggttcaagtatgtgattggcatcggagtgggcgccggagcctatgtgctggccaagtttgcactcatcttccccgacctggtggaggggctggtgctggtgaacatcgaccccaatggcaaaggctggatagactgggctgccaccaagctctccggcctaactagcactttacccgacacggtgctctcccacctcttcagccaggaggagctggtgaacaacacagagttggtgcagagctaccggcagcagattgggaacgtggtgaaccaggccaacctgcagctcttctggaacatgtacaacagccgcagagacctggacattaaccggcctggaacggtgcccaatgccaagacgctccgctgccccgtgatgctggtggttggggataatgcacccgctgaggacggggtggtggagtgcaactccaaactggacccgaccactacgaccttcctgaagatggcagactctggagggctgccccaggtcacacagccagggaagctgactgaagccttcaaatacttcctgcaaggcatgggctacattgcgtacttgaaggaccgaaggctgagtggaggagcagtgccctcagccagcatgacccgcctggcacgctcccgcactgcatccctcaccagtgccagctcggtggatggcagccgcccacaggcctgcacccactcggagagcagcgaggggctgggccaggtcaaccacaccatggaggtgtcctgttgaagcccttgatcccgctgacgacgcccacgtcgaggccccaccgccatccttgcgccggctcatgttccctttagtttatttttgtgagggcaaaggggaggaaatggggttctgtttgaaaaaaatgaggggatcttagatgctgcagcagaacagtctccaggtgttttaaggggctcagtcctcctcatcccatctcactctccgtggtaacttagccaacttgacccctctcatcccactcccggcggcccaggcacagaagggcagggccatagggagggagattcgctacggatccaggccattcctgggtgagcccttgggcaggcatgtttggagatgagagaggcttcgagagggtgggtgctgggccacaggggtgcggggccagctcaggcactggcgtgggagccctgggagaccccttcccccaccctccaccaagcacacctgtttctgtctcatagcacatgtgacaatcatctggacaacagccacaagggggcgctcggaccaggcagccactttcctggtgctctctgggcccagctggtgctgtagggccacgcaggcaggggcgtcaaggggtttctctgcccaaggaagacagaacatggagaaccgtcagggcaggaaccccacagactgtcccttccagcccacactctgccacctcctggccctgtcccaattctgagccaaggcctccccgaggcagaagttgcctggtcctctgtccccacagtgacctgactgggggtgagggagaaggaggagagagcccatgtgtggtgtgtgtgcccctgagaacttcgtggtgactgcctttgggagcccgcaggtggccagaggcaggggtagctgagttcctggagaccccttttttgcccccaggttccccagagggcaacgccatcagtagcagtgtggtgtttcaggcagagctctggccaggctgtgccagtgtgtcccggacgcatcactaaggaagagagagtttatttagtcaactggcccaaggcagcgaggcttctacagtcccacaccccatagccgcctgggctggggcttactgggggctgaaggttctggacatgaacaagggtcaggtagaagagaaaggcttcccctacaccccagcctcctgctgtcccctgaagcccaggactgcgttgtatgctttccatccactcaccttaccccatagcatcttgcggcccagaaaccagagccatttgtctcagaccctaaatcaataatcacaaaccccaaaacgggagagagcagtgaaaacatgcagggctgtggacgggggaagggttgtggcgggtgttctgaggctgagaggacacctatatgcgtatttcctctacacacatcaccccccttctataatcttaagccatgactagcctggtggcgtgttagtttctgcccagttctaccccctcatgtgcttcttctgaatactgaatgtgactgtttgaaagctggtagaattcatccctcttacggtagataacactgcaaatcttggaattttgttttttgctgtttccagatgtatctataaatatctatacattatatgtgtgtgtgtgtgtgtgtgtgtacatcgggtcctcccatgtgtggtgttcttctggaggttgtctctttggtcaaggtgaacttttaatgtttattattttcttctccgcacaaagtaaagagcctaattttgtgtattctggtggctgctgtcatgagatgataaaatgtaaaacaaaactctagtcaacgtagaaagagttaactgtgctgaaaaactaataaagaacctaagaag

SEQ ID NO: 159 - DNA, 3292 bp, Homo sapiens
gttttttataacctacccagtttatggtattttgttactgcagccagaaggaactaagatgctggtttctatcagcataaagcctctgagattcatcgaagttgttgggtgttctgatacctgttgttgttgttttcctgagtagcattctgttgtatggatgtaccataatttgtttattcattcacccattgaaggatattttagttgtcattttttgtcatcacaaataatgctactataactgtgtatagaattttgtaaatagcagtttttatttctctagaggaaatacccaggagagggattgcatggttggatggtcattgtatgttacacatttttaagaaactatgaaagtgttttctctagtagtgtctgtactattttgcattccactaggaaggtatgagggttttagttgctctgcatccctgccaccccttggtattgtcagtatttattttttttctgaggtggggtctcactctgtcacccaggctggagtgcagtggtgtaatactggcttgcttcaacttccacctcccaggctcaagtgatcctcccacctcagcctactgtgtaggtgggaccgcagccatgcaccaccatcgctgcctaatttttttttttgtatttttttggtagagactgggttttgccatgttgcccaggctgtgtcagtatgttttattttggccattctaataggtttgagtgatatctcatggtggttttaatttgcatttctctaatgattgaacaatgttgatcaactattcatgtgcttatttgccaccacgtcaaaaactgcaaatgttttttttgtagtagccatcctaatgggtacaaagagatatctcattgtggttttgatttgcatttccctgatttaatgaccttgaacactttttcacgtgattattggctgttagtatgtctttggagaattgtctattgcagtccttttcccatttgtaaaccggattatcttgttttttttgttactgagtggtaagagttcctttatgttctggatattaactccttattagatgtgtggtttgcagatatgttctacaattctgtatattgttccttcttactctgtcatttgcttcctatgttgtgcagagatattaaaatttgatgtaatgtatttgtctgattttgcctttgttgcctgtgcttttggtgtcatatcctagaagtcattgcaaaatccagtgttgggaagcttttcccctaagttttcctctaggagttttctagtttcaagcctatacatttaggtctttaatccaatgttagccctttcttaatgagttctttgtattttgggcagggaataagtctttctttaatgtaactgtcaggaatttactatatttaactttttccttcttccttcctcccctctttccctccctccttcccttcctcactcattccctccttccctctcttacggcttgaagataatggaatcactcaggttttgttcgtaactggtaaggttttagtttagtaggatgataattcattttcaacagcactttcttgtttgttcattggttagcaggaagaagatgagccttaggtctgaacgccgaggaattcatgtggatcctgtgcaagaaaggatgtggttactgtggcaaccctacctggcagggtttctgctccaagtgctggaggggagagtagcacaaagccaggcagaagcagattcaggagtactgggagctggtggaacgactccagcgggaggaagaagaggcctttgccagcagtcagagcagccaaggggcccaatccctcatattctccaagtttgaaggaaagaaaaccaacaagaagacccgcaaggttaccacagtgaagaaatcttcagtacgtcttccagcgtcggatcaaagaagggctggagtgcaatggcgcgatttcggctcactgcaacctccacctatcgggttcaagtgattctcctgcctcagcctcccaatagctgggattacagatattgaaatggattccaggcgtgtgcctcgagacaagctggcctgcatcaccaagtgcagcaagcacatcttcgatgccatcaagatcacctagaacgagctggcgtcagcagatgacttcctccccaccctcatctgcattgttttgaagggcaacccccatgccttcagtctaatatccagtatatcacgcgcttctgcaatccaagccgactgatgactggagaggatggctactatttcaccaatctggtgagtaagtgagttcttggcgttgtggagaaggactaggaaggtggtggttttggggatgtgataggtcactcaggcccatgacaggtgaatgcttctgtgtgagaaggcagcacggctgaggaagctcactttgcatcagggagcacaaggaccaggccgtacagacactccgcctcccagcacttgatcagagattgtgtttatcctacagaaacagatgacatgtgttgggcatcactccccacggtcctgggtagaagagtccttcacttggcagggctttttcaaccaatgaataaggcaaattatatataagttaataatgccatttcgaaccgagacagatggcagctaaatgaagtttaattaaagaatgagtgctggggccctttttattgggtactgcatctacttcgaccacaaaagacgaagtgaccccaacttcaagaacaggctttgagatggaagaaagaaacagaagcttgccaaggagagagctgggctttccaagttacctgaccttaaagatgctgaagctgttcagaagttcttccttgaagaaatacagcttggtgaagagttactagctcaaggtgaatatgagaagggcgtagaccatctgacaaatggaattgctgtgtgtggacagccacagcagttactgcaggccttacagcaaactcttccaccactagtgttccagatgcttttgactaagctcccaacaattagagaattctaagtgctcagagcttggctgaagatgatgtggaatgagaaacaaatgttaacataataaaatctcagttaaaaatatttaaaaaattcttggtagttgagcagctctgggggaataagggcaaatatccttgttatgaactacactgaaatctaccaaagttaatgtttactttgtgtaggtccatttgtctattttatttatttttcccagtgaaaagtgtattttgatagagaacttttcattttataaatacactatgagttactgaaaattc

SEQ ID NO: 160 - DNA, 3941 bp, Homo sapiens
gtccactgcagcagaatctctgatgccacttaattagctgtgccactgaactataggttcctcatttgtgaaaacaaaacaatggaccagtgagctctgaggtaccctcaagaccaaaatatgtggctctatgatgatggtttcctttttttccttctttttgctactgagaacaaagtattcaaactaaggaagattatgagtagtcctacttagttggatactgagttagtagaatttgatatccaaattcttctaatattagaattcttttgagttacattaataaactctattgagtactaatagaataaacctctttattagaaattttggataatttgcaaaggaaatagaaactatggttctgttcataacctctaaaaattaaactaggaaggaatgaacaaacagaaaaatctgtacctgtgaatatgaggaatatgagatttcactttttcttacaagcaagtcaaagtgattttttttttagctttgttaattctttcagcaaatgtttactgaatatctgccatgtgccaggagtagtgccaggcacaggactcccgctgtccttgaagagttttgtgggatgtgctgacctacaggtacatacagtgagctatggaatttttaaggcaaacaatttgatttaaaagaaatgtttagttcaataaaggtaacatacgcagaaattagcttaagacacaagcttggtctttagcctttgaagaataaactgggtcagtagtggtggaatatgaaatcaagggaaatactatgtgctttctatgtagatgaatatatgcaccagcatttggatgtttaatggtattcctcttacagccgttggacataccagatggtcgaagagctccacttcctgctcattaccggagcagtagtactcgcagcattgacactcagactccttctgtccaggagcgcagcagtagctgcagcagtcattcaccctgtgtctcccctttttgtcccccggaatcccaggatggtagcccttgctcaacagaagatttgctctatgatcgtgataaaggtctcgtcagcctatctcggcccctctcttttcatgtcctgacaaaaacaaggttaatttcatcccaaccggatcagctttctgtcctgtaaaacttctaggccccctcttacctgcttctgaccttatgctcaagaactcccctaactctggccagagctcagctttggcaactctgaccgttgagcagctctcatcccgggtttcctttacgtctctttctgatgacaccagcacagcgggctccatggaggcctctgtccagcagccatcccagcagcagcagctcctgcaggaactgcagggtgaggaccacatctctgctcagaactatgtgatcatctaaaaaagggggagctggcctccaccctatgttccatggattcggaacaagatttcagacatctgcatgagtgacaaactttctgaacaccaccaccaccaataatacttatcagcatcataaagtatctcttaaacactgatcttggcagggacggaactcctattcagcagtttttgtggaaagcagtaatgcttgcaaaacgtgtgtgtcattcagcattttaagtggagactatgcatttcatagtatatttgacagattagtactgtgtcctgtgttttgttccagattcttcagtataaataagctctatatcaaaaagttgcctgtctaaatagaaaatgtcttgctgtgttttgtcctatggaaaatactgtaattcaggattatgtttacaattgatccaggtgtttgtttctaacttctgtaatacatacaatgcaaaaaaaaaaaaaaaaatggccacaacagttgcacagtgcccaccctatggcctagcttcaggtacttcagttgaagtctaaactcaggtaacttggaatgtatatcatattgggatattaaatatttcacagctaaaaagttaaagagggaacatcactcttttgcctttccttattttatgcatttccctttcctcattacattccacattcttagaataagaagtgcattcaatcctaggagaatgataatcctggacatgggtgaacatgaggagaaccagcaaaatctgtggtgtttgacatcactttgtcatgtggttacaagtaaaacaactgttgcattcactgtttcaacatgtgtacatgtggcttttttaaaagttcaggtgttgctcagtaaaggactgtgacaatgttgcaaataaagtgttcagtactggactgtacataaacattccacattgtgtgtgatgaaatttaaagacaagaatgtctagagttaatttcaaaataagtgaagtgtttgacggaatggttgagatttttttgtttatgttagccatcagggtcataactgttaccattttatctaaagacatatttatatttagtttctcccttggaaattctttattttgcaggtgaaaaagtgacatactttttgttattgtcttcctcaagcagtttaggtgcatgatcttcatttacatagaatacttgggtctcagaattgatgcaacataagcaggtttttttggtgacttacaagagcaatagtttgaagctatctcatttaagcctctcataatgcataatcatgagtagttttgaaatttgcaacctgtgaggtagagcataaactcaagaaaatagccttgaacttgcagacttttgacacaagttctccacaaagtgtgaagagagccccaggcattcctgattggtcaatgggagagcctaactttcattgttttcttcagtacaaagagtatccaaaagctaagtttttgtattccactactttcagttcaataaaacctagagttgtttcatctgcgcctaaagtgtatggcacaattttcttaagaattaggggaaccaggtgcctacagttaaaggaacgtttcagttcctttcattcattcctgggtttttcttttattttctaagaaggttgaagaaggatgagtgatagagaagaaagcaacaccattgattttttttttttttaagaaatgatatatatatgtatatgtttgtgtgtgtgtgtgtgtgtgtgtgtgtgtattctgtgcattattttgtcatgatctcaattctcttctttccaccaaagtttgtcgtaatattttctcctgaaggtgcattctggctcctttaaattagtcagtgttatattgtaggagactgtcatggaaaaaaggactcagtttactttcgtcattttcacaggggaaccttttaaaacaatcttttcagcagcagatacctttaaccctaataatctcaggccttgatgaaaatactatattttgtagattatggttaaagggggaaaattactagttccgtaagataaatatgagctccatttgacttctgatgtctggtttagcattacataatatgttgatcttacactctgcttttgtccaaataaaatgcaatagtatcaatatcaatttcagaaaaatggactgaatatgcttttttggtgatgaaatctcatgtacgatatttatagtgatgtgcttttattttctcatgagatactaaatattaattgtgttgtacatttgttcttagcatatattaaagttttgaaccaaatgtgttaaagcttacgctttgccatgtaaatttcccagaagttgttgagctcaaatgtatcctacatccagctgtagaaatttgtcagaaattgtttaaattttgtatataattgtactgtttaattctagccattgcgctgaacagtatttgagttaccatataatatggctctacacaaggaaatgtgtggcttttgttttgtattttttcagtatagaagttcctgtgtcttatttaaataaagttattagtaaaactg

SEQ ID NO: 161 - DNA, 3196 bp, Homo sapiens
tgatgcggctgacaggccgaaccacagcaccaccagcaccaactcccacaccggcgcaaagcccggctcaaagccccactcccctccagtgctcaaggtcacaggcgaggggagacggaccgaccgagaggagccgccacagccccctcccctgctgccgcagtgcttcccgcctgcgcctacctggaggcggggccggctctgacgtcacccagagccaatgggagtgctcggccctgagggttgggggcctcagagtgcaccgcgctgtggcccttgtggggctgcccttgcgcagcgctccaagggacggggatgtttggcttcgatcaggctgaactgagtcctgagctctccgcagagggtgagagaaggcgttagggaggttcgcagcagggttcagcgaaggtcactggacttcgtaggacaggtagcccggtgacgcccaggcccagccccagcccttcccatcctgggagatgagccctagtagagcctgatcacgtcacctcagggggatggggacaggggcggccacaccagggctgggagaagacagtggggcctcctcagcagcagagagcagacacccctcacacccctcaggcggacccgcatgctgcgggtctgggtttggaaggcaccgccctgggctctcgacgtctgaccccaggaggataactgtcctttatgcagcaggaggcgcattgcagttcttttgcagccccaccctccagagctgagagaactcacaggtggctgtgaaagggctgcctggtcaggagctccctcgggtggaacctgatctcctgtgaacatgcagccttcagtgcaccgccctggcccctgagactggcacctggcagggcctgccctccctactctgggattgaccttgggcaagtcatttccctttcctagcctcaatttcctcctctatggcttgggcctatgtgggaagtaaatgagaaaactgtgggtcagtggtcagtggcggggaagtgttcctggatttgatgggccccgagaaaggataggcctgggatgggaggggctgtgtggtctgtcccctctcagccctggtgtggcctcctcatcccctgggtggtgcaatcagccgcatggctcaccctaaggctcattacctgggctctcctggaggacaacagggaaataaaaagggcctgcaagtcaaagagtgttctccagggtggagcctttggccaccaggttggtgccagcttgtcactccacactggagacacaggcctggacagtggtcctctgagaccagacccactaatgctggcccctgagcagctgtcttctgctgtctaaatctcctttcccatttggaggcaggaactcaggttctttctaaaccaaagtgtcctcacctgcaaaacagggactagggttcctgtctcttgggtaacatgcaggaagcctggcacacagtaggtgctcagtcacttgatgtttctttcatgtccttgaccccagccccacctccaactcactgggccactcacgtggttcccagggctcacaatgatgcagagaggatcggtttatttagctcagatggcccctcttgaagtttgcccatccgagtggctaagaatgcccagtttgcaaaggaacagcgagaagggcattctcccaaggctcagggatgccctagcataacagccccctttctggggctttctccaagtgctaaatgctccacaaacattggcttgtctagttcccgcaaagtccctgtgaggtggttctggatggagaggctgaggcacagcagagaagtaacatgacatgctcagtcacaagtaaggggtagaaccaggtcttcctgaggaagtaatgaccttgagcagcaaaaccaaaggtgtgaactcaagaggatcccagagcaggctctgcagaaggcctctagaggggatggggaggggggtctgacccgggcctgcctgaagggagcccttgaggatgctgggctcacacagaagggcgttcaaggtggaaggaaccacatgcgcaagagccttagagtgggagccaggggcagtgccggggtcggggctaggcttggctggcacggggtgttttctgaggattccaggcaggaccactgaggccgttcccctgcagcagcaggaagtgcctgagagttctgagtgtgagagggacttgggctggggaggcagagctgtccaggaggggctgctgcaagatggagaaaaacagcctccctggaccctcaagggcggaggacagtgacagcacaaaccagtggctggtttgcagagaggaccagaccttccccatgcagatcagttcacattgtctctgtactgaacagccctgagaaggggtgttccatccattcagtcctctctgggggcttcttggggtgatgagaacaggatgccccaagtaggggctctaccacaggcctaacaggtaccaggctgcgtcacctcattccccagaggagccaagagcggaggctgcccagagtgtccagcacggtctctccccttcaggaacatgacatcgagacaccctacggccttctgcatgtagtgatccggggctcccccaaggggaaccgcccagccatcctcacctaccatgatgtgggcctcaaccgtaagtgcagcccagcctcagtcagccctcctctgcctcccatcagccagagcggtgaggccccccaccctccccacagggccctgtcagccccactcacactcacctctgttgccttcgccctccgggcctcccatgtgtggtgttcttctggaggttgtctctttggtcaaggtgaacttttaatgtttattattttcttctccgcacaaagtaaagagcctaattttgtgtattctggtggctgctgtcatgagatgataaaatgtaaaacaaaactctagtcaacgtagaaagagttaactgtgctgaaaaactaataaagaacctaagaagaattccagtgtggtgatgccatgcccatcatgggaggcttttggagaaacagaatgtttgggcaggggctgctggtgctgcttgggttttgggttgagggtgctaggagaggatggtctccacccatctttctatttccagtacacgtcacattattttaccggtgagatgagaatgtcacaaacattaaaagccttatgtgctc

SEQ ID NO: 162 - DNA, 4747 bp, Homo sapiens
gtgtcttccagttcctcctcctcatcatcttcgtcttctccttctttatcatccatattgggaaccaaggagcactgtgatgaatttggccaagtatggtctttgctgacctctcctaactcatctgcacctgcgtcagaatggccagtaaaccaggtgaggaacctgtctggttcctcaggatgcctcttcctactggctttattctgcatttgacttgaagagtttcctttccagatttccatttgatttccgtggactttgaagatggatcatgactctcattcagatgaaattctttgagagagctttatttttgaagtaaggattttcgtcaaaataaaaacctattctgtaacctgatttaatatcttcaaattctgtcacttcagcactggtcaaacaatgcagtgcctcttcatcctcctcccaagcagtgcagacgcttgtggatggctgacaaatgttattacccagaaattggggattttgggaatcaattctcatctgccctgaagaacgtggttggccgaatttgtctatgttcgctctcccagtccgcttgccgctcacttgctaagcctgtttctgaagcctgttttgtgctgtgcttcctcgtgggcttggttgccgcttgttctgttcctctcttcctctggcctctgtcaggggctggcgccatgtcttcctttcaggcaggggcagagacgggtgtttgggggtcattccgggaggagagtctggacccaagggcctccttgctcatcaggaagaagctcataggactaagatcacatttttttttttttgacatggagtctcgctctgtcacccaggctggagtgcagtggcatgaccttggctcatggcaacctctgcccccatgccctccaactccatggttcaagctgttctcctgcctcagcctcctgagtagctgggactacaggcacccaccaccatgcctggctaatttttgtatttttagtagagacggagtttcgtcaagttggccaagctggtcctgaactcctgacctcaggtgatccacccgcctcggcctcccaaagtgctgggattacaggtgtgagccactgcgcccggccccaaattttttaatctattcccccagtctctacttttcatgtgggacaggtaatgcgtttcatctaatgtaattactgaaaggtagggtttatacttgtcgattttgtatttgctttctgcgtcttctgtcttttttgttactttctgcctcagttagtttttgttcttcatggagatggagtttcactatgttgcccaggctggagcgcagtgagtattcataggcatgatcatagtgcaccgtggccttgaactcccgggctcacaggatcctcccacctcagcctcctgagtagctgggactgcaggcgtaccacaacgcctgactcattgctttcttcttttgtgttagatattttctagtgtataccattttaattcccttgctgtttatttgactgtattttttatttgttttcttggttgtcctggggattacaatttagtatattaatttttgataatgtagtttgtattaatactatattacaatactatatgaaatatttatttgggcatagcttaatttcttttgcccttcttgtactgttattgtcatgcaaattacattacactgtgtgcccatctacgcagatttatagttgctgctttacgcaattgtctttcaaatcatataggagaaaaaacaaattataaattaacaaatacatttatactgtcttatgtagctgcttttatactttacctgtgtagctgcttttactggcgctcttgattgcattcccctcccctcccctcttgacagggtctcgctctgtcacccaggtgggagtacagtggcacaatcatagcactgcagccttgacctcctgggctaaagagatcctcctgcctcagccccccaggagtcctgggatgaaggttattcgactctctcaattcctcctgaaatgttggcctcgtaccagtcttacagcagcacatttcactcattagaggaacagcaagtctgcatggctgttgacataggcagacatcggtgggatcaagtgaaaaaggaggaccaagaggcaacaggtcccaggctcagcagggagctgctggatgagaaagagcctgaagtcttgcaggactcactggatagatgttattcaactccttcaggttgtcttgaactgactgactcatgccagccctacagaagtgccttttacgtattggagcaacagcgtgttggcttggctattgacatggatgaaattgaaaagtaccaagaagtggaagaagaccaagacccatcatgccccaggctcagcagggagctgctggatgagaaagagcctgaagtcttgcaggactcactggatagatgttattcaactccttcagattatcttgaactgcctgacttaggccagccctacagcagtgctgtttactcattggaggaacagtaccttggcttggctcttgacgtggacagaattaaaaaggaccaagaagaggaagaagaccaaggcccaccatgccccaggctcagcagggagctgctggaggtagtagagcctgaagtcttgcaggactcactagatagatgttattcaactccttccagttgtcttgaacagcctgactcctgccagccctatggaagttccttttatgcattggaggaaaaacatgttggcttttctcttgacgtgggagaaattgaaaagaaggggaaggggaagaaaagaaggggaagaagatcaaagaagaaaagaagaaggggaagaaaagaaggggaagatgacaacccaccatgccccaggctctacggcgtgctgctggaagtggaagagcctgaagtcttacaggactcactggatagatgttattcgactccgtcaatgtactttgaacaacctgactcattccagcactacagaagtgtgttttactcatttgaggaagagcatatcagcttcgccctttacgtggacaataggttttttactttgacggtgacaagtctccacctggtgttccagatgggagtcatattcccacaataagcagctcttactaagccgagagatgtcattcctgcaggcaggacctataggcacgagaagatttgaatgaaagtacagttccatttggaagcccagacataggatgggtcagtgagcatggctctattcctattctcaaaccatgccattggcaacctgtgctcaatctgaagacaatggacccatgttaggtgtgacacgttcacataactgtgcagaacatgccgggagtgatcagtcagacattttaatttgaaccacgtatctctgggtagctacaaaattcctcagggatttcattttgcaggcatgtctctgagcttctatacctgctcaaggtcattgtcatctttgtgtttagctcatccaaaggtgttaccctggtttcaatgaacctaacctcattctttgtgtcttcagtgttggcttgttttagctgatccatctgtaacacaggagggatccttggctgaggattgtatttcagaaccaccaactgctcttgacaattgttaacccgctaggctcctttggttagagaagccacagtccttcagcctccaattggtgtcagtacttaggaagaccacagctagatggacaaacagcattgggaggccttagccctgctcctctcaattccatcctgtagagaacaggagtcaggaaccgctggcaggagacagcatgtcacccaggactctgccggtgcagaatatgaacaatgccatgttcttgcagaaaacgcttagcctgagtttcataggaggtaatcaccagacaactgcggagtgtggggcactgagcgggacagctgacctgtctccttcacatggtccatgtcaccacaaatcacacaacggaagggaggggagatattttgggttcaaaaaaagtaaaaagataatgtagctgcatttctttagttattttgagccccaaatatttcctcatctttttgttgttgtcatggatggtggtgacatggacttgtttatagaggacaggtcggctgtctggctcggtgatctacattctgaagttgtctgaaaatgtcttcatgattaaattcagcctaaacattttgccgggaacactgcagagacaatgctgtgagtttccaacctcagcccatctgcgggcagagaaggtctagtttgtccatcaccattatgatatcaggactggttacttggttaaggaggggtctaggagatctgtcccttttagagacaccttacttataatgaagtacttgggaaagcggttttcaagagtataaatatcctgtattctaatgatcatcctctaaacattttatcatttattaatcctccctgcctgtgtctattattatattcatatctctacactgcaaattttgggtctcaatttttactgtgcctttgtttttactagtgtctgctgttgcaaaaagaagaaaacattctctgcctgagttttaatttttgtccaaagttaatcttaatctatacaattaaaaccttttgcctatcactctggacttctggattgttttttacattcagtgttataatatttgattatgctgattggttttggtgggtactgatgtgaattaataaaaacatttcatttcc

SEQ ID NO: 163 - DNA, 3581 bp, Homo sapiens
actttgagagtaattgagactctgtctcaaaaaaaaaaaagaaaatgggcaagagacatgaagagacctccagcacattgacatccgatggccaggaagcacaggctgagacacccagcatcaccgaatgctggcgcggaggaggccggagcgcggaggaggtccgaacgcggaggaggctggagcgtgtgtctcacgcattgcccggggggcgagccgcgtgcctcatgccttgccggggggacttgccgggggacgagccgcgtgcctcacgccttgccggggggacgagccgcgtgtctcgcgcattgccctgggggcgagctgtgtctcatgcattgccagggttgagccgtgtctctcaggcattcccagggagtgacaagtggcagggccgctctggagaacaggtggtcggtttcctacgaagctaaacacacagctactgagctaccgtgggacatttatcccagagaaacggaaactctcattcacacacaagtccgtaacaggcgttcagagacgtgtctgttgtagccaaacagtggcatcaacccaggtgtcctacaggtgaacggttcaataggtggtctgcacaccacgagatggcccttggcagggagagggagtggcggatgccccgagccctagtgaagagtgccagtccagaggctgcagctgttggtccccttctagaacataactaagatgacagtctgggcatggtggctcacacctaccatcccagccctgtgggaggtgaggccagcgggtctcttaagcctaggagtttgagaccagccatagtgagaccatctccaaaaaaaaaaaaagatgacagaactgtagtgaagcattcaggtcgtgattgctgtggtgctgagaggaatccgtggtgcggtcagtggcgcggccccgcactcacacacacgagtccagctggccacgtctggtgcatctgtaggtggcgcggctgcccgggctcagtgcttctctgaggttatgagagacgccctccctgggggatgctgggcgcaggtgctcagggtatttacagcttcctgctattctgattattccaaaataaaaagttaaaggatcgggccaggcacggtggctcacgcctgtaatcccagcactttgggaggccgaggtgggcagatcacgaggtcaggagatggagaccatcctggctaacatggtgaaatcccacctctactaaaaaatacaaaaaaaattaaccgtgcgtggtggtgggcgcctgtagtcccagctacttgggaggctgaggcaggagaatggtgagaatccgggaggtggagcttgaagtgagctgagatcacaccactgcactccagcctgggtgacagagcgagattccgtctcaaaaaaaaaagttacgggatcagccctgatttgatgtgctgcgagaggcagtggccacgtgacagatggtggtggccctctaggacgctacagacgtggggacactgccccaacccccgtggacaagccccgggtctgccttggctcctgggggtgacgtggggacactgccccaacccccgtggacaagccctgggtctgccttggctcctgggggtggggtgctgcctccacagctgccctgtcctggtgtctgccctccatccagagtgttcccgtcgccccagcacctggcctgtgctccagcccctggagaccttcacacgtgtgggtggagccggcacctctggacggcctcgagtgatcggtgttctattttgcaagcgcatgttttccaatatacgtggtgctctgcgttatagaaacagtagttgcccctcatggacaaccagatgccgagtttccgatctccgtctccacaggctcaccagctggattccctcctgggggcttcattcccaaaacggccaccacgcccaaaggcagcagctcctggcagacaagtcggccgccagcccagggcgcctcatggccccctcaggccaagccgccccccaaagcctgcacacagccaaggcctaactatgcctcgaacttcagtgtgatcggggcgcgggaggagcggggggtccgcgcacccagctttggtgagtcccccactctctgttgctgtggagtttgcagagacctccctgaattggctaaaggtagaacctatgttgttttcttcatctcagagcccagtcctgggacaggcacggccaagccactcagagaacgacgcggtttccgatgtgtgttcactggtctctctctgggtcaggcctctgggtccctcttgttccagtgacaccttcttgacctgtttttaacaaatggcctttgcaaccctgtcttgtcttccctcttctttactctggaggcatcaggatggtagccctgttcccgggggcagcaggtggaattgggcctgtgtgtctctgcagaaagtttctgttcttaactgggctttgtggctcacgcctataatcccagcactttgggaggctgaggcggacagatcgctggagcccaggagttcaagaccagcttgggcaacagtgatacctcctctctacaaaaaatgtaaaaattagccaggcatggtggcgcatgcctgtggtcccagctacttgggaggctgaggcaagaggatcgcttgaggccgggaggcaaaggctgcagagagctgagatcacgccattgcactctggcctgggtgacagagtggagaccctgtctcaaacaaaaaaaagtttctgttcttttctagctcaaaagccaaaagtctctgagaacgactttgaagatctgttgtccaatcaaggcttctcctccaggtctgacaagaaagggccaaagaccattgcagagatgaggaagcaggacctggctaaagacacggacccactcaagctgaagctcctggactggattgagggcaaggagcggaacatccgggccctgctgtccacgctgcacacagtgctgtgggacggggagagccgctggacgcccgtgggcatggccgacctggtggctccggagcaagtgaagaagcactatcgccgcgcggtgctggccgtgcaccccgacaaggctgcggggcagccgtacgagcagcacgccaagatgatcttcatggagctgaatgacgcctggtcggagtttgagaaccagggctcccggcccctcttctgaggccgcagtggtggtggctgcgcacacagctccacaggttgggagccgtcgtgggacctgggtccccaccgtgaggaccccgtgggcgacagcaggtgtggccagggtggggctccgagccccgggtcaccgcccgcccagcgttccaggcacatgaagagaaagcattccaaagcctctgattgttgtttcctttttctcctcccgaaggaacagctgattcatgctcctcccgcaattgtcacgtctgtgatttatttggtgtttcgggcgtggcctctggagccccggcacgtggtgggccacgctgctggcgctcatgggccctggtgtttgcaccgcactttgtaatcagtcccgtggttgtctgtacagaattaaactattttccgatg

SEQ ID NO: 164 - DNA, 3600 bp, Homo sapiens
ataccatatgaggatgctatgaggaaaagctttagacttcttgggagaaaactaagtaaatctgaggtgcatgtattatttcatacagttttaatcaggagcaagtgagcttaagaaactttgttgaataataaaaatatgaaaaaatgtgttcatttagaacaaaagttgttagcatctactgtgggaggctgcagaagcaaacaaaacttgtcccctcatcaaggagtttaccatctgctaaggtggatggaatgtacctggggatgtcaaactcagatgtccccaggggccagcaggtgatgtcaagaggtgagcaagagagaatactaacagttccaaatgttaataagagcccagtttgccagatcttcctttttattctccaagaaagactggaaatctggatttttgcaagaaatatcctaccacctgtaaatgttggcaatgatttgatttaaaaaaaaaaaaatactttgcatgcccaacaaaatttgagcatgggctatatacacccctaaggccatcagccagcacttgggaccttctctgcatacattatttacacagagtgaagtgtgctgcaggctgtgacatctgaattcaaaggagggcaacatggctttaggtgtgcttaaactttaaaatcagatgggccctggttaaaactctgtcttctatttagagccacactgaccttgagcaaatctcaacttccaaagccttggcttctgcatttatataatgggaataataatgtctcctgagtatattgattatgaagcttaaatgaggtaatgttgatgaaatgtttaacaatgcttgctgcacagtgatcacaataaatgctgttgctgttaatactaataacttcctttccacttaaaggataccttaggaaagccagctgctaaggatgtccatcttgtggatcactgcaaatacaagtaagatttgcaggactcctcactttcttggtttccatactgcttttgaaatagcttcactttgggtgagaactttaatataaaggcccagctggagtaaatgaaagttgcattaattcatttcactggcttttcctcagggcctaaatgcactgacctgagttctgtggcgactgtagagaagaatggaacatggttcctgcttccaaacagctgcatgctagctagtaatcacagtaatggaattacctctccataagccccacccacccaatcattgaagttagaataaatatttctcagttaataaatattagaattattatcctggtgtgctggcatgctcctgtagtcttagctactcgggaggctgaggtaggaggatcctttgagcccaagagttcaagaccagcctgggctacatagtgagaccctgtctctaagagaaataaaataaaattctgggactaagaattagatgaacaggtaaaaccaggtctagaggagggcagtggtggtgggggtggctcagagttaggagtgctaatgacacgcagagtaggagctatatggtgaaagcaactctggttggcgacaggtgcgtgcataagaaatgctgagaagaagacagctttttttgttttttttttttcccctgtgggcaatctctgaaaattgattaggttttcctcattctcctctctacaccaggggtccccaaccccctgccatggtactggtctattaggaaccaggctgcatggcaggaggtgagcagtggggaagcgagcattaccgcctgagctctgccttctgtcagatcagccttggcattagattctcataggagcacaaactgtattgtgaactgtgtatgcaagggatcaaggttgcgtgctccttatgagaatctaactaatgcctgatgatctgaggtggaacagtttcatccaaaaccatctcccccacactacccatccatggaaaaattgtctcccatgaaactggtccctggtgccaaagaggttggggaccgctgctctatactttaagagaagagggtgatgtccaggaagcagtggagaccttcgaccagatggggtacactagaggaaaaacaaggctttgggaggccatgactagttagagacattaggcctagaaaagcttgtgaaatttttttcactcgttatattttatgtttaccattgaacatttattttctcagatatgttccaaatctacaagctgtcatttccttctgagccctgtatacactctacccggcacccagctcctgaccctatctagtgctgtctggagaaaatatcccctatttttcctcaccctgccattcccagaacaacctgtagtcctagccctggtaaagtggctgatagaaaccacttaggaacatattaatgtgtccttgaaaactcaaagtggaaagagaatggagaggaatcataaaaggaaagaaggggaggggagaataagcataaaaggtcatatttgtggcagcaggcatatagtatcaaatgtattttgttcttttttccccaggtatctgtttaattttcgaggcgtagctgcaagtttccggtttaaacacctcttcctgtgtggctcacttgttttccatgttggtgatgagtggctagaattcttctatccacagctgaagccatgggttcactatatcccagtcaaaacagatctctccaatgtccaagagctgttacaatttgtaaaagcaaatgatgatgtagctcaagagattgctgaaaggggaagccagtttattaggaaccatttgcagatggatgacatcacctgttactgggagaacctcttgagtgaatactctaaattcctgtcttataatgtaacgagaaggaaaggttatgatcaaattattcccaaaatgttgaaaactgaactatagtagtcatcataggaccatagtcctctttgtggcaacagatctcagatatcctacggtgagaagcttaccataagcttggcacctataccttgaatatctgctatcaagccaaatacctggttttccttatcatgctgcacccagagcaactcttgagaaagatttaaaatgtgtctaatacactgatatgaagcagttcaactttttggatgaataaggaccagaaatcgtgagatgtggattttgaacccaactctacctttcattttcttaagaccaatcacagcttgtgcctcagatcatccacctgtgtgagtccatcactgtgaaattgactgtgtccatgtgatgatgccctttgtcccattatttggagcagaaaattcgtcatttggaagtagtacaactcattgctggaattgtgaaattattcaaggcgtgatctctgtcactttattttaatgtaggaaaccctatggggtttatgaaaaatacttggggatcattctctgaatggtctaaggaagcggtagccatgccatgcaatgatgtaggagttctcttttgtaaaaccataaactctgttactcaggaggtttctataatgccacatagaaagaggccaattgcatgagtaattattgcaattggatttcaggttccctttttgtgccttcatgccctacttcttaatgcctctctaaagcc

SEQ ID NO: 165 - DNA, 3266 bp, Homo sapiens
agtagagatggggtttctccatgttggtccggctggtctcgaactcctgacctcaggtgatctacacacctcagcctcccaaagtgctgggattacaggggtgagcaaccctgactggccaggacagtgcttattaattcctgagatgcatccaggagcacatgacctggctgtgactgttctaacagagttccccaaatgggtggctcaggacaacagaaagtcattctctccagttccagaagcttgatgtctgaaacccgcagggccatgctccctctgaaggctctaggggtgaatccttccttgcctcttctggcttctggtggttgctggcattctttggcttgtgtccacatcattccattctcttccttcattctcatgtggccttctcccctgtgtgtctctgtctcttcttctcttcccatgaggatgccattattactcgatttaaggttcacgctattccaatatgacctctttgtaatgagatctgcagtgaccctattttcttttcttttttttgtgatggagtcttgctctgttgcccaggctggagttcagtgacacaatctcggctcgcttcaactctgcctcctgggttcaagtgattcttcagcctcggcctctgaagtggctgggattacgggtgcacgccaccatgcctagctaatttttgtgtttttggtagagacagggtttgccatgctggccaggctggtctcgaactcctgacctcaagtgatcctcctgcctcagcctcccaaagtgctaagattacaagcatgagccaccatgccctgcccctattttctaataaggtcacattctgggattcctggtgaatgtgaatttttggaagacagtattcagtctagcaaaaggcagaacatcctcattttcttccctacctcagaaataaagaagttaacttcaacccctctgagagagagaggcttcctgagcttccaacaatcaattatccaaatattagtcacagaagggcactaagggttgtgcacagcacgtggccagcccattctctgagtctgtcaagtttaaggtgaacgctaatcctgaatgagtcttaaaatgtacttggcatatcctgttcattgtaaaatgttctcacattgtgatggctggggcttccctctcaggtgtaatctgcgaagtcagacgtgacacagcctgggtgaggtgggccaagccgggaactgggttaggagggaagctggggaatgatctccaaggtctcagatcccaaactggctttagccagattcacccagagggatctcataaaaaatgcacattccggggcccaccccagacctaatgaatcagaattacctgggaaggagcctggggagctctgttttcagaagcagcccagccgaatcctacggtcagacagggctaggaatcgaaactcagtctagcgcggtagttcccaaactcgtctgtgcttcaaaaaatacagatgctgatgtccagacatggtggctcatgcctgtaatcccagcagtttgggacggtgaggcgggagtatcacttgagcccaggagtttgagactagcctggagaacataaggagatactgtctctataaaaaatttaaaaattggccgggcgtggtggtgcccgcctgtgatcccagctaccgtggaggttgaagtgggagggtttcttgagcccaggagttggagcctgtggtgagctatgattgtgccactgcactccagcctgggtaacagagcgaggccctgtctcaaaaacaaaacaaaacaaaaaacggagtctatgtcccattccagaggttgaggtttaattgttcttgggtgtggcctgggttttggaagatttaaaaaaaaaatctcaggtgaccctaaagtgtagatgagtttggaaaccacacatttaaggcacacttgaatgggggagcagtgaggtggcgcgggctagccggccagaacccaggggtgggccagtaggaaccagcattgcagaggccattaaggctgggaagcatagtgtctggggcccataacaatgcttcggcatgaatgctttagacctaagacaattggctcctaaatgtgaaaactgcaaggctgaaatgaatgcatgtttaatgccttacaacattgtcaagtgatcagctgcaactcctttctgagggcatgatgcctgagatatgcctgtaatgcgggttgattttaattaatttaatatggtgtggagtggggccttcaaaagtaaagacgtcagttctaagttggttgcagggttctgggcaaaggtcttaaaaccccatggtgagcagatggccaatcctgaacaccccaattttaaaacagggcttttttttccaagagactttttgaaaatagctcctattttgagaggaggaaccctggcaggagagagccagagttaagcccagctgagagggggttggtaggcaggggcctgcctgatcctcactgaagcttgatactcagggtgagcttcctaaaccagtgcagatttgccggcccactgagcctcccagatgagaacctgcatttcaacaaggtccttgatgcagcaaagtttgagatatactgggctagaacactcaggggacacaaaggttctctgaaaactaaggaaaataggcagggtgtggtggctcatgcctgtaatccttgtattttgggatgccaaggcgggcggatcacctgaggtcaggagtttgagaccagcctggatcaacatggtgaaacaccatctctacaaaaaatacaaaaattagctgggtgcggccgggcacagtggctcatgcctgtaatcctagcactttgggagtccgacgcgggcagatcacgaggtcaggagatcgagaccatcctggctaacacgatgaaaccctgtctttactaaaaacacaaaaaaattagccgggcgtggtggcaggttcctgtagtcccaactactcgggaggctgagggaggagaatggcatgaacctcgaggaggagcttgcagtgagccgagattgcaccactgcactccagcctgggcaacagagccagactctgtctcaaaaaaaaaaaaaaaaaaaaaaaaaaaaaattatctgggtgaagtggcaggtacctgtggtcccggctacttggggggctgaaacaggagaatagattgaacctgggaggcggaagttgcagtggcccgagatcgcaccactgcactccagtctggtggcagagtgagactccatct

SEQ ID NO: 166 - DNA, 4001 bp, Homo sapiens
atatattgcaaatctccatgggagggtataccgtatgatacatatcaattctcaagtttatttgtctaaagactcttgtgtatttcacaaaacatctataatttctcatggacattagcattctgcaaaaacattactaagtcaaacccaatagcttgagatacaaggccttctatgagataaactgcttaattctcccatctcacttaccttctatcaaacacgcatcccattttcccatgctacaaaactggttacagttttctaacatatcatcaattttttcatagttatatgttgctaataatgcttccccttctgcctgaaattcgacttcctttcatctgccttataaaattatattcattcttcaaggcactgctcaaatgtttctccctctttggacctttctgtgtcctatcccaaaaaaattatgaactcttttctgtggttctcatccctctcctctctttctctctctgtctctctctttctctctctctttctcttgatctgcctatatacacacatacacaatacatatactttaatatatatgcagttttatatataatctatataaaatatggtatttaatattatattaagatgagtgagatagaaataaacacataaagagacaaacataaatgaaaacatgttatatatggatgttcatcataatatttttcacttatgtgtttacttatgctttcttcactgaacaatggattccttaaaggcagtgactatgtctaatttctctcttaacctctctattcacataatctaatgaaatgcatagcattcaatgtctgctaagggcatgttcaaatgaattcactcatctcgcttatagctgaagtccaggccatcccaccactcaagatgaacttgtgtgcttttgcacaaatgcagttctgcctgctgatctccctctggtgggagcttcactttgccaaggacactggtccagaaccactatgtaagattcaaaatagatatcatggtaatggatatagtctggctcttgctctactctccaagccatgattctggcatggactgtgctatcctggaagaagaagcttctttttgtgttctcacaaagcatgcatgaatgatgacagccatgcaccaggccatccagaaactattggttccctgttactcctgttagtgtatttggtactgccagtgtactctgctactctcacctaaataaatctccccaggatctgtgaataagatgctgataggattttccaacaggaacatttccccaagatgttcatgctagagcaggtctcagatatgggttattattcaatgacacatttgggcaagggagaataacaaaacctaatcacaaatgttcatcactgatctctatggtaattgtcaaatttaaagatggaggcaagggtgaactgcctttaatgctgaaagctgcctgtgccacactaaagttcttgtagtgccagaatggatacatcaccacagaacctgatatatcacagaattgtagtccaatgcaatcatacaatatggagacagagacctgattaccaggtgacatagcatttgggctggttggcctaagaaggtagagattgtcctcaataaggtggagaaatgtaaatacactagtatataagatgataggcttccactacagaaagtgaacttatttagagaatagctctccttgctgagttgtgaaaccagctatcttcaaagttcctgggtcaacaaccgtgaatgcctaggcactgagtaagatgatggaggattagccactggaccaggggagtgataactaaaaccactttcaggattgatcccatccactggcctacagtaaaaagcttcaggcttgatataagtgaagtgtagaaaaatatctttaaaacaaataatggtttcccataatatgccattattttaaaacttttaatattttgacatcttttatttattatcattattgtttacatggaataaaaaattcttatttttatgaaaatagattcaaactgtatataattatgtgaattatgtgtcttgacttttaatttaaaatatataatgaacacctttctaggccagtgtgtgtatgcatatgagagtggggcaggtgtatacattagcacatatatatatacaattatacataaaatttgttttttatataattaatccaatttattttcacttactttttaaacagatttattgaggctcaattaacaaacagtagactgaacctattgaatgcatacatttgtgagttttgacatgtatgcacactcacacttaatgtgaaaccataaccacactacacactacaataaatgtgttcattatcctgtttccttatgcccttcttaatcttcctctcctattccagcccctgccattctcaaacaaccactggtctgcttgatgtcattataagtacatttttatttcctagaattgttgtaagtagaatagtataatacttatgcttttctgtttcattttgttcactcatcataaacgctgtttttttgtttgtttgtttttgttttgttttgttttgttttttgagattgagagttttgctctcatcacccaggctggagtgcagtggcatgatctcagctcattgcaacctccacctcccgggttcaagaaactctcctgcctcagcctcctgagctgggattacaggcatgggacactacgccactacgcctggctaatttttgtatttttagtagagatggtgttccaccatgttggccaggctggtctcaaactcctgacctcaagtgatctgccagcctcagccttccaaagtgctgggattacaggcgtgagccactgcacccggatatgaacgcttttaaatttatccatgttgttgcatgtatcaataggttgttcctttttattgttgactgttattctattgcatgcttgtaacacagtttttttacacattcatacatttaaattatttggctatcacaaattaagatattataaacatccatttgtaagttttatatggacatatgctctatttacttaggagtactgtggctggaccatatggcaaaaatatttaaagttcttgaaaaactataaaattgcttttcaaaatgactgtatcattttaaattcccacaagcagtgtatgagtgcttcagttgccgacaaagcctcaccaacaattggtataaccagcctttttaaatttagcctttctaataagtaggagtaatatcttattgtggttttaatttgcatttcgctgaagactaatggtgtttagagtatattcatgtactttatttgctattcatatgtcttgtttgtttgtttggtaaagagtctgttcgtatcttctgcttttgttattgtcttcattgttttcttattattgggttttgagacttatttatgtgtaatgaatacaagtcctttatcagatacaagattttcaaatattttctcatagtctgtggttgtcatttcattatctttacagtagctttagaaaatcagtacttgttgattctgatgaagtccaatttatcaactctttttctcttctattgcacttttggagttgtatctaaaaaattctgtctaacccaatgtcacaaacataatctcctaagttttcttctaaaagatttaacgtttcaggttttacatttaggtccataatcaatttgtgttagtgtttgtctatttgtgtctatggtgttagggatggtttgaatttcattatttgcataaggattccagtagttcttatgtaactgctgaagactgtcctttctccactgaatggcctttgcatctttgtcaaatataaattgactgtatatgtgtggatctaattccagatcctagttagttccattgatctgtataacttaataacttagcgtaaatactacactgtcttgattaatgtagcttgataataaatcttgaactcagat

SEQ ID NO: 167 - DNA, 3163 bp, Homo sapiens
atcgagtgcattgcgtgtacagctcagcgggtctctgcagagtgggtctcatgcgtattcatgtaacccccatgggtcctgagacagggcatctctcgctggggtccaggctgtcccaggaatggctggccctcacaggtttcataaatgcacagctgggatgttaccatgttccccaaacctcagctctgtaaacatgagaagaagctttataacaacagaggcgtttagcaatcagctgctattttcctctatcatgtggcaccttctacaacaggctaagagaagaccaggaaaagggagtgcccgcccaggtattgaggagtctggagaggactctgctcctgaaggcccagggtcccaggaaggcatggtgggactcctgcccctgctggccaagctgcttttttttttggagacagagtctcgctctgtcgcccaggctggagtgcagtggcacgatctcggctcactgcaagctccgcctcctgggttcacaccattctcccgcctcagccccccgagtagctgggactacaggtgcccaccaccacgcctggcaaattttttgtatttttagtagagacggggtttcaccatgttagtcaggatggtctcgatctcctgacctttgatccgcccgcctcagcctcccaaagtgctgggattacaggcatgagccaccgcgcctggctggccaaagcttcttgcagccctgcctgggtcagctgtcacctcctgcagagactgacccaaccccttctcctgccagggtctgactgcgtaccatgatatctccctggacaagtgctatgtcatcgaactcaacaccaccattgtgctgccccctcgcaacttctgggagctcctcatgaacgtgaaggtgcgcagggggttggggggatgtctgcagcatcctgtccctcccttgccccctgtctcatggaggctaggtctgaggtacaggaagttcctgtgtcaggggttgggggagcaagagacattgctggcacctgggccctgtacccagattggtctcgcctctgctatccccctgcttccacatctccagagtcaatgccccgagaccggcttccttagtgttcaaggttgtaccctgggtacggactcgtgcgcatgccattgctcctggcagcacaggtgcaggcaccgggcacaggcaggaagtgcctgaggacatcagaagggccagcccaggggcctctggaggagggaggtgggctggcatttcgggcgaggggtttgacgaaagcctgaggggccgactcactgtggcggccaccttgttttgcagagggggacctacctgccgcagacgtacatcatccaggaggagatggtggtcacggagcatgtcagtgacaaggaggccctggggtccttcatctaccacctgtgcaacgggaaagacacctaccggctccggcgccgggcaacgcggaggcgtgagtggctggcttcacccacagtagcccctgtcccgtgccccagaccacagttatcttcacgcctagcccagctgtcagagagctcagatagcagcagcaataacagctagcattagcagagcacgtccgtgtgccgggcaatgctgtgtgctctttatgacctcttaagagtgtaagtcattctcatcctcattattatttttgctgcccattttaaagatgaggaaacaggtgcagagaggttaacaccctggaggtcacacagcagggaggtggcagacatgggcaggctgactccagctttcgagctctccccatttctcactgtgctctttgggtgaatctgggtgaatggtgtcacttcctggccctcctgtggctcaggctgaggctggtggtctttgtgactcagccaggatgcagggctcactggggtttttctttttcctcccagggatcaacaagcgtggggccaagaactgcaatgccatccgccacttcgagaacaccttcgtggtggagacgctcatctgcggggtggtgtgaggccctcctcccccagaaccccctgccgtgttcctcttttcttctttccggctgctctctggccctcctccttccccctgcttagcttgtactttggacgcgtttctatagaggtgacatgtctctccattcctctccaaccctgcccacctccctgtaccagagctgtgatctctcggtggggggcccatctctgctgacctgggtgtggcggagggagaggcgatgctgcaaagtgttctctgtgtcccactgtcttgaagctgggcctgccaaagcctgggcccacagctgcaccggcagcccaaggggaaggaccggttgggggagccgggcatgtgaggccctgggcaaggggatggggctgtgggggcggggcggcatgggcttcagaagtatctgcacaattagaaaagtcctcagaagctttttcttggagggtacactttcttcactgtccctattcctagacctggggcttgagctgaggatgggacgatgtgcccagggagggacccaccagagcacaagagaaggtggctacctgggggtgtcccagggactctgtcagtgccttcagcccaccagcaggagcttggagtttggggagtggggatgagtccgtcaagcacaactgttctctgagtggaaccaaagaagcaaggagctaggacccccagtcctgccccccaggagcacaagcagggtcccctcagtcaaggcagtgggatgggcggctgaggaacggggcaggcaaggtcactgctcagtcacgtccacgggggacgagccgtgggttctgctgagtaggtggagctcattgctttctccaagcttggaactgttttgaaagataacacagagggaaagggagagccacctggtacttgtccaccctgcctcctctgttctgaaattccatccccctcagcttaggggaatgcacctttttccctttccttctcacttttgcatgtttttactgatcattcgatatgctaaccgttctcagccctgagccttggagaggagggctgtaacgccttcagtcagtctctggggatgaaactcttaaatgctttgtatattttctcaattagatctcttttcagaagtgtctatagaacaataaaaatcttttacttctg

SEQ ID NO: 168 - DNA, 3459 bp, Homo sapiens
ttttgagcccatgctctgggccaggcactgttaggcactggggatactgtatggggtgggtatattgaccaatattgacatcatctctgcctagtgaaacttatgctgtagtgagagagactgacacgaaacatgaatgcaggtaaaaagacaatagaattacccgttatcataagtattaaaacggcaacagaatggagcattcatgtaataaaagagtgagtgaccctgttcggtaggaacatcagggaaatgtctccaaggagaggtattgggccacatttaagctacggcctgaagactgagaagggccaagctgtgaccagtggggagaagagaagagaggagaccatggtgagcagaggtggcagtgtgttcagaagcccgggggaggaaggagagggctctgcacatcctgagaacagcaaggtggccagcgtgcctggggtggtgagagcaagggaagggatgtggctggcaaagcctgcagaggccagaacaggcagccttgctctcaggagcctgtgccctgtgttatttttgagatggggaagatcttaactagtaccatcctttataagcatattcaagataggtgcgagaataaggtacaaggagcaccatgccagaaaagcaatgtgtgtgcctctgtgtgtgcatgtgtagatgtgtacacttgtatgtgcacatgagtggatgtgcacacacatctctgtatgtgtgcaaacgtgcatttttgtgtacatttctgcacgtgtgtgtatgtatgtacatgcatgtatgtggcatgcgcatacgtgcatgtattgcagcaggaagagaaggagccacgaacagtatgacagtggggagattgctgacttcagagcccagcagaatgagggtcagtgttgctgggcacgctgcttacagcatgtgcagagcatagctctgttttgcctcacatccctcctggactgatccctttctgtttgtatggtacattcagtgagtgacagcatcacaggaggcagaccccagccttatgaacatatcttcataacaccatacagtctcacgagaaaggggaggtcatttgttcactgtagtccacccctgaattgttccctcactggctctgtgtcactttcagagatttttttaaattctgggaaatgctttggggacttcggcattttggagtgtgttttcaaggattgtattagcaccacagagacccttagcctctttcttaaaggttctgtttttagacatcctcctcttttatccgtgctttcaattctgctgcttccttccttctgagattccttcttccttgctggtcttggaacaagaaacatttagctgtattttcctcgttctcgcctaggtagggtgtggtccccctgtgtcctcatttgttcaacattttgagacaaagattggtggaattgccacttaaaaaaataaaaccagggaaagcagctcagagaatttaatttgcctctaacccaactcttctacttattaaaaaaatatacaattattcattccgtagcactccagattgcttcactgaaagaaagaaagaaagggatccactccagggagaaagaggctcttgagctttttgttccttgatgatcctgtctttacgtaatttggtggagcctactggggaatcatcattttgggagactatggatgtgcctcattgcagaagaataagtagagagcagtgtctggaacaaatgcttgtcttaaaaaaagtttatgaaatgccagcagatgtcagtgtgcccttgccatttgattttttttttaaagcaacattaattattttcggtagtaaaaacaacacaagtatattctgctacagttataaatgaaaagatcatgaggcaacgttttttaggtttggagaaggaccagcagaatttatgtcataaggtaaaatcctctaaattatctgtgtaatataatttgtcttttcccagaaaagtggtttcaaaatgcaaaacctagtgtaagttttttttttttttttccctctctcccagccattgttcaggtgccaataatagcttaggatccagcttagcttctgagaagctactggctctgctaattgataacagctccttatttcaaagctggagtttgcaaaggaaggtagtgtagggttgggtatggccttgtcgtttgtcatctgagttgtgatgagaaactcttgcagtttacgttgttaccgtgagcacagcaaattgcgtgctaatagttagttcctccgcagacattgtttggatcaaaaatgagggcctctatacaggaaaaagattcactcaaataattaaaaactattcattttaagcaagggataatttgccagcatgtagtgcaagagaggtagggtcgtttctaggcagggaatgatgtatgttacagggcatatttgatgctttgctttatttatttaatagttttgattaaatggtacaatattcaaaaatgcaggagtatgcagagaaaaataaatctctcttgcacttgccttgcagtttattagagacaactatttttatagtttctcatgcaccctttcatatatattttatgcgaatacaaacatttacacagatatttataccaacaaaagatagcatatgaaatgcatagttccactgtttgctctttttaaaaaaattaagaataccttttaaggattattccctctcattgtgtgtgtgtgtgtgcacacgcacgtgtattttttctgctccacctttgttaatggatatatagtattccattgcacatgcttacattatttaattggcctccttttgatggatatttatgttgtttccatttttgaagcgctacatggaatatcttcaaccgccaccacttcccacacatgtctgtaggatacattcttagaggtgaaattgttaggtcaaaggaaacatgcctttcattttgacagacactgccaaacctgatgctctggctgagctgcacccttacatgttggtggatgaatggggtttagaaccaaatgaagccatgtggtgattctggtctgacttggctaccgtgatgactgtcatgaattatgtccctattggaagtgtcttagtctagttctgctgctataacaaaatgcttatccagggtgatttagaaagaataggaatcgttggccaggcgcggtggctcatgcccgtaatcccagccctttgggaggccgaggtgggcggatcacctgaggtcgggagttcaagacctgcctggccaacttagtgaaaccatgtctctactaaaaatacaaaaattagctgggggtggtggtgggtgcctgtaatcccagctacttgggaggctgaggcagaagaattgcttgaatggagtcggaggttgcagtgagctgagattgcgccactgcactccagcctgggtgacagagcgagactgttgcgc

SEQ ID NO: 169 - DNA, 3043 bp, Homo sapiens
tatttctcccatttggattcatcagttgtcaacacattttgccacgcatttcattgtatttttattttcttgactgcaccatttgagagttacttggagacatcctgacacttcatccctgaatacttcagcctgtatctctgtaggcaaccgcaatgccattatcacacttaaaaagctcaaccttgatataacgctattatctcaccgatacatactcaaatgtcccgttgtctcatttatatcctgtgtagctgtggttttatttgtgatccaagagccaatcaatgttcacatcattttttctttcatgacatttttaaagaatccaggcagttgtcttgtaaaaggtcccacaattggaatttgtcctgtttattattcatggttatattcaggcaagtcgttttggtaaccatattacataggccttgttatctatttcccattatatcatatcaggaggcccattgggtaggtttgtgctattttgtgacgctaagtttgatcactgggctatctgtgacagtttcctgtccttccttctatccaaccccgccacccaaaaaaaaaaaaaccaaaccaaatctgacatcacaagaagcaacaagctacatctaagatgtgggacaaatagcccaataaacccagggtcacccaggcctccctgctgcctttcaaaaaacctgggcacattcctgccacaggaactttgcacttgctattcctgacacgcgtaatgttccccatgaagagcatggtttcctccctcatcctcaagtctttgttcaaatatcagcttttcagcaagaccttcattaactagtctagcccccagtatggtttggctgtgtccccacccaaatctcatcttgaattgtagctcccataatttccatgtgttatgggagggaccatgtgggagataattgaatcatgggggcagtttcccccatactattcttgtggtagtgaataagtctcacgagatctgatggttttataaggggtttccttttttgttggctctcattctctctcttgcctgccgccatgtaagacatgcctttcaccttccaccatgatcatgaggcctccccagccacgaggaactgtgagtccattaaacctatttttctttataaattacccagtcttggatatatctttatcaacagtgtgaaaacagactaatacacccccttaccctgctctactttttccccatagcaattatcacctcctgacatgtcatataattgacttattatatttgctgtctgtctccctctggtggtgtgtaaactctgtcagcatagggatttttcactgttctattcactgctgtattcacttacagaattgctcttcgctgggctggctccttccccactttcaggtgtcagttcaaatgtaagtcttccctgactaccccttataacacagtaactttctatctgttcaccccactttaatgtatctatcttatttactgtttactgcctaatgtctttgtttgtttgcttgttttgagacagggtctctgtcacccaggctggagtgcatgatgcagtcatggctaactgcagcctccacttcccaggctcaagtgatcctcccacttcagcttcccgagtggctgggtctacaggcatgagataccaagcgtgggctgtctagggtcttatctcactgctcccacccctcatgaagacgaaagtctttgcctgctttgttcactgctatatccccaatactggcacatagtaggtcctcaataagtatttgccgaatgaatgaatgacttcacagggaggtataacagttaaaaacatgccattcaactcacttctctgggcatcttgatataacagttcagttcctacctggcagagctgatgagggttaagagagctaagtgaaagaagtgacaagacctagagtcataggatatattaatatttttaaagagagttttgattctcccaccaacagtctagaactgggggcattcacagtttgtctccagagagggcagaaggctggcgggaggagtgagcaatccaccagcactgccatttgggtaataattgagcattttctttttcttttttctttcttttttttttttgagatgaagtctcgctttgtcgcccaggctggagtgcagtggcgtgatctcggctcactgcagcctccgcctcctgggttcaagaaattctcctgcctcggccacccgagtagctgggattgcaggtgtgtgccactatgcccagctaattttttttgtatttttagtagagacggggtttcgccatgttggccgggctggtcttgaacccctgacctcaggtgacccgcctgctttggactgccaaaatgctgggattacaggtgtgagacaccatgcccagggggaactgtaaattaaaacaacgagttgaggcacccgaccttcaactgtcatgttatgagaacactcaagtagccctatgaagaggtataacaggattgaggccttctgcaaacagctagcaccaacttgccagccatgtaagtgaaccatcttgaaagtgattgtgcagccccagtaaagccttcagatgactgcagtcccagcaacatcttttttttttgtttgagatggagtctcgctctgtcgcccaggctggagtgcggtggcgcgatctccgctcactgcaggctccgcctcccgggttcacgccattctcctgcctcagcctcctgagtggctgggactgcaggcgcccgccgccatgcccggctaatttttttgtatttttagtagagacggggtttcatcctgttggccaggatggtctcgatctcctgacctcgtgatccgcctgcctcggcctcccaaagtgctgggattacaggcgtgagccaccatgcccggcctccagcaacatcttaaccataaccttgtcagagaccccaagccaaaaccactcagtcaagccacttgcaaattttttatccatagaaactatgtgagataataaatgtctgtttttaagcc

SEQ ID NO: 170 - DNA, 3392 bp, Homo sapiens
gtcctgggtgatgcctgcgaggcggcaggctcagagggagcgcgaccggcagccctcccacagccgcaccgccgcacctaccacggtcggccatggcagtctccaggcagtccagcgtctgctcatcatcacacaggtcatagggcatgttcccgtcggtgttgaccgccaggagattggcgccactgcagggaagacggacggggtgctgggcacaaggcccttccccgcttgccaggctcctcacttggagaagtccccgccagggcccctcagcccagggctgcccctcaggaggcaccctgtccacctgctgctgggagaggcagccttggggcccatcggctgtcctagatcctgtcattaagccagacaggcctcctgcagtctctatccatccagggatccaggttcctggcacctccaggggcagcggtgcccccataaacatgcattggatgggcctgcctgctggggagcagggagcacagggtggcgggggtgcaggaccaggcagccacgctgaggggctgctgagctgtggggagcatggccccagggaagaagggcggtgaaggggagcccagaacacagaagggggtgtctgtgtgcagtggaggagcaggcctacctgtggacaccccacatccccgcctgccccgcagcgcctgtgtgtgacgcgaccgccatccacaccccacccggcctcacaggggcactcgagaatgaccgcagccctgacctctctcccactacagatgcctggagcaaaggggaagggaggaggctcatggaccctccctgctcagagttccccccgctctacgtccctctgtgttaaaggtaaaggccctacctgtgctcaggtaccctctcctcccaagccacctggcctcctcactctgcttccctccttagcagttctgccctcctcactgaccaagacatttctctgtgcacactctgggggggggcccgaggcctgccctctcggcaggaggacgaatgctggggaggcagggaccgcgctgccctgggcacatgcccattcccctggagccccaggccctgctctccatgccaggacacaggcagggtcagcaaaggtgaaggcgggaacacaggaggccgagagccacagatactgcccaagaggagcctcctgagcggccatctgagaggaagcctctccctgccaaggacgcccaacaggccctacctggcgatgagcagctccaccaggtgcaggtggccgcaggtggccgcagcatgcagaggcgtccagcactcactgtcacaggcattgatgttggccccagcctccaggagctgctgcaccatctctcggaaatcatcaatgcagcactgcaaaccgtgccacgtgagcggccagagcacgggggccagcccccaccctgcccacacccagtgcaggctgacctggtgcagggccgtcaggccgtcctcgttggccaagtcagggctgaccccactcccaaggaactggcggactgcaaaaaggtggcgaggtgaggacagggtcctgcccctggtcaggtcctgtcaactgtgcttcggcccaggacccagggaaggacaaggaagacagtggtgccgatggcaggaggcacaccagagcccaggggtgggggcagaagcaccaggcatctgtctggcccaggccggtcacactcccagaagccctctgcctccacccacctgcaggcccttcatggtggtgctccagccctccgacccccagaacaggccgtgctcctgtgtgagagcagcactccaacaatcccacacctccctccagcccaggaagagctccctgcctggaggctaccacagctccttcggctcttccctgacaacctgccagccctgtgttcatgagctctcctgggtcctctgggacctgacctgaggctccccaccaccagagcacatccctgctctcactcccctccccatcaaagatcccaactcgggcccagctctcgcccaggtcaccagggttctccctgacggtgcctggggtgcagcaggagggctcccaccttcccacagctccctgtggaccatggcaccctccgcctcttccctctgcctccaggcctcccgggagggctcctgtccacatggaaagatgcaggccagacactgccggctcctctttactctctgctccggagggaggcaggaaggagtctcaagggccaccacagtgcctcttccccccagactccagagcaccagaagtggaacccacacagctggggctgcaagcgtggggcacaggtcatttcgggcagcggcctccagaaggacaacactgggagggaagaggacctgcttcaggagcccttggctggctgcctccttccggggacgctccccaggacccttcttgccctgggcctccttctcagcctgggcccacatcttcacctgctgggcgcgccgcttctgggcatgcttcagccgctcctgtgtgctcatcctgcccaccatgggcatctctgccagcagctccaggtgctcggccatggcggcggctgcttgcccacagggctgctcggggcaccagagtggggagcttgggggccaggctgggcctgaggggtggggcagctagctggactggcaccctcgggggcatccccttcccagagcttcgtgcccttggctgggtcaggaggccccacacaataaccaggcccaggcagccctggggggcatgggccggggcagggagggcagtgtgggagggcaccccaaacctgctccccaggccagcctctagctgtcgacaagcagcgcctcgcctccctctcggggtcagggtgcacaacctatgggaggcagccccgagacctggccggcctcagtgcagggtctgaaactaattacccagataacaaggttccagcttccgggcaccctgctgagggggaagggagggcagggccaaccagcagtgagagcccctgtgagcccctgagagtcctcttttcaccttctaggctcaggagcctgggtggggcctgggagcagccatgacccagcccccaacccctcccagctgtgtgccgaggtcagtgcatcagtactaacgaggaggtgcagccgctgaggctgggggagggcaggtagtcagagtcctggagtcctggccccagggcccaggggtgaggctctctaggcagccagggcaccaagggcacaggcgggccggccgcagtgtcttcaggagcacctcctcttccagcagctgctcacacctgagaagtggggaacaaggaagcatatcaaggccggcttgaggcagggtggcccgggggagcccctgccctgggcctcagcctgggtgacagagcgagactccg

SEQ ID NO: 171 - DNA, 3210 bp, Homo sapiens
taggacctccatcagcagctaggatctccctcagcacctaggacctccatcagcagctaggacctccatcggcacctaggacctccatcggcagctaggacctccatcggcagctaggacctccatcggcagcgaagacctccatcagcaaaggctgggtctagacccccatgggctccagattccacccaactcccagccatctgcccagaccgacccacacccacctcctgcagatgccctgggcattactgaacccctatttcctgaagccagccagcgagtgggagcaccggccagcatggtcctccctggccccagggatctcccagccctgggacatgggacccctgggcagactgccttcccccagcttgtgcaggctggcaccaggcacagaagcccagcacagggcctcttatcagcccctccatctcttccccagaacaggcccagcctgcttgcccagcctgtcaccatgcctggcagggatggcatcacccagccggctgtgtgcaactgctgaaaccccgtgggccctgcttccagtgccgcaccctcctcgcccaggatggctgcaggatttaccaggtcctccgcacagtgaaaatgtgagctccttgccccaagatgatgaagaatttcaagacggcaatggtagattggtaaattaacctcaggtgccatgtgacagcacaggttgggtgctgtgagccatgcatgaagctcctggtgggtacagctctgcctcatgggtcacccctctctaccgtgaccacgaggactgggctgggtatgcagtgccctgctgtgacccctgacacacagacccctagccatcccctccaccccctccctgacctcctctcccagggatgcaactgggggagcacacccatccccagaagaaccccaaatctctggctggctgtctcttacccaacccccatccccagctccagctgaggggcaagcgtgctgctgggctgctcctgaggagaaacccatggtgccaccctcaggcccccggtggctcctcaacctgggccccatctctgccccccatcttggctcctcaggcatatttaaactttgcccctcccaccctcgtgcctggcggatcccctggcactgaggcccagccagtggctccagccaacgcacttggctcccgcagcaagttaaatctaacccagcccagctgtctctcctccggctcccacctgcccctcccgttccctgcagggatgtgcccacaccctgccaaccctacatgggccctcaggaagggtgcagaggtcccccagggtcccccactttcccacactaggaaagccctttgcctagcagcctctggggtgggtgccctgcttctggaggtaccccggcacccagggtggggccagcagagtgcagcaggttttcaacaggtatttcaagaaggagcaggaacccacttcccatcagtcagggtgcagccaggaagagggaaactccagggccaacgctgaagtggccgctgcagcaccgcgctggggcacggagttggagtacagcccttgtgccacaggcgtgccagggaatgtgtgccaggcgctctgtcttgcatctggggctgtcggttcttctgaggcagggcactcatgggtcgcttctggagatgtccacatttctgggtctgggactgtctaggcctggctttggggccatctgtaatctgctccccgtagccccatgttttgtttaggctggaagtgcactcagctaaaatgccgttatcctaccaaaagtagcataggatggagttctggccagtgagatgtgagcagaagtgctgggtgtgtcttcagggacagatcctcaaagggagctgactcatctagggggcagcacttttgctcttcctcttttccttcctcctttctggtcaggtatgcttgtgatggctggagcatcagcagctgttttgggccatgaggtgacactgaggctggaagccagcactaggagagtgatacagtaagcagagaagccagggctgtcacgtcgcagaggagactggagagctgcggcggggaggggtcagctgcggccacgtgagggccaggcccctctctgactgcccaggctgcatccacacagaagattccatggctttccataaaggagagtgggagaatgtcctctctaaaggcctggggagtgcctggggagaggagacagcctcagctggggctcaccagccagcagctgccagccaggccagcaatgccaaggcacccggcgttcctggaagccaagccctgtttgatctaatggggcagctgtgggtgcagacccagataaagagataaacccagacccagaaacctgggggaggaggtgggagcaacaacctctcttccgcctccttcaccgtgagaggaaaggaagcggggtgacatagttgtggctgggactgctggaccccgcatgccagccctgggaggtatgtgggtcatgaaatccacccactggtgacctcccccatggtgagggagggagagagcttctcccctccttggctaagaggacagagggaggatcctacaaattctgtcaggaagcagaaatttggtctgagagcagtgaaggtgggagcagacaccccccaaatcacctgcaggatgagcatttctcaggctctagagagcatgtgtgggacacagccgccagcccacctggtgcgggggtccagcagccacagccatgggaactcctgggcctgttgttcgtgtgcggatcctggtccgggagcctggatgcggctctgccttgccgacaagctcctgggccaggcctggtccaccagacctccctatgcttggagtgcctgcttgttgtgcctggagctgtgctgggcccttcctcattgcagggctgggggagtcacttaacctgtctggggctcagtcttctcatctgtaaagtgggaatgatggcacctggtacccacttgattggctgttgcaaacatgaaaccagatgggcctgtaaatcacagggcactcggccgccatcaccatcatcatcatcaacatcatcatcctcatcatcatggccccagctcatccatctttgttgccttctccacccccatcttccatccttggagaactgtgcctcttgaattggcctcgtgacctagtaaagatcataacaaagacgcct

SEQ ID NO: 172 - DNA, 4129 bp, Homo sapiens
actatttgaccttcctgctgtgacaagaaaggtcaccgccagcatttcactcttcagtcagagctgccctctctgctggcagcattgattcctgctgcagcttctcacaggagacaagagttccttttctctccctggcctgtgtctgcaagggctcggggggaaaatttaagaaccaagaaccttgtggaaagttggagagggcaggatgggggcctggtctccaggtgtgatgtctcgcctgggcactgtgacctgctcctggaagctgggaagccattgagtcatcggccatgggatttgcattgttggaggggcctgggctgagttggcctcatccctctgatcctggcgagtgggtcacaagtctgactcagcacccagatgtcctccctggctcagagtcagcgccctgcaggccttgggaggagatgggctccgggctccagacccactggctgggatctggaccataacgagatttcgggcacaatagaggacacgagcggcgccttctcagggctcgacagcctcagcaagctgactctgtttggaaacaagatcaagtctgtggctaagagagcattctcggggctggaaggcctggagcacctgaaccttggagggaatgcgatcagatctgtccagtttgatgcctttgtgaagatgaagaatcttaaagagcttcatatcagcagcgacagcttcctgtgtgactgccagctgaagtggctgcccccgtggctaattggcaggatgctgcaggcctttgtgacagccgcctgtgcccacccagaatcactgaagggtcagagcattttctctgtgccaccagagagtttcgtgtgcgatgacttcctgaagccacagatcatcacccagccagaaaccaccatggctatggtgggcaaggacatccggtttacatgctcagcagccagcagcagcagctcccccatgacctttgcctggaagaaagacaatgaagtcctgaccaatgcagacatggagaactttgtccacgtccacgcgcaggacggggaagtgatggagtacaccaccatcctgcacctccgtcaggtcactttcgggcacgagggccgctaccaatgtgtcatcaccaaccactttggctccacctattcacataaggccaggctcaccgtgaatgtgttgccatcattcaccaaaacgccccacgacataaccatccggaccaccaccgtggcccgcctcgaatgtgctgccacaggtcacccaaaccctcagattgcctggcagaaggatggaggcacggatttccccgctgcccgtgagcgacgcatgcatgtcatgccggatgacgacgtgtttttcatcactgatgtgaaaatagatgacgcaggggtttacagctgtactgctcagaactcagccggttctatttcagctaatgccaccctgactgtcctagagaccccatccttggtggtccccttggaagaccgtgtggtatctgtgggagaaacagtggccctccaatgcaaagccacggggaaccctccgccccgcatcacctggttcaagggggaccgcccgctgagcctcactgagcggcaccacctgacccctgacaaccagctcctggtggttcagaacgtggtggcagaggatgcgggccgatatacctgtgagatgtccaacaccctgggcacggagcgagctcacagccagctgagcgtcctgcccgcagcaggctgcaggaaggatgggaccacggtaggcatcttcaccattgctgtcgtgagcagcatcgtcctgacgtcactggtctgggtgtgcatcatctaccagaccaggaagaagagtgaagagtacagtgtcaccaacacagatgaaaccgtcgtgccaccagatgttccaagctacctctcttctcaggggaccctttctgaccgacaagaaaccgtggtcaggaccgagggtggccctcaggccaatgggcacattgagagcaatggtgtgtgtccaagagatgcaagccactttccagagcccgacactcacagcgttgcctgcaggcagccaaagctctgtgctgggtctgcgtatcacaaagagccgtggaaagcgatggagaaagctgaagggacacctgggccacataagatggaacacggtggccgggtcgtatgcagtgactgcaacaccgaagtggactgttactccaggggacaagccttccacccccagcctgtgtccagagacagcgcacagccaagtgcgccaaatggcccggagccgggtgggagtgaccaagagcattctccacatcaccagtgcagcaggactgccgctgggtcctgccccgagtgccaagggtcgctctaccccagtaaccacgatagaatgctgacggctgtgaagaaaaagccaatggcatctctagatgggaaaggggattcttcctggactttagcaaggttgtatcacccggactccacagagctacagcctgcatcttcattaacttcaggcagtccagagcgcgcggaagcccagtacttgcttgtttccaatggccacctccccaaagcatgtgacgccagtcccgagtccacgccactgacaggacagctccccgggaaacagagggtgccactgctgttggcaccaaaaagctaggttttgtctacctcagttcttgtcataccaatctctacgggaaagagaggtaggagaggctgcgaggaagcttgggttcaagcgtcactcatctgtacatagttgtaactcccatgtggagtatcagtcgctcacaggacttggatctgaagcacagtaaacgcaagaggggatttgtgtacaaaaggcaaaaaaagtatttgatatcattgtacataagagttttcagagatttcatatatatcttttacagaggctattttaatctttagtgcatggttaacagaaaaaaattatacaattttgacaatattatttttcgtatcaggttgctgtttaattttggagggggtggggaaatagttctggtgccttaacgcatggctggaatttatagaggctacaaccacatttgttcacaggagtttttggtgcggggtgggaaggatggaaggccttggatttatattgcacttcatagacccctaggctgctgtgcggtgggactccacatgcgccggaaggagcttcaggtgagcactgctcatgtgtggatgcccctgcaacaggcttccctgtctgtagagccaggggtgcaagtgccatccacacttgcagtgaatggcttttccttttaggtttaagtcctgtctgtctgtaaggcgtagaatctgtccgtctgtaaggcgtagaatgagggttgttaatccatcacaagcaaaaggtcagaacagttaaacactgcctttcctcctcctcttattttatgataaaagcaaatgtggccttctcagtatcattcgattgctatttgagacttttaaattaaggtaaaggctgctggtgttggtacctgtggatttttctatactgatgttttcgttttgccaatataatgagtattacattggccttgggggacagaaagggggaagttctgacttttcagggctaccttatttctactaaggacccagagcaggcctgtccatgccattccttcgcacagatgaaactgagctgggactggaaaggacagcccttgacctgggttctgggtataatttgcacttttgagactggtagctaaccatcttatgagtgccaatgtgtcatttagtaaaacttaaatagaaacaaggtccttcaaatgttcctttggccaaaagctgaagggagttactgagaaaatagttaacaattactgtcaggtgtcatcactgttcaaaaggtaagcacatttagaattttgttcttgacagttaactgactaatcttacttccacaaaatatgtgaatttgctgcttctgagaggcaatgtgaaagagggagtattacttttatgtacaaagttatttatttatagaaattttggtacagtgtacattgaaaaccatgtaaaatattgaagtgtctaacaaatggcattgaagtgtctttaataaaggttcatttataaatgtc

SEQ ID NO: 173 - DNA, 3470 bp, Homo sapiens
agtaaacatgctcttctctagcacttgggacttcttggtgtcttaggagagacctgaggagctgtgtgtgtgtgtgcacgcacatgtgcgtgtgtgtgcatgcgtgtgtgtgtgttgtgtcctgtggccccaggccagcagggtgcctggcacagagcagccactccttccagagcgtaccctgttctctccagaatgcctgccgcctggccacttgcatcctctgaggactcagcccagtgtcactgcctttgggcagccttccctggcggccatctccctgcccacagggggcgtgtgcatcgcccagtcggtgaagataccacgggagcccaaggcaggcgagttcgacaagatcatccgccgcctcctggagacttcgaacgccagggcagtcatcatctttgccaacgaggatgacatcaggcgtgtgctggaggcagcacgaagggccaaccagacaggccatttcttctggatgggctctgacagctggggctccaagattgcacctgtgctgcacctggaggaggtggctgagggtgctgtcacgatcctccccaagaggatgtccgtacgaggcttcgaccgctacttctccagccgcacgctggacaacaaccggcgcaacatctggtttgccgagttctgggaggacaacttccactgcaagctgagccgccacgccctcaagaagggcagccacgtcaagaagtgcaccaaccgtgagcgaattgggcaggattcagcttatgagcaggaggggaaggtgcagtttgtgatcgatgccgtgtacgccatgggccacgcgctgcacgccatgcaccgtgacctgtgtcccggccgcgtggggctctgcccgcgcatggaccctgtagatggcacccagctgcttaagtacatccgaaacgtcaacttctcaggcatcgcagggaaccctgtgaccttcaatgagaatggagatgcgcctgggcgctatgacatctaccaataccagctgcgcaacgattctgccgagtacaaggtcattggctcctggactgaccacctgcaccttagaatagagcggatgcactggccggggagcgggcagcagctgccccgctccatctgcagcctgccctgccaaccgggtgagcggaagaagacagtgaagggcatgccttgctgctggcactgcgagccttgcacagggtaccagtaccaggtggaccgctacacctgtaagacgtgtccctatgacatgcggcccacagagaaccgcacgggctgccggcccatccccatcatcaagcttgagtggggctcgccctgggccgtgctgcccctcttcctggccgtggtgggcatcgctgccacgttgttcgtggtgatcacctttgtgcgctacaacgacacgcccatcgtcagggcctcgggccgtgaactgagctacgtgctgctggcaggcatcttcctgtgctatgccaccaccttcctcatgatcgctgagcccgaccttggcacctgctcgctgcgccgaatcttcctgggactagggatgagcatcagctatgcagccctgctcaccaagaccaaccgcatctaccgcatcttcgagcagggcaagcgctcggtcagtgccccacgcttcatcagccccgtctcacagctggccatcaccttcagcctcatctcgctgcagctgctgggcatctgtgtgtggtttgtggtggacccctcccactcggtgttggacttccaggaccagcggacactcgacccccgcttcgccaggggtgtgctcaagtgtgacatctcggacctgtcgctcatctgcctgctgggctacagcatgctgctcatggtcacgtgcaccgtgtatgccatcaagacacgcggcgtgcccgagaccttcaatgaggccaagcccattggcttcaccatgtacaccacttgcatcgtctggctggccttcatccccatcttctttggcacctcgcagtcggccgacaagctgtacatccagacgacgacgctgacggtctcggtgagtctgagcgcctcggtgtccctgggaatgctctacatgcccaaagtctacatcatcctcttccacccggagcagaacgtgcccaagcgcaagcgcagcctcaaagccgtcgttacggcggccaccatgtccaacaagttcacgcagaagggcaacttccggcccaacggagaggccaagtctgagctctgcgagaaccttgaggccccagggagctcataggccactgactccacccaactctggccaggagaaaattcttcctttaactgagctggaccctgaccttcatgcctccctactggtcccatagtggacccctctgctcaccccatcctcaagcagtttgcttcgtccacatgtgatagactgatagttggacaccaaacttctgcctgtgttagtgggcttccagttacactgctgtgacaaagaggtcccagaactgagcagctcaaatcagacggatgtttgttgctctctgccgtaataggacatggtgggtgggtgggagtgaggacccaggatccttccatcttgttgctccattggctccctgaagattgaggctagatgacctcaatggttgttctgctcatggaagggaaaagagaagacgcatgggggaaagacccattttaattgaatgacatgggagctgcacacagtccttccatgtgtatttcatgaggaagaacacagtcagcgctggccaccaaacagacttacgtcacttacaccaaccatgcaatctagcgagtccatggagctgagcagcaggaggaggagccgtgaccctgtggaaggtgcgtcgggccagggccacacccaagggcccagctgtcttgcctgcccgtgggcacccacggacgtggcttggtgctgaggatagcagagcccccagccatcactgctggcagcctgggcaaaccgggtgagcaacaggaggacgaggggccggggcggtgccaggctaccacaagaacctgcgtcttggaccattgcccctcccggccccaaaccacaggggctcaggtcgtgtgggccccagtgctagatctctccctcccttcgtctctgtctgtgctgttggcgacccctctgtctgtctccagccctgtctttctgttctcttatctctttgtttcaccttttccctctctggcgtccccggctgcttgtactcttggccttttctgtgtctcctttctggctcttgcctccgcctctctctctcatcctctttgtcctcagctcctcctgctttcttgggtcccaccagtgtcacttttctgccgttttctttcctgttctcctctgcttcattctcgtccagccattgctcccctctccctgccacccttccccagttcaccaaaccttacatgttgcaaaagagaaaaaaggaaaaaaatcaaaacacaaaaaagccaaaacg

SEQ ID NO: 174 - DNA, 3609 bp, Homo sapiens
agaacttggcacctacagccttcaccctgaccccagcaggccctgaccccctgtgaactggtggtacctcacccctactcctcttgcacccccacactagtggccctacccctaactgtggccaggccaggggaggagcaactccaccatgagggcttggccctcatgcctcctcctgcccagctctgcatggcatgtccctctggccttagctgccccagctgcatgtggcctcaggccagccccacccagccctcttgcttcctgtggccctgtagagtggctaccaggacccctgctggtgagggcgggtgcgggtggcctgtctccgagctgggctttcctccagcatggtcaccccctcacccgctcagttacctctgatatgctgtgcaaacatatttctcgatgaaatgctgggaagaaaaataattagagtgttgcctccattatccaatttcggattaatcaaactctctttgtcctcggccaaaatctattcatttcccttaaacactgggccagtgccaggcattgatttcctctatgataacaccacgcacgcaagcacagccatgcccagccttgccccaccccgtggctgggacacagaggcactggtggggctgcccttgtccccccaacactgcccacctcctccaaggagtctcctggccacactgacacccccatctctgtcgtggctcctggagtgcttggcctcagtctccagtgtgtttgtcttgccacgctggctgttctggggctctccctcctcccaggatggtgtggaatggatagaggaggtgtggagggtgtggccactgcggtccccagggaccacagggaatgggctgcagccccaggctctgggtgggccagggtttgggggattatccccatcactggcacaggaagaaggccaagggggagggccagggcttctaagggggctgaggggccatgcaatgtatgtggggtgggagcacacttgcaggggtagcaacagaagcccagccccaaagggcttacaagatgaggggacatcctggctcccgggcctgagggcttagtagtggggcagcatcaggatcggccaagtccaggtgggcgggggctgtgcgtctacccgtgtccacccagggaaggccacgggcctttccagaagacctcccagaagtccccaactatcccctccgtgagccacgttgaccgattcctcactcagtcactacgagggcctgggattgatttattggcacctgcttggtgctaggtccttgtgggcacatgggatacatcaatgaacaaacagaccaacagtccctgccctatggcacagtgggaaagaggtgggcgataaacactctaagtaaattatacagtgtgctagaaagggaccatgcttggggcaaggcagcacacgtggtgtggctgtgtgcgaatatgggggtcattttccatcgtaaataggatgggcagggaggcctcctaaggaagggacatctgagccataggatggggagagggcgcggaagcgaagtccacttggctttctggacaaagagttttccaggaggaaggaacagccagtgcacaggccctgagttaagagtgagggatggtgctagagaggcagctagaggcagcatggcaggagtgggggagggggagcatgggcgtgggagtcagagaggccaggcattgcacagccctggtgccctggctggactttgactcggggtctgcccatgtcaagcaagcgtcgggagcaaacatgagaaggtttcaagcacaagtgagacatactctgcctcatttttacaaggatgcccctggctgctggtggagcacagggcacagggggctggagacagcaagaccagagaagtcatactgctgcaaaacagatgagaggctggggctggctagcgggagtgagtggtagaattctggacagtcagggcaattaagggttcccctgaggctggctgggtccagccacaacctgtggtgccagcctcagttctcaaggaaagggacgcagggaaggcgtgctgggcatgtaatggacaccactcatgcccctaggtccccaaggtaggggatgggattgtgggatgccacacatggaggcagagggcaggaggttgcagggcctcaaagacccagaaggtgaaatcagattccccactcaagtgggggtttgatggagtcagcagtttccttccctggggaaactggggagccaggagcctggggctacggctctctccaaggcagcaacctctttgatttggctcttaatgaaggccccacttcttctctgctgtcatggccaccctctcctccataggtggaacctttgcatattgatttatttatttactcctggcccagagaaatatctggcttgatttcctcctgagtcagtgttcctcaggcgacactatcaccctttgtctggtcagccgtggtggctgtgggccaaaagacaggacaggtggctgagggtgtccagagccaggacagcacagggttacagggaagggcctccctgttcatctcatctccccggtcatctcatctccccttcctttagcagaaggacactgggaggcccagccggggcatagcctggggttgtctgtaggatggggacactgtgttcactaaccgtagtccttcctcccatctgctcggactatggcttcaggataggcagagagctttgaggaggcaaagaaaggaggacctgtttctaaggtgagacccgttgcggatctgcaggtgcaaggcccatcaggcaggttgtggggagagtgtagagaagccaacccagtggcctgggccctggttactgtggagtggctgcaaagagcccacaaacacggagtcacatgtccccaagccatgaatcagtgatgtctttcatgtgcgtatgctctcatttttcaaacactgcaaaagctattgtgataaatgaaatgcagagtcatttacaagccttgaggaaatcttggcgcgcaaaaaccctttttacctctgtcatcagcactcactggattaatgggtgctctcccttctcactgtaaagcatgctggcttgtgtcagtacagggtgggccctccagggcagcgggcactctctagaacccccttgcccttccacatgtatccctttgagtccgttgtgattgtcccaaacctatttgtgccagttgtactcattgtaatcacagcctggaatactgtgtaaactgatgggctgtgactgtatagagggcttctgtggaaatgaaagtggttgctttggaaaagcctcagtaaaagccgtggttaggtttggtgtgggcaagccaaccacgagtttggggacaaggagtataacagcctaaagttcagattccgggtcctttgccacctcacttgtgttggaaaaagtaaacgagatgtcacgcaaggtgtgctgtggtttaagcaagaagtggcataaccccagaaccggaaactctgatttaggaagagtttgtgtctctgaaaattgacagatatatgaatgtatgtttatctgagttaagtgaaaataaagtacacgtgtgtcatttc

SEQ ID NO: 175 - DNA, 3363 bp, Homo sapiens
tgatgcagcgtagcccagcggtggtgccctccaggcttctgagccccaaacccccgcttctcctcctctgtacttcctctccctgcccccctggatgggagctgtgcatggacacataagaaggtcggctgccctgaagccaccatgctggagaggctgtggaaaggccccacagagctagacagagctgccaaagagccccgccccaggggagtcttgccagacaggtgggtgaggagctgcagcctgtgcaagtcccagctgaggcctcggacactgggacagagaccagcctttcccactgtcctctctgaattccctgcagagaccataagagagaagagcagctactggctgaagccactacattttagggcgacttgtgatgctgcagcaactgatagcaactgcacccccacagcccctgatggatgctctgcctggcaccaggctctgtgcccctgagaagatgggctccctggcttgcagagctgctatttgtggggccggaataataaacagctgaatggaccagagactatcagttggttaaatgggactgggatgcattttccatcagggaatcaatcggggctcctctgaagaggtgatatgagctctgaggcctggagaaggaagagatggctctgggagctgggaccaggcagcccagcccaggattgctgtgatggcctctgctgggtatggcccccagaggcctgctggcctgtgagctctatgggggtgcacagggcactggttctgcccaagaggaaacgccagcagtggagttggtgctggtgtaagagcaacagcaaaggtattttttttaactttttatattgaaataatgataatctgtaacaattacagattcacaggaagttggaaagataatagagagagaagcctgtgtacccttcacccagtttcccccaatggtcacattctacataaccaccacacatcagaaaagggacattggcactggtgtgacaagggtgtcaagccctgtgtcactttatcacacatggagatccatgtttctgtccctgtaaccaggatacagagctgttccctctccatggagaccccctggtactccctttcacagtgacaatcacccccctaccccagctcctggcagccgccaatctcctctccatctctatgattttgttatttcaaaaatgttatataaatggaattatgccatttacattttctgtaattactgacataacttcagtctgctgttttattttttgctttgtttgttcctgtgtttgttggtggtggtgtttctctattttcttttttttgccttgctgagtgttacttggacatatttaagcatctattttggtttttgtacagtgtttttagtgtatatctttgtatagatttctagtggctgccatactgcattatacatatgtacttatcacagtctactgccatcaacattttaccatttcgagtgacatgtagaaagcttccctctctttgcgtcccttttccccttccatttataatataattatcctaaatattttttctacatacattgagacattcgacaatgctataatttttgcttcaaccaccaaatgtaacttagaaaccttcagagaaggggtccattgtacttacccatagttttgctctttccattgtactttcttcctgatgtctcaagattccttccttatcactttctttccatgagaagaacttcctttggccctcctttcacagtaggtttgctggcaacaaacttacttttcccttcacctgagaaggtcttgattcctcctcattcctgagggatagtttcactgggtatagaatttatggttgacagctcttttcttatggcacttaaaaacgttccacttatttcttgcctccatgctttctgatgagacatccatgttttttggaaggtggttacgtggctgctttcaaaattggggtttgttgttgtttagtttttggaggtctgactgtgatatgtcttggtgtggatttccttgggtttataacgtttggagttcattcagcttcttaaatccttacatttatgtcttttgccaagtttaggagattgcttcttcaatattttttcggctttgtcctctttctcttctcctcctggcaattagatgacatgaatattagatcttttgttatctctcagagaactcttttctcccacccctagtctattttctctctgtttcagactgggtggtttatattgctctatctccaggttcactgcatctttcctttgtcccctctgttctgctttggagttatcgattaagtttttattctgattattgtatgtttttaaaaaattctaaagtgtccatttggttctctttataacttctatttccttgctgaaacattctttattttcatttgtttcaagcatgttcataattgctcatcaaagcacctttaggatggctgctttaaaagcctcatcaggtaatcctgatattccttcctgttcaacatataccagtattggtgtatgctgattgtattttctggtacaactgacattcctctggttcttgctatgacaggtgattttcttattggatcttgaaagtttggggtattgtatgttgagactctggattacatttcaatcttctgtttcacagctggcctctcctgaccccatatggtagacagagaggggtgctgccccattacatcaggaatgggggagggaaacccagcatccccactttaacccaggtgtttttagcacaatgagaaaacttgggttgcttccctcatctccagggaagcaggaggctgatctcttgctgccctgcttcttggcagggcagtggggggcaagggctgctaggccttaaaaagagggtgccagggatggcttttccagaggctatggccctggagagggctcccatacttgggaacatctttggtgacctgactgtgacccccaggatgacaagcagcattctgggagtggtaggagctggactgagccacggactgcaaactggaggcctgctggctgggatcttcacacttttgaaaggtcttgttcactccacactctcccaataacatgtgcatgcattccaccgattactgctgctgcagccctggcctgctccggcatttggcccatctcactatttacctccatcaactacttggcccctgaagtcatctgagtttgcagccccaggaggaggcagtgccaagtccccccagtctccagggattgcttgtatgtgtgtgggcaggtggggggcagggggagggactctgctactctgtcttttgtgcaataaagtattgacattg

SEQ ID NO: 176 - DNA, 3199 bp, Homo sapiens
agtcatgtgaccggcaatggcggcgctgacgagaggtaggtgagcccggcgccccccacacccaccgcgcgccccccgggccccgctcgcacccctcacgcgccccccgctcccccggcgccccctcctccacctcccctccccgcgcgcggctccgggctccccgctccgtgcccggccgatcatctttctagcaccctccagccttggcctccattcgggggttctgagggctgcgatcgggccgacatgcacccccacccggcggtggggatccgggggctttggctactgagggatgtggggagttggttccgggtcgggtcttggaggaggccgtggggggagggcgggagctgcttcagtggatgcccccagggacccttgcccatccgggctgtgcctccctctggcctctgtctggagggagagactggttccttgtccggcctgggttgccacagaggaatcacagacccaccctaaactggggccccgcctcccttttctgtgccagcaggacttggacctaggacacctaggtcctgggtcccccgtgatggggagagaagtgttgcatcgcggatagactgtatgggctgagactctagggttccattttcacttatgaatctcgaggtgcatctggccttgggggacgatgatggaggcatgaagggacagctgctccttcttggatcagtcaataaatggaggtcacactaatggcccttctttctgtttgagctgcatttggaagtgttgtggagacagccccgtagcccaatgcgaccagactcagggaaaacatcaggcccctccagctgagcccttgtgtgagccccgcccctccctaaatgccagacttgggagctgacagacagcactgcctgtgctgggtttaaaaggtgacaatgagaactttgttattgcaggggctgctgccactttgttcacatccttaacagacttcagcagaagggactgagttagctctcaaggaaggctccctggcaataggggctgaattatttggcaatgtggagcaggcgaggagttggggagcataggaaatattccggtccatgtgatctgagggaggtggcaagaagacctccacctgtgtgggcgttttctttcctgacttctcttatgtgtgccctaggctttcttgggggcctcagagctggggaagaaaggaggaaggttagcatgttgaagttccttcttgagcaacttggggagaagctgataatggaattctgcagagaagagaggagatggaaggggagtttttatttctgggttggctgaggggaatggtaacatttgccatcataactttttacccttcccccactcccagtcctggtcagctgagtggaaatagaaggatttctgctgccatcatcttccatgggctttccaggtcacacgacctacaagtagggagcagggaaagaagagtgagcctgcatgccaattctaagctcttcaggatcaaatgtcgttcgtcctgtccagaatggcagcctgtggaggcacctgcaagaacaaagtgactgtgtccaagcccgtgtgggacttcctgagcaaagagaccccagcccggctggcccggcttcgggaggagcaccgtgtgtccatcctcatagatggcgagacttctgacatctatgttctccagctttccccacagggtcctcccccggcccctccaaatgggctctacctagcccggaaggctctcaaggggctgctaaaagaggcagagaaagagctgaagaaagctcagaggcagggggagctgatgggctgcctggctctggggggtggaggggagcaccctgagatgcaccgcgcaggcccaccccctctccgagcagccccacttctgcccccaggagctcgggggctcccccctcctcctccccccctgcccccacctcttcctcctcgccttcgggaggaggcagaagagcaggagagcacctgccccatctgtctgggggagatccagaatgccaagacattggagaagtgccggcattcattctgcgagggctgcatcacccgggctctgcaggtgaaaaaggcctgccccatgtgcggccgcttctatgggcagctggtgggcaaccagccccagaatgggcggatgctggtctctaaggacgccaccctcctactgcccagctatgagaagtacggcaccattgtcatccagtacgtcttcccgcccggtgtccagggggctgaacacccaaacccaggagttcggtatcctggcaccacacgggtggcctacctcccggactgccctgagggcaacaaggtgctgaccctgttccgcaaggcgtttgaccagcgtctcaccttcactatcggcacgtccatgaccacagggagaccgaatgtcatcacctggaacgacatccaccacaagaccagctgcacagggggaccccagctgtttgggtacccagaccccacctacctgacccgggtgcaagaggagctgagagcgaagggtatcacagatgactgaaggacatcgcctttgccaaggcccctgctgtctgcctctactaggacccagcagaagcctctttctcctctctgccccctgccccccacaccacacctgtaggggacctgtctgactgggaagggagttccgagagggagggggcaatcccttcccccatcccccactggccaagtgtttcaatgcagtgtgagccactcccttctggcagaggccgacctccaaggctctgttctcccctccccgtgtacatatactcccggtttccctgcccctccattgcccttggctttttctggtatgtgctgtgctccacgaccaagccgagaaaggacctagggtggggaagggagggtctcttgattcctaaccgcccccacatactgctccaccgctgaacttcgggtgccggggaggagaaattgggctgatgtgagctccccgtcacccgccatggagccggctgtgtgtgttcatcagatacagttctcccttaaccttgtcctttctctcctgtgtctcagtctccgtcagtctgtctttctccgctcttctctgacccctgtgaggaacctccttaccctgttctggaatcgctgccagactgtagcttttaatttaataaaaataaagtaaaatatgcaactcttt

SEQ ID NO: 177 - DNA, 3756 bp, Homo sapiens
ttcagaaggtcagtaataataaacttctcccagctaaaggaggatgttctaacccatcgcaaggaagctaaaaaccttgaaaatagattagacgaatggctaactagaataaacagtgtagagaagaccttaaatgacctgatggagctgaaaaccatggcacgagaactttgtgacacatgcacaagcttcaatagccgattcgatcaagaaaggatatcagtgattgaagatcaaattaatgaaataactcaagaagattagagaaaaaagagtaaaagggaacgaacaaagcctccaagaaatatgggactatgtgaaagaccaaatctacgtttgattggtgtacctgaaaatgacagggagaatggaaccaagttggaaaacactcctcaggatattatcaaggagaacttccccaacttagcaaagcaggccaacattcaaattcaggatatacagagaatgccacaaagatactcctcaagaagagcaaacccaagacacataattggcagattcaccaaggttgaaatgaaggaaaaaatgttaagcgcagccagagagaaaggtcgggttacgcacaaagggaagcccatcagactaacagcggatctctcggcagaaaccctacaagcccgaagagagtgggggccaatattcaacattcttaaagaaaagaattttcaacccagaatttcatatccagccaaactaagcttcataagtgaagaataaaatcctttccagacaagcaaatgctgagagattttgtcaccaccaggcctgccctaaaagagctcctgaaggaagcactaaacatggaaaggaaaaaccggtaccagccactgcaaaaatatgccaaattgtaaagaccatcgatgctatgaagaaactgcatgaactaacaagcaaaataaccagctaacatcataatgacaggatcaaattcacacataacaatattaaccttaaatgtaaatgggctaaatgccccaattaaaagacacagactggcaaattggataaagagtcaagacccatccgtgtcctgtattcaggagacccatctcacgtgcagagacacacataggctcaaaataaagggatggaggaagatctaccaagcaaatggaaagcagaaaaaagcaggggttgcaatcctagtctctgattaaacagactttaaaccaacaaagatcaaacgggacaaagaaggccattacataatggtaaagggatcaattcaacaagaagagctaactatcctaaatatatatgcacccaatacaggaacacccagattcataaaacaagtccttagagacctacaaagaaacttagactcccacacaataataatgggagactttaacaccccactgtcaatattagacagatcaatgagacagaaggttaacaaggatatccaggacttgaactcagatctgcaccaagcagacttaatagacatctacagacctctccaccccaaatgaacagagtatacattcttctcagcaccacatcacacttattccaaaattgaccacatagttggaagtaaagcactccttagcacatgtaaaggaacagaaatcacaacaaactgtgtctcagaccacagtgcaatcaaattagaactcaggattaagaaactcactcaaaactgcacaactgcatggaaactgaacaatctgctcctgaatgactactgggtaaataacgaaatgaaggcagaaataaagacgttctttgaaaacaatgagagcaaagacacaacgtgccagaatctctggaacacacttaaagcacggtatatagggaaatttatagcactaaatacccacaagagaaagcaggaaagatcaaaatcaacaccctaacatcataattaaaagaactagagaagcaagagcaaacaaattcaaaagctagcagaaggcaagaaataactaagatcagagcagaactgaaagagatagagacacaaaaacttcaaaaaaatcaacgaatccaggagctcgttttttgaaaagatcaacaaaattgatagactgttagcaagactaataaagaagaaaagagagaagaatcaaatcgatggtataaaaagtgataaaggggatgtcaccaccaatcccacagaaatacaaactaccatcagagaatactataaacacctctacacaaataaactagaaaatctagaagaaatggataaattcctggacacatacagcctcccaagactaaaccaggaagaagttgaatctctgattagaccaataacaggctctgaaattgaggcagtagttaatagcccaccaaccaaaaacagtccaggaccagacagattcacagccaaattctaccagaggtacagaggagctggtaccattctttctgaaactattcctagcaatagaaaagagggaatcctccctaattcattttatgaggccagcatcatcctgataccaaagcctggcagagacacaacaaaaaaaaaaaaaagagaattttataccaatatccctgatgaacatcgatgcaaaaatcctcaataaaatactggcaaaccgaatccagtagcacatcaaaaagcttctccaccacgatcaagtgggcttcatccctgggatgcaaggctgtttcaacatatgcaaatcaataaacataatccatcacagaaacagaaccaatgacaaaaaccgcttgattatctcaatagatgcagaaaaggccgtcgacaaaattcaaaagcccttcatgctaaaaactctcaataaactaggtattgatagaacgtttctcaaaataataagagctatatatgacaaacccacagccaatatcatgtggaatgggctaaagctgttgacctgatagatatgggttcaagaggacacagctgaatactgtgcttaggaaaagaacagtttcaaaggctttccagattgtcagatttgatgatatcctccttggtgcacacctctcttggctatggggcacataaaccacctctaccaatctaactggtttgtgcagtttttctgattttgtatctaccggcaaaatatatcttaagccatttttaggaaacaggaggtttagtcacgtgctcaacaaaagcacaacaaatggggagcatttaatggtgtaagggctgtgaggtgtagctgctgaaactgtagctaggagctgccttgctgccttcttgcaggcagattggtcagatgagccaggctaaaatacaattaatatctaccattgtggtttaatatgaaatatggatacctggtctttgtctcagttcttgtcatagagttccccaaacctttagaacttcctgagtggtaggaatatctcattagtgataatgagcccctttgattcgataactcctgagtttatgctaatgaggttacttaatgtggggccctagatattcttaggatggggctagttcccggaaagaccaggtcatttgaggattagagggttggaacttttagctctacccactgatctctgggtggggaaggtgctggagatcaagctgcctaaaaactcttgaacaacaagatttgaggagcttccagtaaatgcgtccacaagctgggagggcactgcaccccagtttcactgggacagaagctcttgcacttggaatctttccagacctagcccttcatgctgcttcatctggctgttcatctgtatcctttataataaattggcaaatgtaaaggt

SEQ ID NO: 178 - DNA, 3278 bp, Homo sapiens
ttgagctgcagggacatgcagagggaaagggggccaggcagtgagcggtggtcctggccaggggtggtcacagggacatttggctggggagtcactataggttccatctgccatagttttcctaaatgccagagcccaaaaagcgcaacccctgacttactccatagctgcaatgcgtgaggatgtgatgggcatgggcagggtctatcctagtctctgtgcctcagtttccccaagggccaggtggttcagggccagtgtatctccggagatgacaagctgtcaacctgctgcggccttagccagccccgtgggcagtctcaccctcacttcccatgcctgggactttgtgctgggcccatcccagtggtcccgaggtggagggttctgggcccttgggccactgcccttttggggggggtgtcggggcagggggctcttgacttcctgctccacttcggcttcgggctgggggtactgtgtgcactgatggagggaaggggagccgcagcagagctggaaatgacctgcgtggatgtcgcaattcttcatggagcctcccgtgcacacctggatggggacagtgtggggacagagtggctgggagtggaggaaccaggcagtctggaacatgaggagtgggggcagccggccgggacagggctggctgtcctggccgtggctccagcctgaccactccctgctggtcctcggccatggagatcccacctactgcctcatgtctgggtcctctccgcccccccgcagcttccgcaactttgacgtgggggagtcccaccagtgctccctggactggctcctgctgggcccagcagccccaccccgccaggaggccttccgcctctgtggctccgccatcccacctgccttcatctctgcccgcgaccatgtctggattttcttccactcagacgcctccagctccggccaggcccagggcttccgtctgtcttacatccgaggtgatggaggctgcagggcaggcaggacaccacggagcacaccgtgcatgcccacaggctcccggcccacaggggcggcaccctccacagggccccggctccctgtgggatgtcccctgaccgccctgtcaatctcaggacagtggcaggactgggcatgcggatgccttggacctctcaaggtcactggccccacttcccagtcttggctagtcctgggaactcacccctaaccccaggctcaggtcagggacagagcccaccctggtgttggaggggtctctgctgccacagtgatggggaactacctgcccgcttttggccccaggccccctggccgaagggaggctcttctgtctcctgactgtcccctgctacgtctccaccccacagggaagctgggccaggcatcctgccaggcagatgagttccgctgtgacaacggcaagtgcctgcccggcccgtggcagtgcaacacggtggacgagtgtggagacggctctgatgagggcaactgctcggcgcccgcctccgagcctccaggcagcctgtgccccggggggaccttcccatgcagcggggcgcgctccacgcgctgcctgcctgtggagcggcgctgtgacggcttgcaggactgcggcgacggctcggatgaggcgggctgccccgacctggcgtgcggccggcggctgggcagcttctacggctcctttgcctccccagacctgttcggcgccgctcgcgggccctcagaccttcactgcacgtggctggtggacacacaggactcccggcgggtgctgctgcagctggaactgcggctgggctatgacgactacgtgcaggtatacgagggcctgggcgagcgcggggaccgcctgctgcagacgctgtcctaccgcagcaaccaccggcccgtgagcctggaggccgcccagggccgcctcactgtggcctaccacgcgcgcgcccgcagcgccggccacggcttcaatgccacctaccaggtgaagggctattgcctcccctgggagcagccgtgcgggagcagtagtgacagtgacgggggcagcctgggcgaccagggctgcttctcagagccacagcgctgtgatggctggtggcattgtgccagcggccgagacgagcagggctgccctgcctgcccgcccgaccagtacccctgcgagggtggcggtggtctgtgctacacgcctgccgaccgctgcaacaaccagaaaagctgtcccgacggcgccgacgagaagaactgcttctcctgccagcccggcaccttccactgcggtaccaacctgtgcatcttcgagacgtggcgctgtgacggccaggaagactgccaggacggcagcgatgagcatgggtgcctggccgccgtgccccgcaaggtcatcacggcggcgctcattggcagcctggtgtgtggcctgctgctggtcatcgcgctgggctgcgccttcaagctctactcactgcgcacgcaggaatacagggccttcgagacccagatgacgcgcctggaggctgagttcgtgcggcgggaggcacccccatcctatggtcagctcatcgcccagggcctcattccacccgtggaggactttcctgtctacagtgcgtcccaggcctctgtgctgcagaatcttcgcacagccatgcggagacagatgcgtcggcacgcctcccgccgggggccctcccgccgccgcctcggccgcctctggaaccggctctttcaccggccgcgggcgccccgaggccagatcccactgctgaccgcagcacgcccctcacagaccgtgctgggcgatggcttcctccagcctgctccaggggctgcccccgaccccccagcaccgctcatggacacaggcagcaccagggcggccggagacaggccccccagtgcccccggccgtgcaccggaggtgggaccttcagggccacccttgccctcgggcctgcgagacccagagtgcaggcccgtggacaaggacagaaaggtctgcagggagccactggtagacggcccagctcctgcagatgcacctcgggagccctgctcagcccaggacccgcacccccaggtctccactgccagcagcaccctgggcccccactcgccagagccactgggggtctgcaggaaccccccgcccccctgctccccaatgctggaggccagcgatgatgaggccctgttggtctgttgaccgctgggctcgctggtgaccgccacagccccgctttgtaaccagggaatacacagtcatttct

SEQ ID NO: 179 - DNA, 3467 bp, Homo sapiens
ataacactggtatgcagacccctccccatgactcaaatattaatatatgcaattctgttacagtaaagttttcaccatggtcaacctattccagcattaggtactttttgttgttgttgttttgttttttttttttttttttgagatggagtctcactctgtcacccaggctggagtgcaagggtacaatctcagctcactgcaggctccacctaccgggttcaagtgatcctcctgcctcagcctcccaagtagctggcgctcaccactactggtgcccaccacaatgcccggctaatttttgtacttttagtagaaacagggtttctgttggccaggttggtctcgaactcctgacctcatgtgatgcgcctgccttggcctcccaaagtgctgggattacaggcgtgagccaccgtacccagcctagcattaggtactttgttttgttttgttttgtttttgttttttttgagatggagttttgctcttgttgcccaggctggagtgccatggcaacacagcctccacttcctgtgttcaagcaattctcctgcctcagcctcctgagtagctgggattacaggcgtctgccaccacgcttagctgattttttgtatttttagtggagatggggtttcgccatgcttgccaggctggtctcgaactcctgacctcaggtgatctgcctgccttggccttccaaagtgctgggattacaggcgtgagccgctgcgcccagcgcactaaatactattaaaaggaattaagcaaaatgctacgtaccaatgattatgattcatgatcacctaaacacagaatgcagacttaacttttcattcttagtgtgctaattaagtagtagtatggtgcagtaaggaattttgttaattttgttataaactccctctcctgaaatccgtaaggaaatgtgataataagaaagtgataatagtgtcatattttaaaagtagaatccactgttaagcaccaagattaccttttcttccccctgtggcacagtttatttaaatgaagtattagcaataatcatgtcactattttgtcctgaataattaagagtttgcttttttcccatgtctttgcaataggataatataaagaatagtattaaaagtcagaggctttactaatctacctatatgtattccatggctaacaaaccctggcccctttacatatgagctctggaggttcgcctggctgcctcaggcttgcagaaggctgccccaatcacagagcctgggtaaggtggaacaggaggcagccccactcggcttttctgattgcatcccacctgtttctgagtgtgttggtttggtttaattcttttcaagggttggagttggaaagtgaaaaccctagacacttgctgtggaatgtttgcctggttgtattggtgtgtccctcttcttcactggcatgtcgctttcaagtgtaccaaaggacattttgttctgttgaaagccacaggaccaaaaggaaaatattgcaactatttgcaaacatacttccctacctatacaagcagccatatactaaaaagcactaaacaagcacaaatgaacactaaatagccttataccaaaaagcattcttgtaactgtcagggcatggtatgaattccttcctctttaagcagcaacttaccacaggcttggtggctttaagtaatatagcattaagcaaatggtcagttattttttaatgttgaaaacttccaagtgtgaataatacggacatagtttactaccttttgcttttaatatacctggttatctatttccatttgaaataaaatgaaaggagacctcaaactgatgctgagaagtagacaaaatcagctctcagacttaactctccccaattaaaatagtttttttttcccttcccatttttttgtttttaagagatagggtcttgctgtgttgcccaggctagagtgcagcagtgacatgatcatggctcactgcagcctggaactcctgggctcaggatccttctgcttcggcctcctgagtagctaagaccacaggtgtgtgccaccacacctggctaatttttttaaaattttttgtagagatggggacttgctatgttgcccagactggtctcgaactcctggcctcaagccaccaacctctcaaattgctagaattacaagcatgagccaccacacctggcctgttattccttctttatctaatgtgtgctaagcttgtgaaaaatatatgttgaggtaaatagggcaaaacattagttgataaattatgctaattaatgggaaaaatagacatgttcctctctgaacatttagaaggactctgccctacaactatcttctgtttttagaatttgtagtcactgttcttagtgccactggaaatatattcattctttgagcatgtacagggtgggctccctgttgtatttattacacttttcaaaatgccagcaagtttttgtttgtatagagttggaatgtattgttcgtgcatgcctgtgatattcatcatcaaaatatacctgtaaaaaataaactactgcttcctctccacagcttaggcctccctcttactaaaaacaatagtagtttctgtagaagtttcagtgagaaattatggttatataaataacagatatggcagaacaattttgttgtagtatttttttccgtagcatttcttaataatagctcagtttttaaaggaggggaacaataccccatgagttcaaattaattttctctactttgaggtataccttcctaattatattttacataggctgttttttttaagtttaaattctcactgttaagttgcattgagagacaattagaaatgttgtaattgtcatatctttacatgtggattatgaacaaatgaaagtttgctgtgtgattgcagttttaaattataacatttcataaatatgtcaattttagaaactcaaactctttcccatcttttgtatggataaagtttatggtttcatttctgagaatagagttggtctgctgtgctaacttcatgtttcttattccaaaggcttgattatatttttttctccagtgattaaaaatgcagcgaaaatccaatctacaagttcatatattggtatttctagacatagtctagttctaaaagaatgtacttggtgtgcatttttaagtgtttcatgtagacagattaatatatttttgtacaacattgtatttctacatttatttcaagactgtacttttcagtgactttttcaagtgcatgtgttaacagaagattgtttggaacgagagtgcagtggcttctttactagcaaagagaagtgtaatacaagtgatcatagaaggtgagaatgtgtttatactgtatatggaaacctaatgcctcttttctaaagctttgtacatttttttcgtgaaatagattaaatattttctctct

SEQ ID NO: 180 - DNA, 3806 bp, Homo sapiens
tttcggagcggccgcccgcctctcccgcgccgcccgcttgcgccgccgagccggtgcccggcgtggcggggctccgcaaccacggcaacacgtgcttcatgaacgccacgctgcagtgcctcagcaacaccgagctcttcgccgagtacctggcgctgggccagtaccgggcggggcggcccgagccctcgcctgacccggagcagcctgcgggccgcggcgcgcagggccagggcgaggtcactgagcagctggcgcacctggtgcgggccctctggaccctggagtacaccccgcagcacagccgcgacttcaagactattgtgtcaaagaatgcactgcagtaccggggaaattcccaacatgatgcccaggagtttctgctgtggcttttggaccgagttcatgaagacctcaaccattcagtgaagcagagtggccagcctcctctgaagccaccatcagagactgatatgatgcctgagggaccatctttccctgtctgtagcacttttgtacaagaactctttcaagcgcaatacagatcttctttgacgtgtcctcattgtcagaaacagagcaacacttttgatcctttcctttgcatttctttgccaattcctctgccccacacaaggcctctctatgtcactgtagtgtatcaaggcaaatgttctcactgcatgaggattggtgtggccgtacctctgtctgggactgtcgccagacttcgggaagcagtgtctatggaaacaaagatccccactgatcagattgtgttaacagaaatgtactatgatgggttccatcgttccttttgtgatacagacgacctggaaacagtccatgaaagcgactgcatttttgcctttgagactcccgaaatatttaggcctgaaggaattctcagtcaaagaggaattcatttaaacaacaacctaaaccacttgaaatttggcttggattatcatagactgtcttctcctacacaaacagcagcaaagcaggggaaaatggattctcccacatcaagagcaggcagcgacaagattgtcctgttggtgtgtaaccgagcctgcactgggcaacaagggaaaagatttggactgccttttgtgctgcacttagagaagacaatagcttgggaccttctgcagaaggaaatcttggagaagatgaagtatttcttgaggcccacggtttgcattcaggtgtgtccattcagcttgcgtgtggtcagtgttgttggaataacatatttgctgccccaggaggagcagcccttgtgccacccaacagtagaaagggcattaaaatcttgtggaccaggtggcactgctcatgtgaaattagtagtcgagtgggacaaggagacaagagatttcttatttgtaaatactgaggatgagtatattcctgatgcagaaagtgttcgtctgcaaagggagcgtcatcatcagcctcaaacctgcactttatcccagtgtttccaactgtacaccaaagaggagcggcttgcccccgatgatgcctggcgttgcccacactgtaagcatctgcagcagggaagcattacgttaagcctctggactctgcctgatgtgcttattatacatctaaagagatttcggcaggaaggagacaggcgcatgaaacttcagaacatggtcaaattccccttgactggcctggacatgacacctcacgtggttaagaggagccagagcagctggagtttgccatcgcattggtccccgtggagacggccctatggactcgggagggaccctgaggactacatctatgacctgtatgctgtgtgcaatcaccatggcaccatgcaaggggggcactacacagcgtactgtaagaactctgtggacggcctctggtactgcttcgatgacagcgatgtgcagcagctgtcagaagatgaggtctgcacgcagacagcatacatcctcttctaccagaggcggacagccatcccgtcatggtcagccaacagctcggtggcaggctccacaagttcttccctgtgtgaacactgggtgagccggctcccgggcagcaagccagccagcgtgacctctgcagcttcctccagacgcacctccctggcgtcgctctctgagtccgtggagatgactggagaaaggagtgaagatgatggaggcttttcaactcgaccatttgtgagaagtgtccagcgtcagagtttgtcatccagatcttctgtcaccagccccttggccgtcaatgaaaattgcatgagaccttcatggtccctgtctgctaagctgcagatgcgctccaattctccatcccgattttcaggggattcgccaattcacagctctgcttccaccttggagaagattggggaggcagcagatgacaaggtctccatctcttgctttggtagcttgcggaacctttctagcagttaccaggaaccaagcgacagtcatagtcgccgtgagcacaaggctgtgggccgggccctctggctgtcatggaaggcgtgttcaaagacgaatcggacacccgcagattgaactccagtgtcgtagatacacagagcaaacattcagcacaaggggaccgcctgcccccgctctctggtccatttgataacaataatcagatcgcttatgtggatcagagcgactccgtagacagctctccagtcaaagaggtgaaagcccccagccacccaggctcactcgcaaagaaaccagagagcacaactaagagatcccccagttccaaaggcacttctgagccagagaaaagcttgcggaaggggagaccagccttggcaagccaggagtcatccctttcaagtacatccccttcttctcctcttcctgtaaaagtctctctaaagccctcccgctcccgcagcaaagcagattcttcttccagtggcagtggacggcattcatcccctgcccctgcccaacccaaaaaggagtcatccccgaaatctcaggactccgtgtcatctccttcgccacagaagcagaagtcagcctcggccctcacctacactgcttcctccacatctgccaaaaaggcctcgggccctgccacaaggagccctttcccacctgggaagagcaggacttcagaccacagcttgagtagagagggctccagacaaagcttgggttctgacagagccagcgccacctccacctccaaacccaattcccctcgggtgagccaggcccgagcaggggagggcaggggggccgggaagcacgtgcggagctcctccatggccagcctgcgctcccccagcacaagcatcaagtctggtttgaagagggacagcaagtctgaggacaaggggctgtccttcttcaaatcagccttgagacagaaggaaacccggcgctcgacggatcttggcaagacagccttgctctctaaaaaggctggtgggagctctgttaagtctgtctgtaagaacaccggggacgacgaggcagagagaggccaccagcctccagcttcccagcagccaaatgcaaatacaacgggaaaagagcagcttgtcaccaaggaccctgcttctgccaaacattccctgctgtccgctcgcaaatccaagtcttcccaactagactctggagttccctcgtctccgggtggcaggcagtctgcagagaaatcctcaaaaaagttatcttctagcatgcaaacctctgcacggccttctcaaaaacctcagtgatatttctgcaatcgaagtgttttatctgtaaagatgtttatttatttagaacccctgccctccc

SEQ ID NO: 181 - DNA, 3381 bp, Homo sapiens
gaaaaagcccgcggcgtcttctctgtcacccgcgctcggctccctgctcggtcgggctggaacctgtactggcagccggaggtgtaggtaggaaccggaatacctcggaagccgggaaatgacggagtttcattcttgttgcccaggctggagtgcaatggcgcgatctcagctcaccacaacctctgcctcccacattcaagcgattctcctgcctcagcctcccgagtagctgggattacagtgtggtgtgttgaatattatagtttcaaaatccttcatgtgtgttaggactcaatgatctttgaggatgtggctgtgaactttacccaggaggagtgggctttgctggatccgtcccagaagaaactctacagagatgtgatgtgggaaatcatcaggaacctgatgtctgtaggaataaaatgggaagaccggaacattgaagatcagtacaaaaattccaggagaaatccaagaaatcatatggcagagagactctgtgaatgtaaagatggtcaatgtggagaaactttcagcctgattccagatggtataatgaacaagaacactcttcctggggtaaaaccatgtgaaagcagtgtgtgtggagaaggcaacgtggatcattcatctctgaattgctacatcagagctgacactggacacaaaccgtatgagtgtcaggaacatggagagaagccacataaatgtaagcagtgtgtaaaaaccttcagctgcctccactccttccaaacacatgaaaagcctcacacaggagagaaaccctatgattgtaaggaatgggaaaaaaccttcgattctccccaaaccgttcgaagatacagggtagtgcacagtggagatggaccttataaatgttgaagaatttgtgaccgtggataagttcgtttcctgttatgtgaacttggcagattaatgctaaatcctgtgggacagcatttagcaacacctaaaaaacatgataaagaaatacctgagactgggtaatttataaagaaaagaggttgaattggcccatgattctgcagactgcacaggaagcatggtactggaaggatggcatctgctcagcttctagggaggcctcaggaaactgacaatcatggtggaaggcaaagggggagcagcagttcacacggccagagaaggagcaagagagagcagggcaaggtgccacagacttttaaatgaccggttctcacaagaacttaccatctcaagaacagcaccacagggatagtgctaaaccattcatgaaggaccaccatccagtcacctcccacaaggccccaccttcaatattgggaattacaattcgacatgagatttgggtggagattcaaatccaaaccatgtccttttgcttttttctgttttgtttgtggagtagatttttctccatccctttactttgagcctaagggtgccattgcatgtgagatgggtctcttgaagacagcataccattggatcttgcttttttatccaagtcaccactgtgccttttaattggggcatttagcctgcttacattcaaggactcagtgacctttgaggatgtggctgtgaacttcacccaggaggagtgggctttgctgggtccttcccagaagaatctctacagagatgtgatgtgggaaaccttcaggaacctgatgtctgtagaagtcatatggtagagagagtctgaaggtaaggaagatggtcaatgtgaagagatcttcagccttgttccaaatggtatagtgaagacgacttttactggagtcaaatcatgtgaaagcagtgtgtgtgaagaaggcaatatggatcattcatctcttaattgctgcatcagagctgacactggacacaaatcagatgagtgtcagcaacatagaagccacatacgcagtgtgtgaaaaccttcagctattgccactcctttcaaacacatgaaaggcctcacactggaaagaaactccatgtaagaaatgtggaaaaaccttcatttctgttcaaaccttttgaagatacatggtaatgcacagtgaagatgaaccttataaatgtaagttttgtgggaaggcctttgataatctacatttatatcttacacatgaaagaactcacactggagagaaaccctatgaatgtaataaatgtgggaaagccttcagttgttccagttccattcgaaaacatgcaagaattcacactggagagaaaccctatatatgtaaacaatgtggcaaagcctttagatattccagttctattcgaaatcatgaaaacactcacactggtgaaaaaccctgtgaatgtaagcaatgtgggaaagcctttagttattccagttactttcgaatacatgaaagaattcacactggagagcaggtgtataaatgtaaggaatgtgggaaaacattcacttatcccagtgcctttcataaacataaaagtacccacacttcacagaaactttatgaatgtaaggaatgtgggaaagcatttgattgttttagttcctttcatagtcatgaaggggttcacactggagagaaaccctatgaatgcagaacgtggaaaagccttcagtagttctaagtacttaaaaatacatggaagaactcacactggagagaagtcctatgcagtaaagaatgagggaaagtattttattgtctcagtccccttcaaagacatgaaaggactcacatcagagaaaagttgtatgaatgtaaaaaatgtgataaagccttccattcgtccagtactgttagaaaccatgaaagaagtcacatttaagaaaaacacagtgatgttaggaatatggggaacctttcctttctcttccagtctttggaaggcacagggtatgacacactggtgaccttataactgtaaggagtgtggataagtatttattagtccttgtgtgttttagatacatgaaagaatttactcaaaaggaaactctatgaatgtaaagaatgtggtaaaacctgtgtagtttcagtttctcttgaataaagtcatttcctggtattctcaggggattggttccagcaccccttgagaatatataattttgctcaagtgctttacagaaaagtgtatttgcctataactaggcaatcctgtatactttaaatcatctctagattacttataatacctaatgcattgtaaatgctatgaagacaactgttttattgtatttagggaagtatgacaagaaaaaacatctgtacatattcagtacagacacaaccaccatacggctacctacctagtacacatcatctacaatataacattttctttttaaaaaacagttatggattggtttcattaaatgacctgcaagcgtgtgtt

SEQ ID NO: 182 - DNA, 3864 bp, Homo sapiens
atgcctaatctttcctggttgtgcgatgagaacctgttttttttctacaacaatgagaagacacagaaggagccaaaatatgcccttttcttgcccctattctccccacagtcctctctctgctgacctttaccccagaaccaggtcttctttaaaaagcagaattggcccagactctatcagcaagtttttgattgtcctggggtttaaagagggcttctgggagccagacaacccttttcttggtctctttgctaaactgattctaactcctagagaatggcatttcaattattctaggcctgtaggcatggagataccatcatcctcctttggaacatttatgataatggcttgatggtgctgaaaaccccaattaccagggttctagtctatccctaacctaaattcttattctatatttttgcctttaggagtgctgagtgtgcatcgttcagcctctataaagcaaccatcacccttttgatgattccaaactcctcattttcagagtgttcttatttctcagaaagatttgaacttgggcatggaaaggtctgcttctcctgtgctggctctgctgtcttcagctggagggtcaggagacattctggatggagaacggctgtcagggagtgataggcagcttcactccagacaagtacctggaatttggaaccagggaaacgggaggataagagacatcctcttgttctttgacctgattccccagtcagcgggaagcccactgggggctataactaacagcttctgaatagcagggaaattttcactaatccaagtcaaaacctagaaaaaagcctcctctttttatctcaaaaccatgaaaatcttctaggaacaggcagaaaacaaacagctggagttttttgtttttgtttttgtttttttttttgcttcttgtggccatgcacatgaagaattactaaaagatcaagatgtagaaataaaagaggcagggctgctcagaggacaaataaaaattaagttgatcaaatcaaagaccttaagttgtgcttcttcaagtcctttggttcctcagccactggctgttttctcctgccatgcaggggttttcaggagggctacaggagatttggcaattatgtttcacaaggtcatagggaaaattccattttaggtggagagtagacatcaccaagcacatcatggatgtggttcattgatgtcactattcattgaactaatctatcctgatgataggcatcgtacatcagtcttagactaaatgaccagcaggtcaggctaggaaagatccactgccctagatggggaactcccatctatacctccttccctcacagcagcactgggcaaggtgtccttgtcacagctgacatctttcttgtagggtgcagggaggaaggctactctggccagtgttgacattagacaagaagggagcctgtgggtatgagtgggaaaggtgaggggatcataactggcaggaccctgggagttgtgggcaggagcccaccccatagcccatgccactgtccagtgagacctgggaatgaaaaattcaaaagagaaggcagcagaaaacttttgagagagagaaagatagatagagagagagagagagagaaagagagagagagtgtgtgtgtgttgggtctgtcaaaactccaaatttccatctaggggccaaatatacagcaagaaccagttgtcagttcaaaagggcccccatcaccatcataactagaatcttagcagcgcagtggtagaaaccttgggaaactagaaaaaggatgttacctaaagtcaatttctagaagacctttatggcaatgaaaaggaaccaagaaaatctagatgggctgaacttggagaaccacaaagactcttgtttctagactctagaaacagttaatctgggagttactgacactttctccactttttcatgaatcagtccatgaaagcacaactcatcgtcattgaggaatggatgatggtctattttaatttctagcttgctgatacaagtgccaagaggggctgaacactgggactacaagagattcaatgagccaattcagggtgaatagttgggtcctattttccccaaagcagttgcttttcaaccatcattgtcaaaatacatttgaaggacacaacaccatagggcaatgttctagggagatgcaaactagcataagagttgcccccacaaaatttgtttccaccactgtgagctcctgcttgctgcctcctcccttgtcctggtcccctccatggcagctggaggaaagcctggtctaaagtgaggaaaggatagagaaatgagcatgacagagttgatttttggatgaacaatggtttcacccagtttcccttcttgagcccctgatgtctgcgtttgagtagagcagaggcttggagtgaggaggcccctccctccagccagcctgagactacttccatactctcagtcagtgcacattttccccaggaaaccaatgacagaagtccatgctgtggcaataaagagaaggtcagccacctcttctgtggaggattctgatgccagctcagggacacagaggctggtcagaatgcctccctacacctcacagtgaagcattgttcttggagaagtatgaagccaaagaacccaaaacgagtggatagagtgaagacaagaataaaacacgtcaggcagggcatggtggctcatgtctgtaatcccagcactttgggaggccaagataggcggatcacctgaggtcaggagtttgagatcggcctggtcaacatggtgaaacccagtctctactaaaaatgcaaaaattagctgggcatggtcgtgggcacctgtgatcccagctgctcgggaggctgaggcaggagaatctcttgagcctgggaggtggaggttgcagtgaaccgagatcacgccattgcactccagcctgggcaacaagagtgaaactccatctcaaaaaacaacagaaagaataaaacaggtcttggtttcacaaagtaagacgtggtacaaatatacctatcacatgattttagaaaaattgagggaaatggaagcaaacacaagatattcaaaacagcaatgtcctaacttgtttgcagataccagaataatgacttacagataccagaataatgagggagaaggaaagggaaaaatcagttggggaatacttggactgcaaaagcagcctgcctcaaaagtcagagcaacaggaaaacacactcacacacacacacacacacacacacacacaaaacaaacaaacaaaaacaaacatgggtaaaacctcaggctgcacatgcacacagataagcagacagggtcctgcagagaagcccattgttctttgtataattagcaaactcccaggaaaaagtttcttccccttttcaggcatatacacggtgggctccacagaaactggcacagggaggagggggacttacctaaaacaaacccacagttatataaataagagaagtggcgctttgtgcctgcctaaagacatacctacagctgcataaggggaattgcacggacagctttactggtaaaaagttactaaaacagttacagggaggagagcagttgcttatagaagtttactgcaatcagctgcaacctggcaatccactcggactcccctctgctgcggagagctttcttctttagcttattaaacttttgctccaacctcatccttgtatccacattccttaaccttcttggatgtaggacaaagaaccctgggtactagttcaaacaatgagaaactgctacaataagatgcatcagtgagactgcaacaatacctttgctcatcattc

SEQ ID NO: 183 - DNA, 3901 bp, Homo sapiens
aagcgtcggacgcggcccggcgccgagccatggagcctgagccagtggaggactgtgtgcagagcactctcgccgccctgtatccaccctttgaggcaacagcccccaccctgttgggccaggtgttccaggtggtggagaggacttatcgggaggacgcactgaggcctgatctacagacactggggctgtccgtcctgctggaccttcgtcaggcacctccactgcctccagcactcattcctgccttgagccaacttcaggactcaggagatcctccccttgttcagcggctgctgattctcattcatgatgaccttccaactgaactctgtggatttcagggtgctgaggtgctgtcagagaatgatctgaaaagagtggccaagccagaggagctgcagtgggagttaggaggtcacagggacccctctcccagtcactgggtagagatacaccaggaagtggtaaggctatgtcgcctgtgccaaggcccagctacactgtatcaggaagtggacgaggccattcaccagcttgtgcgcctctccaacctgcacgtgcagcagcaagagcagcggcagtgcctgcggcgactccagcaggtgttgcagtggctctcgggcccaggggaggagcagctggcaagctttgctatgcctggggacaccttgtctgccctgcaggagacagagctgcgattccgtgctttcagcgctgaggtccaggagcgcctggcccaggcacgggaggccctggctctggaggagaatgccacctcccagaaggtgctggatatctttgaacagcggctggagcaggttgagagtggcctccatcgggccctgcggctacagcgcttcttccagcaggtgcatgcagagccttttccttctgtgcccccccatttccatttattcacttcctttctgcctggagaggctaatcaagttgttaaaagtggaggctgaggggcccatctcctaggtttttgctcttagctctgccacctccttgctgaatggcatggggcaagatactaaacctgactgtgcctccatagatctacctcacagggctgctgtggggattacacgaggcaatacataaaagcccttagcacagagcctgccactcataaatgtcgtatgagtaccggttattcttttatataggctcttccatctccataccaactccgagtgacatggttaggcagtgatggtggaacagtgagaaaacaggagagtgacgggcattgggaggccacaggcaagaggacaagggctgtcactgggcatccttcgtgagcaacacaggcccttaccctttctctcccatccccaacccctttgacttcgtaggcacatgaatgggtggatgagggctttgctcggctggcaggagctgggccgggtcgggaggctgtgctggctgcactggccctgcggcgggccccagagcccagtgccggcaccttccaggagatgcgggccctggccctggacctgggcagcccagcagccctgcgagaatggggccgctgccaggcccgctgccaagagctagagaggaggatccagcaacacctgggagaggaggcgagcccacggggctaccgacgacggcgggcagacggtgccagcagtggaggggcccagtgggggccccgcagcccctcgcccagcctcagctccttgctgctccccagcagccctgggccacggccagccccatcccattgctccctggccccatgtggagaggactatgaggaagagggccctgagctggctccagaagcagagggcaggcccccaagagctgtgctgatccgaggcctggaggtcaccagcactgaggtggtagacaggacgtgctcaccacgggaacacgtgctgctgggccgggctagggggccagacggaccctggggagtaggcaccccccggatggagcgcaagcgaagcatcagtgcccagcagcggctggtgtctgagctgattgcctgtgaacaagattacgtggccaccttgagtgagccagtgccaccccctgggcctgagctgacgcctgaacttcggggcacctgggctgctgccctgagtgcccgggaaaggcttcgcagcttccaccggacacactttctgcgggagcttcagggctgcgccacccaccccctacgcattggggcctgcttccttcgccacggggaccagttcagcctttatgcacagtacgtgaagcaccgacacaaactggagaatggtctggctgcactcagtccctcaagcaagggctccatggaggctggcccttacctgccccgagccctgcagcagcctctggaacagctgactcggtatgggcggctcctggaggagctcctgagggaagctgggcctgagctcagttctgagtgccgggcccttggggctgctgtacagctgctccgggaacaagaggcccgtggcagagacctgctggccgtggaggcggtgcgtggctgtgagatagatctgaaggagcagggacagctcttgcatcgagaccccttcactgtcatctgtggccgaaagaagtgccttcgccatgtctttctcttcgagcatctcctcctgttcagcaagctcaagggccctgaaggggggtcagagatgtttgtttacaagcaggcctttaagactgctgatatggggctgacagaaaacatcggggacagcggactctgctttgagttgtggtttcggcggcggcgtgcacgagaggcatacactctgcaggcaacctcaccagagatcaaactcaagtggacaagttctattgcccagctgctgtggagacaggcagcccacaacaagggtactgggcagagctgaggaagggggtgcttggagtcagggttatagcaggaagttttctggagagtgtgcgaactgcttgggaaaacagtttataggatgaagaaagaatggcttataataagattcaagatttggcttgagagattactgaagtagaaatgagcctaagatataccaaaaagaaagagaaagctggcaaatttccgggaagcaagtgcaagtaggggccaggtgcagtggctcatgcctgtaatcccagcgcattttgggaggccaaagtgggaggattgtttgaggccaggtgttcaagaccagcctgggcacatagtgagaccccatttccacaaaaaattttaaaattaactgggcatggtagtacgcacctatagtcctagctatttgaggggtgaggtaggaggatcgcttgagcccaaacgttcaaggctacagtgagctatggtggtgccactgtacttgagcctgagtgacagagcaagactctgtctttaaaggattttttttttcaaattttttaataaagcaaatggctgggaaaaaaggtgagaaactgctcgcttggatttaagaactgctgctacttgctgtgtgacctggactagttttttgtttgttagttttatttttatttttgtttttttgctgggctttaccttggttttaattttctgaacttcattctgctcatctgaaaaatgaaatactaatgtcttcatcttagtgtaatagggatgattaggtaaggtcaaatatatggaagcatcttgtaaactgtaaaggtatgtaaaaatgtgagggtttgttttttgtgtgtgtatgtgctcttaatgcccaagatgcagagtagaaattaggcagctgggatgccaaacagccaggatgcaacatattggagagaagagccagatatctgaggaggaagtcacaccatcattgccatccatgttgtgatagtcaacagaaggagtaaaaagagacatcagaggaatgaaagggaggaatgaggattgggaaggaac

SEQ ID NO: 184 - DNA, 3729 bp, Homo sapiens
atgggacttcctgcccttcggctcttgttaacccagcctcagtcacctgagggttttcggggttccagcccacttggtcatgggcccttgaagagagctgcccattggtggccagcactctgtaccttggccacctggttgagaggggcggcaccctggaaacgaagtggcagatgggggcgggccccagagtggggggtggggcaaggtctggatatatctgtttggtcccgaagtgcagagatgaggcgcagcccagtcctccttttggggctccccactggtggctgagggtgaggggcgatgacagagatcccccagaagtatacagctggggcttggaaggctgtgggaggggtcttggtggacactggggcctggcacgagtggggcctatgagagggcagtcactggcatgtgccttgacttccctgctttgcgtcacctgggaaacgaatggctgtccctacagcactgcgtccatgccccatgccaagcacagaccctgttccagggacttgggatttgagtgataacttctagccaggctactgatgaattcgttttcagctgataaactccaagtgcccagctgtggcagggggttgtccttggcctggcacgtttctctctgaggtgagctgctggaaagccagtgttccggatgctgcacaggctgagcccggcggtgctccctctcctggcgggcgcctggcacggagggggctcaggaagtcctgggaggacgcttggcagtgctgagtcagagcaggcgtggctggccctgcgcaccggtctctctcagctgtgtgtggttctctgaattcagaaggctctggggctcccccggcggctctgcatccaggtcatgccacccctcccagaaagccttcctttttccacatcagcactcaggctgtggtcagcgggagtgcagtgcggacgcctgagagcccatgtgctcttgaggtggctttgtagaacctactccctggcctcttaggaagtgactctcagcgggcagctcacgtctcatttcctgcgctttgctgaggtttctgtttgtggttgggggagtgtgggacctcacatgccttgccttgtgccagcggcatttgcagggcaattaagagcctgggctgcagacagagggcgagcatcactccctgcgccgactctgtcatcactcagggctctccttccctggcagggcagggctgggcgcttactggaaacgtctggtatggtttctgttaaatgggcgagtcagaggcagagagtcgagagcttcacgtaattgatatttggactcagcaggcagggcagacgggggagggaagcagggcctcagtgtcctgccccacaggctgagtgtctttaggtcattttgttcgaccttaagaggagagatggctaatttaaggcggcttcagtggccattttcagccaccaagaattcccagaataccggatgtgcttgctctaaatgtgtgaaggtgcacatctgagagctggtaagtgacagccagggtgtggttttgtttgagttgacagccttgtgcagctacagggtgtgccgggtgcaaaggtgaataatggtgagctgattccaatttgaagaaaaataaatgctgagaaggctgtgggtttcagtgcttccccagtgttttcttgtcttcagtggttgccggtcatgtgtctaaatagcattggagctccagggcctggctgggaattctcgtccctcccacacctgtgcctcagtttccctagtgtcaggtggggatgctgagacctgccttctggaattgttgggagcatgtgaggagatcatctctgtccaagactcacagtaacagctcaaccaatgaccccagtcaataatggcagaaccagtgggtggtgtaagcaggcggggacttccacagaaccaacgtttagctaccttagggtttcatgtcagtgtttcttggagtctcagaggccatcacagcttccagttcctccagccaggccattctgagagtgaaagcgtctcagtgggggcctgccacccctgtgcctttttctggtaggtggcgggtacttggttgctgggaacagaccctgacttagtacgcctcaggcatccccgtggatctggttacaggtccccctgaggatgaaggatgcgccctgcccctgcctgcgccccaggggggagatgctgccatgtgctcactcaccacgtgagcacctgcctcctctatggttgtcaggaccagggctgactgcagccggtgtgggcagcaatggggttcaccatgtcggactggcccccaaacctctcatgctgtcctcccatggcctgtgccccccatttgttgtctggatgcccaggacctaggagaggactccagggctcgggtggcagcggggaaggggctggggtgcacttgtgctgcactgtgatgtgaggggatgagcttctatccgttaaggcactgaggtgtgagggtcatttgtgaacgtttaaactatgctgatgcaccctgttttacaaatggggtctcaagacaagtcaccttgctcgaacctctacagccaggaggaagcagggctgggatttacactcctgtccgcgggaccccagagctggcacccgtatgcgtcaggcaaagtctcctttcctgcaggaaggcactggactgtcatcggattttacatgagtcccatttggtgaaacgattacttttgtcttttttcagttggattgcaaaaaaaacttagatattgatgggcaagtcaagtgtttgaaggaggaagacaaaagtgaatggatattttttgactgatctgaatagattaagcacaagtagaatagaacattttatgttatggtaattaatgtagaatagttggataggatgaatggaatgattttttccttcttacagtaagcattttgaagctcttccatttctcattgttttcctgctggagggaggcagggggtgtaggggacacatcaagtgggggggcccctccatggacaaggaacatgggtccaaactgcatggctggctctctaagtctctgccacgggtgggttttgctccagctgtgctgcgcttggctctcccccaccagaaaggtggtattttacaccggcttcctggggagactgggctagcacacccaatttaggatagtgtccttagggcaatgtttttttctttggatttcagtttttgagaatgtttccaattatttttagggatatcatgattacaaaaaacacctaaaagcagaatcaactacttaaatgtcagatacatttaagaattgtacactcatgttcatagcagctttatacataacagccaaaagggggaaacaacccaaacgtccatggaaggaagaacagatacatgtggtccctccacaccatggcatgacattagcattagaaagggcgtggtggctcacacctgtaatcccagcactttgggaggtcgaggcaggcggatcacgaggtcaggagattgagaccatcctggctaacacggtgaaaccccgtctctactaaaaatacagaaaattagccgggtgtggtggcgggcgcctgtagtcccagctactcaggaggctgaggcaggagaatggcgtgaacctgggaggcggagcttgcagtgagccgagatggtgccactgcactccagcctgggcaacagagcgagactctatctc

SEQ ID NO: 185 - DNA, 4456 bp, Homo sapiens
aagtttgcggagcggcttctgctcgtcggccgtgcggcgaggcagggcctgggctgcgaccccggcggccgctcgcggtcttgggagagctggggcgcgtgcctgaacttcccggctgcccctgtccttggagacctacctgatggggacgccaggtgtgcaggggcgtggcgcgtaggagtgatttggagaacaatgcatgtaagtctgacatcatgatgtccatccggcaaagaagagaaataagagccacagaagtttctgaagactttccagcccaagaagaaaatgtgaagttggaaaataaattgccatctggttgtaccagtagaagattatggaagattttgtcattgacaattggtggaaccattgccctttgcattggacttcttacatctgtctaccttgccacgttacatgaaaatgatttatggttttctaatattaaggaagtggagcgagaaatctcattcagaacagagtgtggcctgtattactcctactacaagcagatgctgcaggctccaaccctcgtgcaaggttttcatggcctaatatatgataataaaactgaatctatgaagacaattaacctccttcagcgaatgaatatttaccaagaggtttttctcagtattttatatagagttctacccatacagaaatatttagagccagtttatttttatatttacaccttatttgggctccaggcgatctatgtcacagctctctacataaccagctggctactcagtggtacatggctgtcaggactgttggcagctttctggtatgtcacaaatagaatagataccacaagagttgagtttaccatcccactgagggagaactgggcgctgccattctttgcaattcagatagcagcaattacatatttcctgagaccaaacttacagcctctttctgaaaggctgacacttcttgccattttcatatcaacttttctctttagtctgacatggcaatttaatcaatttatgatgctgatgcaagcattagtgctgttcacactggactccctggacatgctgccagcagtgaaggcgacatggctgtatggaatacagataacaagtttactcctggtctgcattcttcagttttttaattccatgattcttggatcactgcttatcagttttaacctttcagtattcattgcaagaaaacttcagaaaaatctgaaaactggaagcttccttaataggcttgggaaacttttgttacatttatttatggttttatgtttgacactttttctcaacaacataattaagaaaattcttaacctgaagtcagatgaacacatatttaaatttctgaaggcaaaatttgggcttggagcaacaagggattttgatgcaaatctctatctgtgtgaagaagcttttggcctcctgccttttaatacatttggaaggctttcagatactctgcttttttatgcttacatattcgttctgtccatcacagtgattgtagcattcgttgttgcctttcataatctcagtgattctacaaatcaacaatccgtgggtaaaatggaaaaaggcacagttgacctgaaaccagaaactgcctacaacttaatacataccattctgtttggattcttggcattgagtacaatgggaatgaagtacctctggacgtcacacatgtgtgtgttcgcatcattcggcctatgtagccctgaaatatgggagttacttctgaagtcagtccatctttataacccaaagaggatatgtataatgcgatattcagtaccgatattaatactgctgtatctatgctataagttctggccaggaatgatggatgaactctccgagttgagagaattctatgatccagatacagtggagctgatgaactggattaactctaacactccaagaaaggctgtgtttgcgggaagcatgcagttgctggccggagtcaagctgtgcacgggaaggaccctaaccaaccacccgcactatgaagacagcagcctgagagagcggaccagagcggtttatcagatatatgccaagagggcaccagaggaagtgcatgccctcctaaggtccttcggcactgactacgtaatcctggaagacagcatctgctacgagcggaggcaccgccggggctgccgactccgggacctgctggacattgccaacggccacatgatggatggcccaggagagaatgatcctgatttgaaacctgcagaccaccctcgcttctgtgaagagatcaaaagaaacctgcctccctacgtggcctacttcaccagagtgttccagaacaaaaccttccacgtttacaagctgtccagaaacaagtagcgcagatttctgcccagtgtctatttttgatacggagaaactgcatcatgatgaaactcaatagatgacgtttcctatgtaagtaggtagcccaaaccttcaagctgtgatatgagtaagttctacagatgtttacacaagtgttgccatctttgaaagcatcttctacaagcagaagtctttttcgttgtgtgtctatctttctcattaatgttctttagcctaaatgttaacaactttctaagagtgacctagaattatgttgttggagagaatgatgtgtgttccatggatacctggataggcacataacatgttggaagatgagcacctgctcaggatttgaaatacgtttaattttcaggtgacttaagacagctatgattgaatcaactagagatgatgatcgacttatttaatatgatttcactggtgaagaccaattggtagctttttaaaaagcactttagtgtcctgttttaccttaaaatgttataatattttccagttgtcatgctgtcaacattaacaaaaaaaatcatgttaaggctttgtatcaaacattttgttacactctgtctgaaatgtaatgtggagtacttcagcagtatgtgtcatgtattgtgtgtgtctgtgtgtgtgcatgtgcacacatgtgttttaatgctgggcacagaaaagtgttacaagttccatatcgtaagtccttaaaggggcagaaatatatgtagccaagtagaatttattacattttagtgttattattttaaaacttactgatactctttaacctctcctgcagtaatagttttgctttatttcttactcatttcaatttattgggtttgcaaaattttgtaaactttttgtgtttttagcctttgtattttttacagcctagaatcttgcaaagtctgaatattttttaaatgttctatcttaactagttcactaatacagtatttttagcagacagcattttcagacagcattttcataccaagtttgacttgtggtctccaatcttactgggaaggccctggtagtgtaattcttttccttattaaaaggtaaccaagtgcctctaagtcatgcttatttgtaaacaacaaagaagagtatatgtacctgctcaaaatttttttgataatcgcttatataattaatttctaatgatgaggacatgtaaaagttgccagtaagaacatagtatgcatttaattaaatcaagatggctaatggaattaactttctcccctgttcttgccaggtggaaatgatttaagcatttctccttgcagttgtattgaagtaaattaccataggcatcaagatggctgcatcacattttcaaatgattttatattcagttgctacttataaagcagcattcaaaaagtcttttacactgtcatgttggacacaagcagactcagcttttatcaaaacttgtttaaataaaaaattgacagtagctgggttattaaattatgcaactgaaactcctgaattatatcttttctgtatcccttaataagattggagaccactgccgtttaggataatacaataataaaacgttttaatcagtactaaaactttaattaagccaataatgatgcatgcctgttgtagctgacagcatgggtcagtacatccttcggcgagtgccttactctaattgaaaccaagcacacgtaaggtacaatatgttagactctgtgattttgttttcaaaatcctctgttatggctatatttaaatttattttaaatattcctgtatgtattcatctaagcatttgggcatttggagtcttaatatacaagaaacacgtacttaaatttttatgcttatcaccgcaatgatggcaaacagtgattttttttttcatagtttaggtgtcattgttgccagcacctttagtgctcagtcttcagtgaaaaatataaagtgccaaaaaaatcttgcaagacagaatccatacttaacactctttccaagacactgtgaccatgtacagtagctatttcctgatgaccaaatctctcaacgaatcatgttattaataaatatttttagcactcatc

SEQ ID NO: 186 - DNA, 3514 bp, Homo sapiens
agctcttaccagtgaagtttgtctaaaaggactgccaaaaacccagaatggagaaattgtacagtttaaaggttggccccggctcaaatgggttgtaacagattccaagtacctttcaaagccaccgaaagactggcagccacacatctcacctgctgggacagaaccggcatacattgaggggaaacaatagtaaatgtcttagactttaagaaggatgctgggctgtggcacggcatgtttgcgaatgtaatgaataagatgcacacaatcagcgtaccctactctgttatgaaaacctgtcctctctcttgggtccaaagagtacatgctcacaaagccaaggtagctttagtaaaatgtcgggacttgcactgggctatgatggcacatcgggaccaaagagacgtgagcttgagttccctccgaatgttaattgtgacagatggagctaacccctggtccgtgtcatcctgtgatgccttcctgagtctgttccaaagtcatggactgaagcctgaggccatctgtccgtgcgccacgtctgctgaagccatgactgtagcaatccgcaggcctggagttccaggagcccctttgccaggaagagccattctctcaatgaatggattgagctatggggtaatacgggtcaatactgaagataaaaattcagcactgacggtccaggatgtagggcatgtaatgcctggtgggatgatgtgcattgtgaaaccagatggacctccccagctctgcaaaacagatgaaattggagaaatctgtgttagctccagaactggaggcatgatgtactttgggcttgctggtgtgacaaaaaatacatttgaggtaattccagtgaattctgcaggctctcctgttggggatgtgccattcatccgatcaggattgctggggtttgtagggccgggtagtttggtgttcgtggttgggaaaatggatggcttactgatggttagtggtcgaagacataatgctgatgacattgttgctactggattggctgtagaatcaataaagactgtttatagaggaagaattgctgtgttttctgtgtctgtattttatgatgagcgcattgtggtggttgcggaacaaagacctgatgcttctgaggaagatagtttccagtggatgagccgcgtgctgcaggcgatcgatagcattcatcaagtgggggtttattgtcttgctctggtgccagccaatacattgccaaaaactccactaggaggaatccatatatctcagacgaaacaactctttctggagggatcactgcatccttgcaacatcctcatgtgcccccatacatgtgtgacaaacttgccaaagccccggcaaaaacaaccaggtgtaggccctgctcccgtgatggttgggaatctggttgctggaaaacgtatagcacaagctgctggaagggatctgggacaaatagaagagaatgatttggtgaggaagcaccagtttctggcagagatcctacagtggcgagcccaggcgactcctgaccatgtactcctcatgctgttaaatgccaagggaaccactgtatgcacagccagctgccttcagcttcataagcgagcagagaggattgcatctgttcttggtgataagggacatctaaatgcaggagataatgtggtgttgctctatccacctggcattgagttaatcgccgccttctatggctgcctgtatgcgggctgtatacctgtgaccgtcagacctccacatgctcagaacctcacggccacgctgcccactgtccgaatgattgttgatgtcagcaaagcagcctgtattctcaccagtcagaccctaatgaggctactgaggtcccgagaggcagcagcagctgtggatgtgaaaacctggccaaccatcattgacacagatgatttacccaggaaaaggttacctcagctgtataaaccgcccactcctgagatgttggcatatcttgattttagtgtctccacaactggcatgcttacaggagtgaagatgtcccactctgcagtgaacgctctgtgtcgagccatcaagctccagtgtgagttgtactcttctcggcagatcgccatctgccttgacccttactgtggacttggcttcgcgctctggtgtctctgcagtgtctattcaggccaccagtctgtcttaattcctcctatggagttagagaacaaccttttcctctggctctccacagtcaaccagtacaaaataagggacactttctgctcctattcagtgatggagctctgcaccaaaggtcttgggaaccaagtggaagtgctaaagaccagagggatcaacctctcctgcgtccggacctgtgtggtggtggcggaggagaggccccgcgttgcactccagcagtccttctctaagctcttcaaagacatcgggctgtccccgcgggctgtcagcaccacttttggatcaagagtcaatgtagcaatatgtttacagggaacctcagggcctgatccgactactgtgtatgtggatctgaaatcactaagacatgacagggttcgtctcgtggaacgtggcgcccctcagagtttgcttctctcagagtctggaaagattttacctggagtgaaagtggttattgttaatcctgagaccaaagggccggttggagactctcaccttggagagatttgggtgaacagtccccatacagccagcggctactacaccatctatgatagcgagactcttcaagctgatcatttcaacactcgcctcagctttggagatgcagctcagacactctgggctcggacaggataccttggttttgtccgccggaccgagctcacagcggccactggagagcgtcatgatgcattgtatgtggtgggagcgctggatgaaacactggagctgagaggattacgataccacccaatcgatattgagacctcggtgtcccggatccacagaagcattgctgaatgtgccgtgttcacatggaccaacttgcttgtggtggttgtggaactgtgcggctctgaacaggaagccctagatctggtcccattagtgaccaacgtggtcctggaagagcattacctcatcgttggcgtcgtggttgtggtggacccaggtgtcatcccgatcaactccagaggagagaagcagaggatgcatctccgtgatagcttcctagctgaccagttagaccccatctacgtggcttataacatgtaaccagccttgtggggactgcagtgggccattctgaagaatcacaaagacagaagacctctggctacgagcaggcttcaaacgatgtgaaataagctgagatggctacatgatattcttcatctcatcctgtgggattctgcaatcataaaacacaggaaaggggaattctgtgatggcaaatgaaaaaaatgttaacatttggtagacatgtgctttgacatagcgtgagcagcacattattaaagcaattacatgc

SEQ ID NO: 187 - DNA, 3759 bp, Homo sapiens
tatctttactttacagggaggaaatgacatacactcccttctccttgagggttttggagcaggtcaccatgggcagggagaagggggcacaatgtccatggaccagggcttggaaaggtgtcaggactgttccccctgcttgggaggactggaggaagaggcaggtttttttgcgggagcaacaaggcttgaagacagagctaaagaaacatgaaaaatatgaaaagggaggctgtgggaaggcaagtagggtctgcatgctcacagatgggagtaggagattgagtatcagtgctattgacacaagacaaacctgggacgtcccacaaggccttccagtcctgggattcttcttggcctggcttctctttggagagtctgtgctgtggttctaagattcctggctagaatgtcacagactgctggatttaggattctattctggaattctgtgattctccctgatgagactaagactcacattcctggtgtgactgcattctctcctgccaggtgtgtaggcggagcttcccttcctgtctgagaaggaaaggctgggggggcgggggggggcatctgcagtctgctgaggggcagcacatcgggcctgtgcacccttatcctctcctttgccgatgggaccttatttcccccaacttacaatggttcaaaagggcctgaatctgaggcaaacagagctggccatggtcagggccaggtctgtgtggtgagacagaagggaaacagttgtcagcaggcaaaaggggtgggggcagttggagatgaagctcctcaaggagaagctgtcagctcccactctacacctccccataagcctttgatttaaagaaagcctccatctgttagcctccggtgtgtgggatagttttgcagccgaagaggggtgggcattgctcaggatcttggcatggctgagaaccaggtccaggaaggagtgggaggggcaaggccagctcctctgcccccagcttgctgtgggacctcaggccttgggctagacttccttggactgactgctaaggcaggagagacagagtcagagaccctccctatccacaccccacctctcctagccagggagcaatgggttcacactgcctggatcagctatgaggtcaggtggctgggaggcctgaaccaggaagagctctgggccatgggaggcgggtgagcatttagaatgaatgctgaccctactgagcacacaaagctgtgaagaaggagctggtccttcagagcacgctgggagtatatgcactggtgtggggaggtaggaggagggggatgcaaccccagagaaggtggcaacttctggagaagcagacacagcagaaaaaacacagatagagggcgatactgattaattttgggttgtccctggtgatcaggtatgaacttgggtccccatcaccctcccaagtggccctgggcatatgtggtcagcacccagttagaaagacttgtttcctagtacgtcttctctcatggtctctcatggatgcactatacttcatagtacccaaaacacttccaagttcatagtgggcctctgtttctataatttgactatgtcgagcatacacttactgcattatacaaattggaaaaactgagaccaggagaggaggaaccagaatctcttgttgcctaagagattttctactgctcttgatggctgagagcatcctctactgcaatgatgaggtaagcctctcctagaccagggggcccaggcaacagaactcccaatagtggatttcagctaacatgtccctgttagcatcattctcactggcctctcctttacctcttaccctctctcctccagaagggtgagaatagagggggtttctttctctctcatgcttccctccaggccaggagggctgggggcagaagggcagaggcactgcagctgtggaacaggagcagacaagggcataatattcagaggaacctacagtccatcctcatacttcctggtcattgtccccatcttctgtgcctccagctgcccccatgccacaccctatcatatccacatgtgtggacacacatacccatggcctgtccctcccctgtctccagaaggctagccaggtccacactcctgctgatccccctgtttggagtacactacatcatgttcgccttctttccggacaattttaagcctgaagtgaagatggtctttgagctcgtcgtggggtctttccagggttttgtggtggctatcctctactgcttcctcaatggtgaggtgcaggcggagctgaggcggaagtggcggcgctggcacctgcagggcgtcctgggctggaaccccaaataccggcacccgtcgggaggcagcaacggcgccacgtgcagcacgcaggtttccatgctgacccgcgtcagcccaggtgcccgccgctcctccagcttccaagccgaagtctccctggtctgaccaccaggatcccaggggcccaaggcggcccctcccgccccttcccactcaccccggcagacgccggggacagaggcctgcccgggcgcggccagccccggccctgggctcggaggctgcccccggccccctggtctctggtccggacactcctagagaacgcagccctagagcctgcctggagcgtttctagcaagtgagagagatgggagctcctctcctggaggattgcaggtggaactcagtcattagactcctcctccaaaggccccctacgccaatcaagggcaaaaagtctacatactttcatcctgactctgccccctgctggctcttctgcccaattggaggaaagcaaccggtggatcctcaaacaacactggtgtgacctgagggcagaaaggttctgcccgggaaggtcaccagcaccaacaccacggtagtgcctgaaatttcaccattgctgtcaagttcctttgggttaagcattaccactcaggcatttgactgaagatgcagctcactaccccattctctctttacgcttagctatcagcttttcaaagtgggttattctggagtttttgtttggagagcacacctatcttagtggttccccaccgaagtggactggcccctgggtcagtctggtgggaggacggtgcaacccaaggactgagggactctgaagcctctgggaaatgagaaggcagccaccagcgaatgctaggtctcagactaagcctacctgctctccaagtctcagtggcttcatctgtcaagtgggatctgtcacaccagccattcttatctctctgtgctgtggaagcaacaggaatcaagagctgccctccttgtccacccacctatgtgccaactgttgtaactaggctcagagatgtgcacccatgggctctgacagaaagcagatacctcaccctgctacacatacaggatttgaactcagatctgtctgataggaatgtgaaagcacagactcttactgctaacttttgtgtatcgtaaccagccagatcctcttggttatttgtttaccacttgtattattaatgccattatccctgaatcccccttgccaccccaccctccctggagtgtggctgaggaggcctccatctcatgtatcatctggataggagcctgctggtcacagcctcctctgtctgcccttcaccccagtggccactcagcttcctacccacacctctgccagaagatcccctcaggactgcaacaggcttgtgcaacaataaatgttggcttgg

SEQ ID NO: 188 - DNA, 3663 bp, Homo sapiens
cccttgatgtgtccatgtgttctcatcatttagctcccacttataagtgagaacatgcagtatttggttttctgtttctgtgttactttactaaggataatggcctccagctccatctagttcctataaaggacatgatctcattttttttatggctgcatagtattccatgttgtaaatgtaccaaatttttaaaaaattgagatggagtcttactttatcacccaggctggagtgcagtgatgcaatcttgactcactgcaacctctgtctcctgggttcaagcaattctcctgcctcagcctcctcagtggctgggattacaggcatgtgccaccacgcttggataatttttgcatttttagtagagacgggattttgccgtgttggccaggctggtcttgaactcctgaccttaggtgatctgcctgcctcagcctcccaaaatgctgggattataggcgtgagccaccgcacctggcctgcaccacattttctttatccagtctaccattgatgggtattatgttgatggcatatctttgctattgtgaatagtgctgcaatgaacgtatgtgtgcatgtgtctttatgatagaatgatttctattcctttgggtatattcttagtaagggtattgttgaaagtgggctgttgaagtcccctactataattgcatctcagtttctctctccttttaggtctaataatatttgctttatatatatgggtgctccagtttgggtgcatatatatttataattgttatatcatcttgttgaactgatctccttatcattaaagaataacctttgcctctttttactatatgttactgaaattctattttatcatatataaatatgactattccttcttgcttttaatttgtgtttgtatgggatcttcttccacccctttatttttagtctgtttgtctttactgctaaggtgagtctcttgcaggcagaatatagttgggtctagttttttttattcatgcagctactctatattttttaattgaagaatttaaaccatttacattaaagattattgttagataagaacttactcctgccattttgttaattgttttattgttgtttaatagattctttactcccactttttattttgttgtatacctttgtggtttggtgtgaagctttctccttcctctttcttgtttatttgctataattgctttctttgtggttatcactgggctaacataaagagtcttgccaaaatagactattttaagctgatagcaacttaaccttggtcacataaaaattctctggacattttcctcctttcaatttaaattttaattgcctaatttttctctctattatatgttccctagccactaattgtaactgttgttgtcgttgaccacttttacttcaaacctttatatcagagaattgagagatttatatagcaccattatatcactgtgatattctgagtttgatttatgaactggttgctactggtgagctttataccttcacgtgttttcatggtagtaattattgtccttccattttcagttgtagcactcccttaagcatttcttgtagggttagtctaatggtgatgaattctctcaggctttgtttttctgtaaaggtctttatttctcttttatttctgaatagttgtgttggatatagtattcttgactgaaagaatttatttgttaaactctcttttactacatcattcactctcttggcctgcaagttttctgctaagaaatctgctaatagtctcacggagatccccttctatatcacttgatgcttttcccttgcagcttttagaattatctctttgtctttgactttcgacagtttgattataatatgcctcagagaggattttttggaagttgaatctaattgaggagctttgagtttctagaatctggatgtttgtatatcttccaatatgtgggaagttttcagctattatttcattaaataggttttctgtgactttctttatttcttctccctctaaaactactataatgagaaagtttgtgtgattaagggtatcccataagccccataggctttttaaattctcttctattcttattttatgttgtcccttctgagttatttcaaatgatctgtttaagttcagaaattcattattctgtttagtctgttgctaaagctctcaattgtagtttttatttcattaactgatttttttcagctctgatgtttctgtttggttcttttttcatgtaatatctatctctttgttaaaattctcattcagataatgaattgcttttctgattgcattgaaatatttgtattctcttgtatctcactgagttttattaagatcattaatttgaaatttttcaggcattttgttaatatccttttttttggagtctgctactaaggatttactgtgtttatttgttttggggggctgtcatgcatgcttccttggttcttcatatttcttatgtccctacattgatccgtgtatctagtagaatagtttctttttccaatttgtgaattaattgtcctagggatagacttcttcctgtagacactttctagagttttagtgaggtacggtgcattgactttggttttgggtgagtcagtaacatggactccatgaagtttcttcagctgtaatcactgtcagtaatttctgtgattgccttactggtctaggctgcatgagtttatgatggtgttggtgtagttttgctgtaggtgggagtgctgagctggttgttgggttgggtatgtgtaggcacaatgggccaagaggctctgtcaggctttccagggaggtggagttcattactgggatagctgtgagactgagctgagccatgtgtagacacggcaaggctgggaggtcctacggtagtctgtctaggggtgggccactctcagacaagctattgtgccaggcatgggtttgtgtgagtacagcgaggtgggaagtcctgtggctatctgcctgtagaggcagcattgctgcgggaccagctactgggttaagtgaaggttcatgctggtgtagtggaacctgaagttttgcagcagtatgtgtgcaaggatggctcttccaccataccagctgtcaggccaagaatggattcagtgtgagtgtagtggagcggagggcttgcaacagcctgtcagggaagcagagccgctgcagaactggcagtcaggttaggtgtgggtgcacatgaacttgccgtccagccaggtgtacaacatgagttcatgtgggcagggcattgagctagctgcatggtagtattctcactgcacaggtatacctgttcccttaggggtgatgtgctgtatggacttgagcaccagagtcttggttgttcatatggtctggaatccaggtagccacggttgtggtactacaggcacccatgtgaatgtgacagaatgatcatggagcctcagggatggagagagtccattgctacaacctcccagggcaggacacactctagccactctagcagttagccatccttaacagcctaggggctcagtgtaggctcctactctgcagcagtgtacttgtgtgaaattttggatactcttcaaattggatttagggcctatgaggactggggg

SEQ ID NO: 189 - DNA, 638 bp, Homo sapiens
agctagtagccggagggtcaccatgaagttcaatcccttcgttacctcggaccgcagtaaaaaccgcaaacgtcacttcaatgccccctcacacgtgcgcaggaagatcatgtcatccccgctctccaaggagctgcggcagaagtacaatgtccgctccatgcccatccgcaaggacgacgaggtccaggtagttcgaggacactacaaaggtcagcaaattggcaaggtagtccaggtgtacagaaagaaatatgtcatctacatcgagcgggtgcagcgtgagaaggccaacggcacaactgtccacgtgggcattcacccaagcaaggtggttatcaccaggctaaaactggacaaggatcggaaaaaaattcttgaacgcaaagccaagtctcgacaagttggaaaagagaaaggcaaatataaagaagaacttattgagaaaatgcaggaataaatagaacctgttgtgcaaccacggtttaaccggagattttgaggctagggtgtgtttctttcgaacttttcggaatgtctggaacatttcatttcctgttttgttacctgtgcctctgtaaatctacttttgcaattttaagtaataattttatgaataaaaatgggaaatgcttcct

SEQ ID NO: 190 - DNA, 3057 bp, Homo sapiens
tttttagatcggtggctggtgtaagaacctgaataaagaatattctagtctaaatgagcttgggataaggccagtatgtctgaagggagcacagctggtggtcaagggcggtggttgttagaaacatattgggaaattccggcaagaaccagattggggtaaggtcttaacggtgcaaggagaggagtttgaatttatttgtttatttattttttgagatggagtttcgctcttgtagcccgggctggagtgcaatggcgcggtctcggctcacagcaatctccgcctcccggttcaagccattctcctgcctcagcctctggagtggctgggattgcaggcatgcgccaccacgtccacctagttttgtatttttagtagagacggggtttctccatgttggtcaggctggtctcgaactctggacctcgggtggtctgcccgcctcagcctcccaaagtgctgggattgcaggcgtgagccaccgcgcctggccgcttgaatttatttcaattgccttaaaaaaaaaaaactaggccagacgcgatggctcacgcctgtaatctcagcgctttgggaggccagggtgggcagatcatgaggtcaggagaccagcctgatcaacgcggtgaagctccgtctctactaaaaataccaaaattagccagccgtggaggtgtgcgcctgtaatcccagctacttgggaggccgaggcaggagaattgcttgaacctgggaggccgagattgcaccactgcactccagtcttggcgacagaggagactctgtctcaaaaaaaaaaaaaaaaaaaaaaaaaaatccaagtctgggcatgtaatctcaggcctgtaatctcaacacttttgagaggctgaggtgggaggattatttttgggcccaggagttcaagaccagcctgagcaacatagagacctcatctcccaaaaattaaaaaaaagttagccatgtgtggtggcacgcgcctgtgatcccagctacttgggaggcagagacaggaggaacacttgagcccaggagatcaaggctttagtgacctgtgattgtgacaccgcactccagtctgggtgacagcatgacctggtctcttaaaaaggcaggaaatttattggctattatccagccttttttctaaattaaaccaccccaagtactattctcataatccttgcttattatatgttaacaattgccatagttttgtgggttttgtttttgagacggagtctcactctgttgcccaggctggagtgcggtggcgtgatctcagttcactgcaacctccgcccccacggttcaagcgattctcctgcctcggcctccctggtggctgggattgcaggcgcgtgccgccatgcctggctaattttttttgtatttttggtagagacggggtttcgccgtgttggacatgctggttttgagctcctgacctcaggtgatctgcccgcctcggcctcccaaagtgctgggattgcaggcgtgagccaccgtgcccggccgagaggattgcttctgagcgcaggcatttcagaccggtctgggcaacaaagagttcgtctctataataaattaaaaaaatagagaggcctggtggcacacgcgtgtagtcacagctacttgggaggctgaggagttccaggctgcagtgagctatggatagtgccactgtactccactctgggtgacactgcaagaactgtctcaaaaaaaggcagggagattatttaatgcggttcattcaggatgagcttgtaaagtgttacatagctaactagacctagttgggtttcagaggtcaaatcaagtaattaggttttgggctgcatgcagaggtggttagtagttttgatgtccgcacactgggcttgaactgtgatcctgagatttatgttcccagtctccttcaatctggagagattattacttacaatgagttgatccttgttatactttggtattttggaagaaagttttatccccagacatgttgagacaagagatctaactgaaggagatgagaggatttctataccatatgcgttaccttctaatgctggccacctctgaagggcacgtggcagctgagacgaaattgattttcttcatcactgatcccgtggcctttacacaggctcagaggtgcatcagaatccacaatgaagtggacaagattagtgaccaacacatctgtaaatgttatattttctttttttagttccttagctttttctaccctaggataaattattgaccagttttctgcagtcagattcctgaatcatgttgggtttttttttttttttagtttcactcttgtcgtccaggccactcttgtcttgcctcactgcaacctctgcctcccgggttcaagcgattctcctgcctcagcctcctgagtggctgggattacaggggcctgccaccacattgggctgatttttgtgtttttggtggagatggcgttcaccgtgttggctgggctggtcttgaactcctgacctcaggtgatccgcccgcctcggcctcccaaagtgctgggattacaggcgtgggccaccgcacctggccctcgtgttgggttttaaaacccactcttttttttcccccccaaactctgacttcacctttctctttatgaaaccgttctctttttggggcgggggtggtggtgaagaagctgctttggatggtggtgtgtggtacttgtgtcatcttcactcctgatgatccctttcctcataaactctgcactgcttttagcctgttttgttcgtgttataagttcttccatccagtccctgcactccaccttttaacccttttcaaaagctgcttcgcaaagggtcttgactaaagttgcttgcttaatgaatatgaagcagcctaaggatgagagaaaacgaggcagcagctggaccctctggagaatgttactttgtattttgtttacagctggttgtgactaagctctgtcctctaaagtcggttctaggggattaaaacagctctggctgatggcgcccaataaaataaaac

SEQ ID NO: 191 - DNA, 4010 bp, Homo sapiens
ctttctctgtcaggctcctatgctcttcatgtcttcctttgtccactatctggtgacctgtcaaaactttgctcccttgaaatattgtgatgactgctgcttgcccccacttctgcttgccatttctgctctcccctaaatgtacactttatacccagtgcagctctgctttctgggtgaaagtgccagccctgtgtctgctccaggcgtgctttgctggcctcgctctcactcctcgcctgcatgtatcccctgcacggtcacattcatgggcttgtttcccgtgaaccaatctgcacatctctggccttattcttcccccttgccaagtagtccccaccgctgccttcttgtttccctccttgcccttctgcagctctcttccagacctaccccaaatccctcttcttgacaaagctttccaaatgcctgtccttgctactcccattgtgccttgcagagtacctaggtcttcaggtttgtgcgtgagctcccctaggaggccgggagatcccttgaggcaagagctctctcctgctcctcttgctgtgcccttctcgcagtgcactcatagtacgttatatagttagtgctccacaaagtgagtggatcatgttgaatttagtaaaacagccatttctgagtgtctccttgaagtgtttgctttatggacacacagaacaggcaggagcagctgttcctcagcatcgaccttgcgctcctctgagccctgctgttggtcacagctccagtgtctgtccttgcctttctccccaaccaggcctggcatgcgtgggcagtgatgaacttcgaagctgtgctacactacaaacatcagaaccaagcccgcgatgagaagaagaaactgcgtcatgccagcggggccaacatcaccaacgccaccactgccgccaccacggccgccactgccaccaccactgccagcaccgagggcagcaacagtgagagcgaggccgagagcaccgagaacagccccaccccatcgccgctgcagaagaaggtcactgaggatctgtccaaaaccctcctgatgtacacggtgcctgccgtccagggcttcttccgttccatctccttgtcacgaggcaacaacctccaggatacactcagagttctcaccttatggtttgattatggtcactggccagatgtcaatgaggccttagtggagggggtgaaagccatccagattgatacctggctacaggttatacctcagctcattgcaagaattgatacgcccagacccttggtgggacgtctcattcaccagcttctcacagacattggtcggtaccacccccaggccctcatctacccactgacagtggcttctaagtctaccacgacagcccggcacaatgcagccaacaagattctgaagaacatgtgtgagcacagcaacaccctggtccagcaggccatgatggtgagcgaggagctgatccgagtggccatcctctggcatgagatgtggcatgaaggcctggaagaggcatctcgtttgtactttggggaaaggaacgtgaaaggcatgtttgaggtgctggagcccttgcatgctatgatggaacggggcccccagactctgaaggaaacatcctttaatcaggcctatggtcgagatttaatggaggcccaagagtggtgcaggaagtacatgaaatcagggaatgtcaaggacctcacccaagcctgggacctctattatcatgtgttccgacgaatctcaaagcagctgcctcagctcacatccttagagctgcaatatgtttccccaaaacttctgatgtgccgggaccttgaattggctgtgccaggaacatatgaccccaaccagccaatcattcgcattcagtccatagcaccgtctttgcaagtcatcacatccaagcagaggccccggaaattgacacttatgggcagcaacggacatgagtttgttttccttctaaaaggccatgaagatctgcgccaggatgagcgtgtgatgcagctcttcggcctggttaacacccttctggccaatgacccaacatctcttcggaaaaacctcagcatccagagatacgctgtcatccctttatcgaccaactcgggcctcattggctgggttccccactgtgacacactgcacgccctcatccgggactacagggagaagaagaagatccttctcaacatcgagcatcgcatcatgttgcggatggctccggactatgaccacttgactctgatgcagaaggtggaggtgtttgagcatgccgtcaataatacagctggggacgacctggccaagctgctgtggctgaaaagccccagctccgaggtgtggtttgaccgaagaaccaattatacccgttctttagcggtcatgtcaatggttgggtatattttaggcctgggagatagacacccatccaacctgatgctggaccgtctgagtgggaagatcctgcacattgactttggggactgctttgaggttgctatgacccgagagaagtttccagagaagattccatttagactaacaagaatgttgaccaatgctatggaggttacaggcctggatggcaactacagaatcacatgccacacagtgatggaggtgctgcgagagcacaaggacagtgtcatggccgtgctggaagcctttgtctatgaccccttgctgaactggaggctgatggacacaaataccaaaggcaacaagcgatcccgaacgaggacggattcctactctgctggccagtcagtcgaaattttggacggtgtggaacttggagagccagcccataggaaaacggggaccacagtgccagaatctattcattctttcattggagacggtttggtgaaaccagaggccctaaataagaaagctatccagattattaacagggttcgagataagctcactggtcgggacttctctcatgatgacactttggatgttccaacgcaagttgagctgctcatcaaacaagcgacatcccatgaaaacctctgccagtgctatattggctggtgccctttctggtaactggaggcccagatgtgcccatcacgttttttctgaggcttttgtactttagtaaatgcttccactaaactgaaaccatggtgagaaagtttgactttgttaaatattttgaaatgtaaatgaaaagaactactgtatattaaaagttggtttgaaccaactttctagctgctgttgaagaatatattgtcagaaacacaaggcttgatttggttcccaggacagtgaaacatagtaataccacgtaaatcaagccattcattttggggaacagaagatccataactttagaaatacgggttttgacttaactcacaagagaactcatcataagtacttgctgatggaagaatgacctagttgctcctctcaacatgggtacagcaaactcagcacagccaagaagcctcaggtcgtggagaacatggattaggatcctagactgtaaagacacagaagatgctgacctcacccctgccacctatcccaagacctcactggtctgtggacagcagcagaaatgtttgcaagataggccaaaatgagtacaaaaggtctgtcttccatcagacccagtgatgctgcgactcacacgcttcaattcaagacctgaccgctagtagggaggtttattcagatcgctggcagcctcggctgagcagatgcacagaggggatcactgtgcagtgggaccaccctcactggccttctgcagcagggttctgggatgttttcagtggtcaaaatactctgtttagagcaagggctcagaaaacagaaatactgtcatggaggtgctgaacacagggaaggtctggtacatattggaaattatgagcagaacaaatactcaactaaatgcacaaagtataaagtgtagccatgtctagacaccatgttgtatcagaataatttttgtgccaataaatgacatcagaatttt

SEQ ID NO: 192 - DNA, 3050 bp, Homo sapiens
ttcagtcatgtaatccatccaaaaactttttaaagtgtgttctactattttcaagtgagaaaactgaggcacccagagatgaaggcaattgcccagagttgtacaaatgcaagcacagaatcgggattcagacataggccatccagctgcagagcttccagtctgtcaaccctccttcctacactgctccaaggcagtgagtggtctccacgtgggtaatagattcacccctggggcaaactttcttattctgattttctcatcaaattcaacaaagtccccaaattttacaatagaaaaactcctcctaatcatgcacctgaatttgctgaataagttttcacaaagctggtctctaagtgacattgcctctgagagagaagcagccctgagtggccttgggcaaaattgtcacatggatgaaattctgtctgtaaagaagtggccctagaatcctgctgtttagggaaaacccattacatttagcaattgcttgggaacaaaagtgagagccagagggggctttatggttctgcttaagaaagtcaaaagtagttgttattacttatgagaaggggcgagaataggatgaggctagtgtaaaaacaaaaccaacaactagaaacagtaacatagtaacagtctgggaactacatggccaaaagggcggtgaaaatgccaccatgatttcagggacgcagtggggcaagggagaggaggttatctacatacaatataggatattttcaatatttaagaatggggcttcttaggtttgatttgaaggtgttggcattgcttcaaggtaaaccctattaagccactcccccaaccccactcctacactgggacccatccatacatctgttatgatggaaggaggtggtagtggaaatctgggaagggttggtatcaccattgtgttcagcagcagggaagcaggaacccagaaacagagggagctcctgggagcttttgcccagtggaaatttgcagaaatcacagaaacagctctgaatgtacccaagtcttggaattagggcattttgcacaagcatcacctacattcaaggagcagggtggccctagccatcatagggatgaaatgtctcctaggctgagtacactccctctccctaagaacccagatttgtcatggagccacttatttagtgacctcgaaattcagctttacaactttcttgactgaatgggaaatggattccttgtctgtttttcatattctatattctcttgactccttatcatagttacttctttttctttgtcactgataaaaagagagctgtcactttcattgctaaggctttcctcagaatctttcatttttttttttttgaaatgacctcaggctccttgtgcacaaacactgaaaccaaatagtcatattatcactgtgttcctaaccctagagccctagagacacttagcatgggtgtgggtttgcataacagggaaactagtattgacccggtacaaatgctaacttaatgtttaaaaagttcagggataatgcttcaatgatgccaaggtaggggtgtatatgtgtgagtgtgtgtgtgcgtgtgtgtgtgtgtttctctctatcacctaaatgtatttgatggggatacaaagttcaagcaaaagcagaaagaaaaaaaggtttgcatgaatggttagggagaatgggtccctcttccaggaaggttagtgactcaccgtgtgagaatacataagtcatctagtctccattttctatcctctacctttaaaatggggactgcgacacttgagaatgtgagcactcaaacagagtatctccaaggtacatgagactcactcaggtactcaagtgtatgcatccttggaaggaaagatttgagttgtggggagaaaaatgtctatgaaagtaagcctttcaagactttatgatactatgatgatatctgagaaagtggaggcaaaatcatacttaccagaaaagctaaaaagagaaactcagattacatggaaacagggagagagtggaattggggggaaggcatagagaaaatgaaaacaaaaatcctaatattcaccaaggaaagtattatgaactttgtatacttttatttttgttttcttcaagcgaactgttcaacgacattccagcatctgctgcctaaactcatttctaattcacatctttagacacctgtgcagttggaacagttcagcattcaaaggacttggactggcagataaacatgtgataaacagataaaacacctcactgtccgtccatctttttatcgttggcaggtgctcttgaaacagaatacataaaagaaaagaaaaaataatcaaaccaactctttatttttgcccttttgaatatattgtaggaaacagaagtttctgacgttagtctactctgattcaattaaacaaataccttatgcttgctcaccaccaaaatgaggaagctgcttgcccacaaattctctaaaggaagattcagaagaaaaaggaattgcagttaatcctttcccaggtcacacctaaaataggtctctgctaatagggaagttagttgtgtttaaaatataaatatacattttagaatatgtcgaaggaatcattgataaaagagtagagtcagaacttcaagtccccattaaaggggctggaaaatacaagtacagtatagtattttccaaactgtgtcttagggtctgagaacttctgttagatattctcccaaaaaataaatctataaagagtgtttctttggttaagtaattctggggaagactgagtaaagaaattactgctttctgcaaaatttggcaaatgtatattatgagtttctgagagagagatgtatatagtaagcagcaactctcaaacgtgaaactattttggcaatggcaaataatatctcatgttttaaggaaagcaggctagaaaatgctgacatggaacaaaattgtacttgaagctttgtctaagtgttctgagtagattatacaatgtatcagtaaataaacattttgatatcatacccg

SEQ ID NO: 193 - DNA, 3688 bp, Homo sapiens
atgccacccctttcctcaaaaccctcagtggctcccagattcactaagagtagaagctaaagcccttcccaccccatcacctccctgtcctattcctcactcttttccttttcattctctccactccaacggtaatggtttgtttagtgtcaatttgactgggccacagggtgccctgatatttggtgagatatttttctgggtgtgttgtgaaggtgtttcatgatgagaggaacatgtgacctggcagatggaggaaaacagtgtccccccctgtgcaggtggcctcatccaacctgctggagacctaaacagaaccaacaagtaagggggaattcacactctctgcctgcctttaagtggggacatcgttcttctcctccctttagactcagggtgggactgaaattcacaccattggctctcctgggtctcaggcccttgactcatagtggaactcatgccatcagctctcctgggtctcaggtcctcgactcacactggaactcacaccatgggttctcctgggactcaggccctcgaccacactggaactcacaccatcagctctcttgggtctcaggccatcgactcacactggaactcacaccatcagctcttctgggtctcagaccctcaaatcaaacaggaactcacaccatcagctctcctgggtctcagaccttcaaatcaaactggaactctcaccattggctctcctgggtctcaggccctcgactgacactggaactcacatcatcagctcttttgggtccccagcttgctaactgcagacctttggattcctcaacctgcatagctgcaggagccaattccctacagtgtgtgtcttcatatgtgtctatatgcgattggttctgttcctctggagcacactgactaatacaccatctgtaccagcatgctcctgtctcttctcccagataaacccaaggctgaatccctgatctcctttaagtcacctttttagtgagcccttggccacatgtttaaaattatcctttacctcaaatgcattatcgctgtctaaaagtccatatatttcacataaacattttaaaaactgtctgcagtctccataaaagcaggctttttgctgcttttggcccatgactatatccccagggccaataacgatgcccagcacagggtcagcactcaattaagatgaactgaacaaacagaagaacgaaagcgactgcctgctcaactctacagaaaccaggaagcctccaagaaacggatcaatttccaagaaaagagaaattacccaaaggatccgggaagggagaatctaaacagaccagttgccaagaagaaagagagaaactgtcaaacagcaaatccgaactctaaaataagagaaatgcaaattaaagccataacgagagaggatttcagagcgcagacaaaagggagcatccgcattccttcacttgccaccctgacactgatcaaaagggctgagcacccaatgcatttgctggtttgggtttctgcttcactgctggtgggggggatgctggggtcatttctttggaaggcaatttgacacatgcctacggtacagatgcccacatcctctgacccagcagtctcacgtaacgattatcctacagacatgctcacaagggcaacataggtacaagcacattcatcacacaaaggtgggtcacagcagaagattaggatcagtgaagtctccatcagcaggatgccaggtcaaaaacaacagctcctgcacaatggagagccatgcagagaccaggcaggcttgggcagctgtcctcagccacctcccatgctctgctttcctttcctgggtgttagtcattgagattcatgatttgtggcattaatgccacttacacgctgagccctctgccctgaaccttagtcttgaattcccacccttcctcccctgggcaatttctgtactttccgctcaatttttctgtaaacctaaaactgctttaaaaaaacaaaatctattcattacctagataacaaaattcgtaagacagtgagatgtcactttaaatccatcaaatcggccaaacttaggagatcagatgatttgaaaggtaagtgaacacccgcgaaggggactcaccaccatgctctgtggacgatccggcaacctctgtgtacttcccaaagaagcccgggagctggtcttcaggggcaacccgtcaccttcctagggaactgcattagcatgagctgcttctttttaagaaacgtttaaggccgggcacggtggctcacgcctataatcccagcattttgggaggccgaggcaggcagatcaccaggtcaggagttcgaaaccagcctgaccaacatgttgaaaccccatctctactaaaaacacaaaaataagctgggcatggtggcgtgcacctgtaatcccagctactcaggaggctgaggcagaagaactgcttgaacccaggaggcggaggttgcggtgagctgagatcgtgccattgcactccagcctgggcaataagaatgaaactccgtctctaaataaataaatacaaaatttagccaggcatggtgataggcacctgtagtcccagctacttgggaggctgaggcaggaaaatcactcgaatccagggggtggaggttgcagtgagctgagatcgcgccactgcactccagcctggatggcagagcgagactgtctcaaaaacgaacacaaatcttttaagttcaggggtacacgtgcaggacgtgcaggtttgtgacacagctaaatgtgtgtcatgggggtttgttgtacagattatttcatcacccagacatgaaacctagtacccattagttattttttcctggtcctccccctcctcccaccttccgcccttcagtgggccccagtgtgtgtccttcccctctatgtatccatgtgttctcatcatttagctcccacttataagtgagagcatgtggtattgggttttctgttcctgtgttagtttgctaagaataatggcttccagctccatgcatgtccctgcaaaggacatgatcttgttcttttttatggctgcatagtattccatggtgcctatacagtcttccatacagttctcagaagtgagggtgcaagagcgcctatggcagaatgcataggtcttgcacataaaacgttgggtcaaaggtgagaaatactatacatgacaagtgaaaacacttccatgttcccagcattgtgcataatttgggcatcacactcaattaagatgaaagagtggggtggacggagtaggcttggagggtgggagaatgggcaggtacagtaagggacccatcacagccactgatgttggagctagggaccaggaggtgtgaccagctcaacattctagacctaagggttggaaaccagaatgaagcctggctgactcgaccatgaggctgaaaagctgagaacatcacacaaggcaagtgaaaaagggaagcgcgtcctcacctgccctcctatgttcttaggtggaaacttacaacagggtggccacatggtagaaatggccagaagcaggccaggggcagtggctcacgcctgtaatcccagcactttgggaggctgaggtgggtggatcacgaggtcaggagttcgagaccaactcaaacatggtgaaaccccgtctctact

SEQ ID NO: 194 - DNA, 3226 bp, Homo sapiens
gctgttgcccgggccccgcacggggctggggagcgtaccgcgggcctctgcgtaggagctggctaagcgaccgcgaggacctcttgagatcgcagaggagcagccgagggggagtgcgagcagaatgggaatggggcggggaggtcgtgaggtgggacgggagcagatcgaagatggagggacagggccgcctcttcctaggaatgaagcggaggcggtgggggcgaaaccggctctcggacgggaagtgtgcgtgggtgtgtgtgtgtgtcgggggtggtggtgagtgtgaaccttcgcttggggcaggaggtagcttcggaaaggaaggagcagacggaggcaaggttggggtcctccgaggccagacctctgcgggcggggaggggacagcacgccgcagccgccggtaccgcagcagttgcctacgtggctggggaagcggggcgccggttgtactcacctcagctcagggtcctagagacctgcgggttttgctggtcgctgaggtctcccccacttccccacctcacttaagccatcacttccacctggtctcccaaattgaggtcctgaagtcctgagacccatgtcccacccaactccgacgtctttagatcccctttccctcggtgccagccttctgagagtcccaacgttctggcctctaggggatctgcagttcgggcggtgggcggttctgattggccagtcttccatgaggctctggggcacccagagtgtgtgtctggggtagggtggggaggctggccagggggcagaggtctgccccccgtcccagggctctgatgccctcctcccttcgcctcctcagttgaagaagctggatctggcagctgcggcagcacacaccttctttgtagcaaaccccatgcacctgcagatgcgggaggacatggctaagtacagacgaatgtcgggagttcggccccagagcttccgggacctggagacgcccccacactgggcagcctatgacactggcctggagctactggggcgccaggaggcaggactggcactgcccaggctagaggaggctcttcaggggagcctggcccagatggagagctgccgtgctgactgtgaggggcctgaggagcagcagggggctgaagaagaggaggatggggctgcgagccaggggggcctctatgaggccattgcaggacactggattcaggtcctgcagtgccggcaacgctgtgtgggggaaacagccacacgccctggtcgcagcttccctgtcccagacttccttcccaaccagctgaggcggctacatgaggcccatgctcaggtttcactgtcagggctgcatgggaaccatcacttcacaaggactctaatttgccctcctttggcgcctgtgacaagctcaggagatgggcttccttctgccttgctgcttctcaccttcctttattttcccccctcttgctcttctttgaactctccagctaagtgggcaatctgtcccaggctatagaaaatgtcctgagtgtcctgctcttctacccggaggatgaggctgccaagagggctctgaaccagtaccaggcccagctgggagagccgagacctggcctcggacccagagaggacatccagcgcttcatcctccgatccctgggggagaagaggcagctctactatgccatggagcacctggggaccagcttcaaggatcctgacccctggacccctgcagctctcatccctgaggcacttagagaaaagctcagaggatcaagagaagaggccttgggaccatgagcccgtgaagccaaagcccttgacctactggaaggatgtccttctcctggagggtgtgaccttgacccaggattccaggcagctgaatgggtcggagcgggcggtgttggatgggctgctcaccccagccgagtgtggggtgctgctgcagctggctaaggtactcgggaggctgaggcaggagaagcgcctgaacccgggaggcggaggttgtggtgagctgatctcgtgccattgcactccagcgtgggcaacaagagcgaaactccatctcaaaaaaaaaaaaaaaaagatgcagctggggctggagccaggtctggctatcgtggtcgccgctcccctcacaccccccatgaacgcttcgaggggctcacggtgcttaaggctgcgcagctggcccgggctgggacagtgggcagtcagggtgctaagctgcttctggaggtgagcgagcgggtgcggaccttgacccaggcctacttctccccggaacggcccctgcatctgtccttcacccacctggtgtgccgcagcgccatagaaggagagcaagagcagcgcatggacctgagtcacccagtgcacgcagacaactgcgtcctggaccctgacacgggagagtgctggcgggagcccccagcctacacctatcgggactacagcggactcctctacctcaacgatgacttccagggtggggacctgttcttcacggagcccaacgccctcactgtcacggctcgggtgcgtcctcgctgtgggcgccttgtggccttcagctccggtgtcgagaatccccatggggtgtgggccgtgactcggggacggcgctgtgccctggcactgtggcacacgtgggcacctgagcacagggagcaggagtggacagaagccaaagaactgctgcaggagtcacaggaggaggaggaagaggaagaggaagaaatgcccagcaaagacccttccccagagccccctagccgcaggcaccagagggtccaagacaagactggaagggcacctcgggttcgggaggagctgtgagtggctgagccagctccttgaggatgtggccacttgacttgtggaaggccatcttgatgccaggacgcacaggaagcccctgtgtgacatcaggagcagaacagcaagctctctgtccctgcacccccaccatcttggggacctacaagggcctggactcagaggacagtgcacaggctagcctggagctcaccaggcctggggagctgggacggggccccgctgccggacctgcagccctggacagatggggaacactgtgcctccctgaacggaaatggcaggggaggaggctgatgctttaaatgaagaggatggtggggttgggaggtataaccctgctcctctctcccagtctgtgcaataaaggtcgtgaagatctctc

SEQ ID NO: 195 - DNA, 3997 bp, Homo sapiens
attccgcattcctagcctggcggcgcgcgcggctccttaatgagactcgggccaagggccgacctcgcgattccgctcgcccctattttatgtttgatttttccttcccaacgccggctagcgctgggacccgaatggggccggccagctgcggcgggaggagcctccacctccctcagctgcgtttctccagggtagacgccaccgcagtcactgatgtcccttttcaaaggatgcacgctccccaccgggcgccggaggtgttttgcagccgctcttccagaggcgcgggtagggggcaccctacccccacccccagagttcgctgggcactggctgggaatcagcctcgctgctgtgcccagctcctctcgggccgccggggctctggggctcagcttcgtgcgggatgggtccggggcccagctgtgggaaacctatttattctgttgctggggaaggaagacggagaagaggaggggacagtgctttcctacagtagtatggtgcatatctccaacatcacaggcattgtaggtacaacagtgagcaagacaaaaccagctcttgtcctcatggaactaactttctagaggggaaggcagacactaagcttctaattgcttgcaattgtggtgtgatttggcatcatgcacttcgctcatcttatggagaagactgaggcctgtggttggaaagggcgagggagcagcctgctatctttagagaacacagtttcagcctcaagttcttcctgtacctccgatatggatctacccttcctggattgaagccttgtgccaagtccatgggcctgatgatcctctgactctccaaatgccagattttcctcctccttgcctcagggaagtgaagggcagccgatagcccacctggagaataaaatatgactacaacctgcagtgctccatggacctgtcattctcagcagtgtaaatcctactgctcagagagaaggcagttggcacaaggtagacagccagttgtttcagctattccaatcctgcatgtcatttacctggaaaggggttctatacattccctctgcctttcctactaccccagcagactgccctcggtctcacctgttagtcctagttacggattcccaaacagcaatgccactggagcttagataaggggaagtcagaggagccaccccaactggagcccgggctggagagaggacctggcatgtgtgtactcttctatcccagatgagcaccttatcaacttaaggtggtagtgtctctgctgtttccattctgtttgtgtcttctggacagaggattggcaatggttggaggttatctcagtcaccagttcccaggtgatgcctggaagaaccctgtcctcctgccaagaagccaggcagcaagtggggttctgtcccaggccccggtgccctacatggatgcttatcaaggacccatacataaactggcacccacttcctcccatgcctgacctgccctcatgataggccaggtgacatctgtccttcagcatgcctctgtttttcagaatgtctaccatcaggagacaatcagatgagccaatgtggagcatcatgaagacacgttcctgggatcatcctggaatccgactctgtctcagctcaagggggttccgagatttcctaagctagccctctcattttacagctgcaaaaacggaggcctgttaattcagtcattttatgaaatcctttgaaatttttattgagctctaattgtgtgtgaagtattatggaatgcttctgtactggaatgcataggttgaacaagacagaaaggcccagatggcagaagttcaagagctttcaccaacccatatagagaacctagtaatattaatgactaatgttaatgaatccatgctttttacgtgccagtcactgtgcccagcattttgcatgcattatctgagtcctcactacaacgctgttacgtaggtactgttattataaccattttccagatgagaaaactgaggctcagtgaaggcaagtttcttgcctagggtcatagagctataaagtagcagagtcacagctcaaaagcacatatatgtgattccaaagctcagatatgtaacccatttagccactttcactgtgatatgcaagggcccaggatttcatatatagcaaagctatcatttctgggtggacatgtttaggggcagtggggtaccaggcataaataggctgttcaacacggggagggcagtgtgtgaaggaggccagcacaggggctctgggaacacaggcacctctgatgagaaagtagtgttctttctgcagtactgttctgagtagctcagcctcttgttccccttccccagcacccagattcacacctacatgctgttagacattcaccccatttagtacacagttatgcatacacgtggctattgtagcaattgtcgaactttcaccctgcagctgggctgctttgccttcccctgtaggctgagctcccagctcagattccagcaccaatagctatttgtgggacaggagaatgtcagcagtgaagggcagcatgatggccagcatgtggctttcccaagcagagacctgggttccagtcctagaaggcaaggcaactgtattagtttgctcatgctgctgtgacaaaatactacagaccaaatggcttaaacgacagaagtttttttttctcaccgttctggaggctggagtccaagatcagcgtgctggcagggttggtttccccttaggactctttccttagctagaagatggacaccttcttgctatgttttcacatacggtcatttttctgtgttcatgaatcatggtttatcttcctcttcttataaggacgctagtcatattggatttgggccccatgaaaatggttcattttaacttactcacctctttaaagacgttagctccaaagattgttgtatgctgagttacttggggttggaacttcaacgtatgaattttggaggtagaagatatatttgagagtaaaaaggggttctgttaacccatttatgcctgaggttgcaattttttgaagttttgcaatcagatcttggcaatgacctggagcggtaggatataaataattcccacatgcttagcattccaataatggaacactaggcataaatgggctaaaaattactttggagcagccgtcttaaatggaccatttagggcaaactggaacatatggacaccctaacattctggccccatcactcactctacagccatcttcttttaaaccactgcacctctctgagtctcagtttcttcatctgttgaatggagataatcatatcaactcccccaagcaggcacttttaaaatactagtaaatgcatactgattacctgacagtactgagcaccactgcatgctctgtaaaggttaaccattgctattattgaaaccaaactgctcactgaggtctgtgggcctatgtgatttgacccctagctgcttttccaaattcatttcttcccccttcccccttctcccttctattttattacactggcaccacaaaggccgcccagcagtcatatatcaagcacattcctgcctcagggcctttgtacctgttgttccctccacctggaatgttttcccctaaccccttgctcctttacttcattcaggtttttgcccaactgccacttcctcagagataccttccgagatatatgatgagctgatataaaataatgcaactattgttctacctccattgctttattcttttatgctactttaattggattcatagcagttggtattttattttagaattgcctgtgtatctatctgtctcttctgatagaatgtaagctccccaagggccaagattctgtatgaaccattcaccaacgtatccccagtgcccagaatggtgcctggcatatgtgcttaacaaaataaactgactggattatttatccatattcactt

SEQ ID NO: 196 - DNA, 3101 bp, Homo sapiens
gcacagcgcacccgcccggcttggaggtcagccacggagggcgtgtgagggccccaggagcgagggtacagaggagaggacgcccgggttttagggggagcgcggagactaaattcctgctgagtaaagcgggggtttccgacagactgccctgcgggtttctggagcgggttcaggcccccagccatgcgccctgggccagggttcgagggtccggggtcttgggatttgggagttgcggggcttaggagtccagagggtctaggggatccgggagtctgggggtcctgggtcgcggcgagccccgcaaaggaggaggaagccgcgcgtgcggggcgtgcccagcctctgggtgtggagcagatgacgcccctaccccggcctcgcgcgtgggacttgatcccgggccgtggtgaggaggccctcgcggcttccctgcagccctgctttctcgtgcttgttaaatcccaaaacgggcggagaagggaaagcctgatctaaggcaaaagaggtgcagctggttccgcgcagtgccttaggagagcccagggaacagttgcgagagacagtcctgtggggtccaactgaggagaaggttgatgaggatggagcctttactgcttttatgtttgtgaatagagtggccgctccctttgggaacccagggccacatcccttaaattaaacgttaggtagggctgactcagtcaagcagtgttcagagctgctgactatatattaactcgtttaatttctgcaacagcctcatgaagtgcatggggaaacaaaggcacacaaggctcgaaagcaccccgtggttgtgcagctgacaagctaacaggcagcagaggtgggctttgaacccaggcagcctggctccagcaaacctgcttctaaccattagctatactgcttctcacgcatctgggatgccccccactctccaatccttttaaacaagtcctattattcttacgcgaaaatacctctcataaattcccagcattccaatattgaaaatcattctgggtcatgcttttctcatctattaactatgcttccatttttgtgtcacaaggcggataagcatacctcctacatctttgtggcacttctaaaggaagcttctagggtaattaggatttgctggctatgatcatttgctaaaccacaggacagttctggccaccatttccgagatagcaaagctatgctcatacttattgccctttcttttaggttcttgtatgtttcctcaacctctcccactttctctcactctgatatagccagttcctctttttcttgtaatccggtatttagataagtccagtcaatactttgcttcagatgggcaaacatcctttctttaattttttttttttttgagacggaatctcactctgtcgcgcaggctggagcgcagtggcgccatctcagctcactgcaacctcagcctccagggttcaagccattctcctgcctcagcctcccaagtagctgggattacaggcacctgccaccactcccggctaatattttgtatttttagtagagacagggttttaccatattagccaggctggtctcaaaccctgacctcaagtgatccacccaccttggcctcccaaagtgctgagattacaggcatgagccacctgcttttaacttgttcagctacaaaggcatgtctgtgaatgcacaaccataatgactcatcatgggcccagagctataacaatgataaggtaccaagcatcttacaccatgtgcgtgttgatgagaatcaacatccttgcctgttcttgtgattttgtggcagagtatagcttcttgggggcaagtatgtattctacaccactaggagcaagcttctttatcatacacttctgggcttctctggggaagccaaactctaaaggccttttctgaggagtgtcgcaaatgctgcctgcagtacgaggcacattgccagttcctgactgcattagcaggttccagctgccaggacgcctctgagtgtgtaccttgtgacagaaaggtacttctcagctgtagtaaaggatgctctcaagggtactctgcaaagcttctgactgcgaggcacttctcagtaaaaagctttgtttttcagacctttttattttgtgggcttggtcttttctgttttaccttctcgttgctgtaattctgatggatgaaaggtacattttgcagaactgaacttcctgcctgaaaggagcctttacatggggattagccatcagtaggcatccggtcttagagggtcctatgagtgctccattgggcccgtcggccacttccctggatccccacaggaactcattcagaacgagtcacatgctgctttgtacctagatgcttccttgtgtacatcttgtttccaaaagaagtagccagctcttcgtggacaggaactgtgtcttacttttttgccatccctcacctcaggcagcactgccaagagcattcacagtgactgtggaactccgttgattgaatgttggcttgagtaagttcctgatgtaggggctgtagcggttggaatcaggcttctgcaatactcaagtagtcctactgaattacagtactgtcagaccccctctgcacaaccctgaagtgggtcagaactccacactgtgccataaagaggaaagctgtcaacagggaggtctaaggaaacacctccttaggtggaaggcagcaatggcatgagagccaccctccgggccaaaggtgcagcctgacattctctgcagaattacacagtgagttaagactgtgagcttcatttctgagatacagctccacccgctgtgatcctgggaaaatgtctcagcttccccaagcctctgtttcttcactctttgctcacttactatctaccaggcatgttaaaaatactttatgtgaattattttagcttttcactaaccctattctacaggcattaataagtgagcaaagagattgtgtattattaattatgcattatgtattatctatgttcttattagctgcttagttacaataatatttgctaaacttttgttctattcattaaattatcgttgaacctt

SEQ ID NO: 197 - DNA, 3999 bp, Homo sapiens
gatgctgccggcccgaggctgagccaccctccccgcggagttcccgcccggccctctgcaacccggagcccaagccgccggctacgcgccctgcgcccccttggtgccgcgtccagtgcccagcgcgctttgatgctgcagctccgggccgggccgctctgcttctctgctcgctgggacgctctccgacggctccgccctcgcctctcgccccgagtccctgctgaccccggggaggtggggtccgggccgggcacagccccgctgaggcaggatgttcacgtccaagtccaactcggtgtcgccctcgccgtccctggagcaggctgactcggacgccctggatatcagcaccaaagtgcagctctacggcgtgctgtggaagaggcctttcggcaggccgtcggccaagtggtcccggcggtttttcatcatcaaagagagctttctgctttactactctgagagcgaaaaaaagagctttgaaaccaataaatacttcaatatacatcctaaggtgaggcggcccctcccagggccacagcaggggagggcccagtgcgggcatcagagcttgcatcttgtgaggggaggggactgcgctcttgctctggcctagcagagagtctggagagcaaatcctcttggggcaaaagaccccctgcccctgtcctgggctggaccctcactctcctgtgccccagaccctgccccaacccttcctcttctttctgaacatcagttctggcctctgtcccatggccccagggtctagcttccatcctggggcacttggcaggaactggctttgtccaggggcccccagaacccctgagtgaccccagttgggtggggtgggggctgcctgttctggttcttcctcagggcgtcatccctctggggggctgcctggtggagcccaaggaagagcctagcatgccctatgccatgaagatctcccaccaggacttccatgtgagtaaagctcttccctcagcctgggctccgcaggagcagaccagcctctcaggcctcttcaggacacacatcccatgtcctggcctgggagaggggcatcagcacccagggatgtggggtgggtgacagggcagagctgggcctccatcaccctcagcgtggctgcctctcaggcatgcgcatggctcctcttcctggcaggggaacatcttgcttgctgctgagtcggagtttgagcagacccagtggctggagatgctgcaggagtctgggaaggtgtaagtgctcacagccaggagggcagcctgcagatccaggatggggtgggcggggctgcccctgaactccctgcctctctgctgggatcctggtgggcacagggccagggctgtgggagatggctagggtaggggagagcagacaggccaggttttagagcatctgtgaggggtcccctgagtgagcttgaaaagtgtctaggtcacaggtggcaggtgtgggtaccatttgtctccaactcttgggagttgtatttgatgcctcctgacacccatctcacctccccaggcccataattaattctagcaaggactagagctagtgctttgtaaattagggtcaagatcacagaaatctcctgccaacccagtccatttttatgtaaaccactgtcctgacacctgcctagtcaggctaggtcatgcttttagttccaaaaacaccgaccgtgtgctctgtggcaggccttgcactgggtagcggacattcagtaatgtaaaaaagccacccaggaagcaatctcctccctgctctaaaagtgctgttggcccagcccccagtggcccactttgcagcctgggccagcctccagctactgtaactgatccgtgctggtgacatgcccagagccatgggtgccagagtgaatgcaagttgagattctggaggagaaagggtgggcgagtacaaaacgtatgccttctctttcccctctacccttctgttttaatgattttctgtttcttcctcttctctcctctgtcccatctgccctccctccccaggacctggaagaatgcccagctgggagaagccatgatcaaaagcctggaggcccaggggctgcagttggctaaggaaaagcaggagtatttaggttggctggaggggtggttccctaatggtagcagcacttggggaccaggggctatagccaggggcttggtaaaggatgcagcagggatgagggtctctcaggtggggctatgagggaacagagaccagtttggcacctggagggcttcctggtacactacgcatccttttggccaacatgactgaaggcaggagcgtctgatggttaagagcctgggctctggatccagcttcatcatttgtcacccatctcagctgtgtatatctttaggcagctcagcctctctaagcctcaatttcctcatccttaaaatcgagttaaaaatagtctctagcttttagaggattgggttaaatgagacaatgtctgtaagtgcttgagccagacatgcagtaagggctccataagtggagttgatgttgttatcctatcctgggtccccagggtctggcttgtccccagtacccttgccccaggccattttaaaccttgccacagcattccagaccttgtgcccctgacaggttggtaaacatgcactgtttgggagagaagatgagactgagggtttgccttcagcctgggaccctctcccctctgcctgcttagacacttggggccccagcacttgctcccctatgcctgcttcagaacttcctaggttctgccctccttactagccagacattagtgcaggtggaaggtgggtgtgggactagcccaggtgcagcaggcctgggggatgcagagactgctttgaacttccaaggatgaggcccctcataaccctaggaaaagaaaaagcaggatgatgatgggggaaggagggtggcagcttccatcaccaggagctggcccaccctctggctggcagggctgcaggccccttccttgggagatgctgggggtgacagcgaccacctcaggcaccagctccctcaggacctcagagcactttcctgattgtgtgtgcatgtgtgtgtgtgtgcttgttttggcagacaaactgatggaagagaccgaagaactctgccttcagagggagcagagagaggtaggtgcacaccaaggggctctcagcagccgtggtgtaatggctcacgtttctagcactagggaatgatgcaggggagctgggtgcacagaggacttgctagaagatcagatggggcagggcggggaggccaaatgggatcacagtgcttgcttgggacttgctgtaacttgttggtaagaagtgtctttctccttaccaatccctgggagtaaagtgaaaagggtgggtgatgaccttctagagaaagagccatccaaagtgtcatcagctgcatcagttggtaatgagctgcttgtcaatgatgttcacgggagctataatgccctctgttatccatagagggctatctggcacctgagggtgattgggcttgatgatctcagaagttccttcattctctgaatgtcaaaagtccacagcaggctaagcactggcttgaggcagactggagggtaaaggagactcttgccttgtgtgaaggaggggagccaccgaagccctcttcttcatttagaatctcagtgcaggctgggcgcagtggctcacgcctgtaatcccagcactgtgggaggccaaggcgggtggatcacctgaggtcgggaattcaagaccagcctggccaacatggtgaaaccccgtctctactaaaaatacaaaaataagccgggcgtggtagcgggcgcctgtagtcccagctactcgggaggctgaggcaggagaatggcgtgaacccgggaggcggagcttgcagtgagccgagatcgcgccactgcactccagcctgggcgacagagcgagactccgtctc

SEQ ID NO: 198 - DNA, 5213 bp, Homo sapiens
attcaaagtctttctgttcttgggggatgctgtgggcagaggggataaattgcagcccctggccctcccgtggcatctgctgactgggggacccacatcgtggcctgaaaaactcctggagcgccctctggcctcctgtcgctggtcactggccagtgtcctcccaggctgccccggcaagggggcgtggacatctctagaatggaggcagggtactcatgtccagacacgccgccatggggctccgccccgagagcgcagggtgcctctgcctggcgcttcccctcccagacagggccctctctttccagaaacaaaagaaggggcagccccagagggtggctgagcgacaacagagcccacctggacagggtcagcttggcgttccccccagtcccttgaggagaggagctaccagagcactggtcacctcaggacattctccagccccaagtccctgtggggcagcaggaacaggtgggtccctcctgcgggctggtggcactgctaaggaagcaccagacagccttttttttttttttgagacagagtcgctctgtcacccaggctggagtgcggtggcgtgatcttggctcactgcagcctcctcctcccgggttcaagcgatcttgtgcctcggcctcccgagtagctgggattgcaggcgcgcgccaccgtgcttggctgatttttgtatttttggtagagacgggggtttcaccatgttggccgggctggtctccaactcatgacctcgtgatctgcccacctcggcctcccaaagtgctgggattacaggtgtgagccagcttgcccagcttatgtttatagatttattttagagacagggttgggctctattgcccaggccagagctggagtgcagtggtgcaatcatagctctctgcaggctccggcttctgggcgcaagcaatcctcccacctcagtctcccaagtagctacacttgggagactacgggcgcacactaccatgcccagctaatgttttttttgtagagatgggatcttgctatgttgcccagtctggtcttggacttctggcctcaggcgaccctcctgccttggcctcccaaagtgctgggattacaggtgcgagccaccatgcctggcccattctgttttttgtcggccactgaggtagaggccctcttctaggaaagaatttctgtttgttttgttttgttttgttttgtttttttgaaacagtctctctctgtctcccaggctggagtgcggtggcgtggtctcggctcgctgcagcctccgcttcccgggttcgagcgattcttcttccaagctgggactacaggcatgcaccaccaccatgccctgctaatttttgttgttgtcgttggtttttgagatagagtttcgctcttgttgcccaggctggagtgcggtggcacgatctcggctcaccgcaacctccgcctcccaggttcaagcaattatcttgcctcagcctcccaagtggctgggattgcaggcatgcgccaccacacctggcttatttttgtatttttagtagagatggggtttctccatgttggccaggctggtctcgaactcccgacctcggatgatccgcctgcctcagcctcccaaagtgctggggttacgggtgtgagccaccacacccagcctttctttttgcatttttaatagagactgaatttcatcacactggccaggctggtttcgaactcctggcctcaagtgatccgctggcctcagcctcctaaagtgctggattacaggcatgagccaccgtgccaggccttgttaatatttttaactctggcacttcaccctagaggctgctaggaatcaggtgtgccaagcaactggcaccactccatggaaagcgtctagggcagtgccttggttctgccaatcctgagaagccaggctgccccttgggctgggcagtggcctcagtaccgagccccaggccagcaagcccacaagcctcgagaaagactgcacttccggtggaggctgcagtttccttaaagggaaaatctgccccacccctgtcaagggcaggacacaagtcactggcattgaaggacccactccacacccagcagatcatcgacgcagactttttttttcccagatagagtctcactctgtcgtccaggctggactgcaatggtgtgatcttggctcactgtaacctccgcctcccgggctcaagtgattctcctgcctcagcctcctgagtagctgggattacaggcgcccaccatcacgcctggctaatttttgtatttttagtagagacggggttttgccatgttggccaggctggtcttgaactcctgacctcaagtgatcctcctgcctcggcctcccaaagtgctgggattataggcgtgagccacctcgtccggcccaagactttttgcctcagatgctgcagagccctggtggggcccaggagggcaaggcccacacaggagccgaaacccatgtagaacctgccaacctgtggctcacacctgtaatcccggcactttgggaggctgaggtgggcggatcgcttgagccagggagttcgagaccagcctgggcaacattacgagaccctgtctctacagaaatacaaagattacccgggcttggtggctcgtgcctgtggtcccagctactggggaggctgaggtgggagaatcatctgagcccagggaggttgagactgcggtgagccgggattgtgccgctgcactccagcctgggtaaaatgagtgagaccacgtctcaacccctttcacagcccgtctgcggcccacccacccatgggtactgtgggatgggggacaggctggcttaacacaaatcgaggcaggaataaccccagagaatgggctttgcatggagcttggctcctgtccctgcctgtgagggaggaccagactcggcctcaccacctgccactctgagcaaacaggcaacggtgtttcctgaacatctttctgaagcggctgagggatgtcagctgagcccccgctgggcctgctctggagcgggatgtctccagaagccgcccttggagcgggcacttccctatttgggcgtgtcccagtcccatgcctcaccatccccttgcttgaagctccaagagcatgagagtgggcagcctggtctgctgaggaaagtgtctgatggatgcggaaatggccaccccaaacaccggtaagcagatgttaccctgcaggcggtggctcctggggcccagccctgcagaaacacatggggcaggctgggcagaggggctcacacccgttattcccagcgctttgggaggctgaggcgggaggatcgcttgagcccaggagtttgagaccagcctgggcaacatggcaggactctatctccactaaaaatcaaaacaaaacaattagctgggtatggtggcgcacgcctgtggttccagctgctggggaggctgagggggaggatcgcttgagcccaggagttcagggctgcagtgagccatgattgcgccactgcactccagcctgggcaacagagcaagaccctgccccgccgcctgaaagaaagaaaaaagaaagagaaaggaagagaaagaaaggaaaagaaaaaggaaacatacgaggctatggggccgtgtacgggggccaggctgtggcagaagcatcctggcgtggccttctccagccccatcctggttgggtaaggtgtcgccgtgggtcttcgtgtcacagcttcaaggacagacccaactctggtatcacaaacttaacaggtaatggagtttcctaaagtgtgctctgcaggagtgctggaagggccagcatggaaggaccccagggagggagatttctttgctccacagcatccccaagcctcacgaggcctctcccctccaagtctctatgtgcatcgttctccagatgttggagcatcctgcaggggccagcccagcctgtcaggggcagagaccctgcactggccccctcgagagtggacccctgggctggcttatctgctccagtgcagtgaggatcagctggagctccgacctgactcacatctggatgcgcagtgaggggcccgttggggccgtgatactgggaggaagccgggctctgtgctcttgctccaagtgagttgaccagggagccgaagttaaggtggcctgggagccacgtcctcccacctagcggctgggctctcacagccactagaaacccatcagcctttcccctgggtctatgcggggctcttcagccctcctgggagctcagtggctgggatgctgctttacagacagtgcacggctctgccatctgacagctcccagagggttctgggggtgactgtaaagagtggtgctggccccgaacctttcctgttcccctggatttagttcccagcaggtggtgaggaactgaacattttgtcccatagtggtgggagagagggctggccacatgggtccaggccaccccctcagcctccacagcctgccccgcacccagccacaggaacagcagagcagctcccccatccaggtaagcgcccccaccacagccccatcacaaaggaatagcctcctggtgtagtgggaggtgaggagctttttttgttttccttttatttattttagggacagggtcttgctctgttgccaagttgagtgcagtggtatgatcatgagctcactgcagccttgacatggtggtaaagccatcctcccgcctcagcctttcgagtggctgggactacaggtgtgtgccaccatgcccagacgcccagctaatgtttgtattttttgtggagatgggggtctcactatgttgcccaggctggcctcaagcaatcctcccacctgagccccgcagggtgctcggattacaggtgtgagtcaccgcgcctggccgggagctttaatttttcctacttgttaacagcgttatggggctggaaggaggctctcagatttccctgccctcctcacatcccccaaccctccctgggcgtgggggtgtcaagcatgagtcaggctgagcctgactctgaagctgttcccagctctttagtctaaacttcaaatcttcaaccctgttccctaatccaacacattccccaaatgaagggactggacagtgagatatcgggaaaccccatgaaaatagatgcataataaaggtgaaaatcattt

SEQ ID NO: 199 - DNA, 4215 bp, Homo sapiens
ttctacgaccaggggcgccggggcagcagcgaccccacagtgcagcgctccgtgtttgcatcggtggacaaggtgccaggcttcgccgtggcccagtgcataaaccagcacagctccccgtccctgtcctcacagtcgccaccctccgccagcgggagccccagcggcagcgggagcaccagccactgcgactctggaggcaccagctcgtcctccaccccctccacagcccagagtccagcagtcaggagtggcaggaaaggacgccgacgagtgttcagcctgtcggaggccgacagtcatggcggccactgggtttagtgctccgaacggcagctgccacggcacctcacgcacagtcaattcagatgcccccatgagtccagaactgcctaagcctcaccttcctgaccagttggtaatcgtcaacgaaacggaagcagactctaagcccagcaagaacgtggccaggagcgcagccgtggagacagccagcctgtcccccagcctcgtccctgcccggcagcccaccatttccctgctctgcgaggacacggctgacacgctgagcgtcgaatcgctgacccttgtccccccagttgacccccacagcctccgcagcctcaccggcatgcccccgctgtccacgccggctgccgcctgcacagagcccgtgggcgaagaggctgcatgtgctgagcctgtgggcaccgctgaggactgagtcagtgccggggcctccctttgtgtgtgtggccccgctggtagggaccccagtgccgctgactggcaagacacactgggagcacccaccattctgtgcggcccccagcagccatctcaaccacctatccctgcgctcccttgaatgggaagaagccccacgttgtccttgaattcctttttcactttgcatctcttcacgtgcaggctgggaccagcggagacaccgcggcgaatgcagatgactgcaccggccactcagggagctgcctgggctccgtgtctctgagccccgggtggcaggacccaccggcacctctttcttcctctgtcatatggctcctctgtcaccagccccagtgtgcacagaagaattggaccaggtcactgtacgtagaaatttgtagaaaagcagacttagataaacatctcctttggatatttatttccgcttttggcagcaggtgaacatttatttttaaaacttctatttaaaagaagtccaaaaacatcaacactaaggtttgatgtcatgtgaaaagtgtaataataacagttaagatttcatgatcattttcactggacctttcctgatattttgtttcagagttcttagtgtggctttttccatttatttaagtgattctttgttactcactaactctgcaagcctgtggaataatgaagtaccttcctggaaagtttggattattttttaaacaaaaacaagggagatacatgtattctcaggtacacacagagctgagagggctgaatggttttctgctatagcagccgagaggcctcccatcatggaaagatttctccaggaaaaggaggaatgtagccagctccccactcaggacgcttcctcatttctcttcaccaaaaccaaacagagacagcttccagcaccttcttcagtgttaccatctctaagaaggaaccagttgggaccgtgaagactcccgaccctgtggccatgatggaaatcaaaggaagacaccctctacgtcacctgccctcgactgtgtgtgcccacatgtgccgagagatggcccagagccagttcccctccagctgcaagggcatggtgtccccagagctctgagtctgtcactctccctctgctactgctgctgatctgaatatggaaaccccatggttcccttccccattcggactgggtgtgtacaagcaaggacccagatgcatcagacacagcccccaagatgttcctttctactcggccagctcgggagccagacacagcactcacagcccaggccgtgatccaccctccccaagtccaccagggccagcggcccctcacctctctggtcactggtgagaccttccacaactttcctccagacctgccagcagatgtgcccaccaggggcattaggtatccgccggagcctggccatagggtagtctcgggagccgcgctgagatcttttgccacctgcattttagaagaacatggtctctgtctcctcggcccagccagctgtcccggcaaggcctgccgagggcagttttcaacctcatgaaggaaacacagtcctgccaaggagggggagtggcgcccatggggacaggcctcagtccttagaagccctctgggtagctgtgcccacccagccttcatggctgcaggtacaaggacctttgcttccatagagaaaacgcacagctcagaaagggggccacatgggcagaaacccaaaggaaggacaaaccacgaccaccgtggccatctgcagaatccctggaagagaaggaaggcagggtggagcggggggaagaccatcatggagagaaggaccacagcatcaggagacgggacacgccacacccagcaggcagcctgtgtgttgcttaattttttaagagcaagaggggtagagaggatcaagctggccctggctggagatggctagcccctgagacatgcacttctggttttgaaatgactctgtctgtggggcagcagaaactagagaaggcaagtggctgccccaccccaaggcgtgaccaggaggaacagcctgcagctcactccatgccacacgggtgggccaccagcctgctgtcagaagtctctgggctccaactggtcttgtaaccactgagcactgaaggagagaggtcttggtcagggctggacagcatgcccgggaggaccagcagaggattaaaggtgactgggaggaccagcggaggataaaagacactgctcagggcagggcttctaccctgcatccctggccaagaaaagggcagtccccatgtgggcttgcagggtcactctcaggggcctctttcagctggggctggcaacttgcgtctgggggacacctccaggtgtgtggggtgaggatttcctataaccagggctcccagaagctttgcttatgtaaggaggtctgggagccagcccattggaggccaccagccattttggcttcaaaggaccccacctcacccaggtctcagcggcagtgggcacagctatgtcttcaggagctcccgtcaaacctcatagctggggcgctcccagacaggccagtccagacaggacacgctgggcccctggcatccagaggaagagccaggagtgtgggaaggcccacagtgggggctgtggcttctgacactcaggtcatagcctcagaggtctgaggtcagcccccacagacccatccggcccgccccccaagtccctgcagagagcacttagagttatggcccaggccctggtccacccttcccctgtgcacctccggctgggtttgccaagtcagggagcagggctggccgcaggaactcccaaaccttggctttgaatattgttgtggaggtgtgctcgtccctttctggacgtgcaaggtacctgtcccagcaggtcagatggggccagctgaggcgctcccccaggcaggaagggccagccttcaccatcgcgtgggattgggaggaggggcctccgtgagcagcccctcctctgccgctgtcccagcccagtccctctcccggagccttggcagcctcccacaacccagacacttgcgttcacaagcaacctaaggggcaggtgaagaagcgcagccctgccagacgcgctagattcctctaaggtctctgagatgcaccgttttttaaaaaggcgtggggtgaactgattttgatcttcttgtctagatgcaataaataaatctgaagcatttaatgtagtcatcttgacattgggcctacactgtacgagttccttatgtttccttgagctaaaaatatgtaaataatttttgtcccagtgagaaccgagggttagaaaacctcgatgcctctgagcctcgggaccgctctagggaagtacctgctttcgccagcatgactcatgcttcgtgggtactgaacacgagggtggaaatgaaaactggaacttccttgtaaatttaaacttggcaataaaagagaaaaaaagtt

SEQ ID NO: 200 - DNA, 3851 bp, Homo sapiens
cttaaaagatggaactaaatgtaattcccaaaaaaagtcccccaaaaagtgtgtcttggcagccttactggaaagcatgtattccaagggatctatgcagggtaaaactcatttgcaagtatctgttctttttatttttaatcgatttttctaatcatgctcatcattgtactcagctttcatttatttatgttctttctgtacaactagattacgaaattgtgaggaaggagactgtatcttctttttcttttcttttctttttttttttttttttgagacagggtctcgctctgtcacccaggctggagtgcagtggtgggattacagctcactgcagcctcgacctccttggctcaaccaattctcccatcttagcctccccaggagccggactacaggcatacaccaccacggctggctaatttttgttatttctttgtatagatgggatctcaccatgttgcccaggctgttcttaaactcctgggctcaagcaatccgcctgcctcagcctcccaaagtgcgtagcctggactgtatcttttatgtctctcattcctttttacaacttggcgacttgtacataataagtacaaaataagtatgttttcattagactggcaaaaattggggaaactttctatccaagcagaatgaagagggtgattccagccatgcagatgagctgaggtccaaggctgaagagagggtgcaatgctggagtaacgtgaggaacactcggcctacttggctagagcatctcacgggggcagaggttacttagtgggatcatgggagatagattagaaagggatgttttatggcagattagatgctaatcctctatgctagtggtttcaatttttattatcattaagattttcccctgctccctcttccctgcctcaaaattccccaaaccatatataggaacaccatttgtaaagcagataaaagcaaaagggctctggttaaagtcatgggggagggacccgggtatgacttcctccatgtggttccccatacacacaagccagggacctctgaggaatcctggggctcttccaaagcaatttgaaccactggtgtggacgctgggaaacactggatggcaagttccttttgtctgtctgtccacatgtagcccctggcttcctgacagtcctccatcagtatctggttctcacagtgtcacatctcaactctcccgggagtgttttggagccaccgtccctgtggcaggctctacacatagccattcctctttcttctttgctaatagaatccaactttagttagggcagccaagtactcagtgacgtggtgactgacctaaggcaaggattggccaaacccagcagctaactcttttggtaaataaagttttgttggaacccagacatgttcatttgcttccttagcacctgtggctacttttgtgctatagcagcagggttgggtggtagtgagagagactgtatggcctcctaaattctttgctatctggccctttgcagaaaaagtttgaagacccctggtctaaggcaaccatggcaatccattctcctttgctgagattgggggtagtcatataaccatttttgaccaaggaaaggtaaggtaaattctgatggaagcgtctgagaaatatttccctccctgataagagagaggaacacgaggagaacgttctttttgtctcctctcttccattctgtcatatgaggatgtgctgtctggagctgtggcagccatctgatgatcatgagggataatacatgagagcctgattccttgatggcatcattcagttaccaaatctacctttggaccatctactttcaaactgtttgttgagtaaacgataaaaatcctgatggtttaagcaattcttcactgggtttttgttagttgcagctgaatgtggaataactagggcatttgtttaaaaacctaatagcaaaagacaagagtgttcttgttcaagttgtgtcacggaatgaaacataggaaatctagtagataataatgatgatgatgaaagctagcatgccagtcactaaaccaagtactctacaatccttttatgatcacaaaacccaatggagacactattgtcattatctccattttacagatggggaaagtgagctttagagaagtttaacaattcgctcagttccacagttaagcaccagagctcaagttcgcacccacgtgtgttgacttcaaaagccaagcgcctatctgttgtttgacactgccatttctgacaacagatccgaattcaaatctcaactcagccacatggaaggcaagttacttaatcttcttaagccccaattttcccacaataatgtggagatattaccttcctttaagacaaaatgctgccactaccgtgactgaaacatggtgtttcattgttttttgcttctgtgcttgtttctttagcagggactggatggctggaagttggctataggagtaaccaagaggtgcaaaagaaagtagcaagggaagtgaaaatagactccagtgagcagagaaaggcataccagctcctgataaattaaaggaggctgccgccggtcctggagcggggttcaatgagaagaacgcatggtacggagagagccacgaggctcactcctcacgagtatgcattgtgtttgaccaagaacttggtgactttatggtcaggtgtggcctgagagcactttctagtccattgtcctgtttcaaggagctttgaaaaattgtaaggaactgaacagaaaggaattgcttgagttgttggtatgattcacttttgtgtaaaactgagccactgtgcagaagtgagtgtttttcaaagtgaggtcacggatgcctatgaacatttcgcatgtcggtattttcctcgctgtggtaaggccctttactcatgatgaatggaaatctgaagactcgtaggaagggtcagagattacctttgtggctgttagctctatttgagcagtttcctctctgagcattcctgtacagtttttaatggaggagaataatcaagaccagcccgctcaaagagcttatgaaaaatagatgaaatttagagtttaaaatccagatttaattgttaggcttacttttaaaagagagcaagaaaaacgaccccaatggcttattatataacatccagatgttcggcatcagccagaccagatgagggatgactttttcacttttcatctggatgctttggcctctctatagacacagcgaaagagggcggttatataagaagcttgctggagtggccttgtcctcattctcaacttgcccttcaggagacccataaacattcagctgcatttttaagcttagatgcgatagattcttaatgaatgcattccttagacctagcgtgggcttgagaagcttctggaaatcattcgatctgatcattggctccaagtagacaaagtactgaatgagagaaattttcccttctcattcaaatgtttgaggctcaggtagacctagactggctttatcgtaaaggagctaatataacatatctaacatatcattaaaatatgtttgtgggcttttaaaaagtgacagctgctcttcagagtgatagacaggtgtccacatttcagctttctttgtttgtcactgtgtgtgtttgttcttaccagtaatgcctgggaagggcggcaaacactgttgtgcttggatacgaaaaccaaggcctgattagcgtaagcgtttgttgaaaaagcattttctctgcacactaatctctacatatcctgtggggaaatcctttcaatcccgtacctgataaataaatctggcaagtg

SEQ ID NO: 201 - DNA, 4314 bp, Homo sapiens
gtttattgtagtcttcacagtctgggcttctttgtacctgtccttcttgggaaggctttccaagtatttgaggggaattgggcattgtgatctaagtctttggtcactgcagctgtatctgcattagggggcaccctaagcccagtaatgttgtggctcctgcagacttgtagaggttactgccttggtggtcttgggtcagatctgggagaattctctggattaccagggagagactcttgttctcttccctaactttctcccaaacaaatggagtctctttctctctgtgctgagctgcttggagccaggaggagtgacacagcacccctgtggccattaatactgggactggcctgggtcaggtctgaagccagcacagcactgggtcttgcccaaggtccacatggtgaccacttgcctgtctaccacctatgtttactcaaagcccaagggcactacaatcagcaggtggcaaatccagccaggcttatgtccttccttttagggcagccagttaccctagctctgggcagatccagagacgctatcagggcctggcgttgagaaccttaggaatcttcctgtcattctattctacagcagctgagctcacacccaaaccaaaaggcaaactccttctcattcttctctcccgtttcctcaagcagaggaatctctccccatggccaccgctgccccaggcctgcagcaagtactgcaaggctgttgctgatattcactcaaggtccaagggctctttggtcagcttgtggtcaatgctgataggcctgggtatctcccttcagggcaacgggctcccctctggcccagagtgcgtccagaaataccatccaggagccaaggcctagaatcagggacctcaagagcacacttggtgttctaccccactgtggttgagcttgtaccctgcctgtaagacagagtcccctttactcttccctctcttttcctcaagcagaaagagtctctccctgtagccaccacagctgggaatatactgggtccctcctgaggccagcatggctctgagtctcacccaatgcccacagtgagtactgcctggctaccactgttgattatacagagcccaagggctctttggtcagcaggtgatgactcctgccaggactggatccttcccttcaaatgtgctggttgcattttggtccaaggtgtgtctagaaatgtcatccataagctaggtcctggaatgggggcctcaggactctggtcccttgttctactctggctgagctggtatccaagttgcaagacaaagtcctttttactcttctgtctcttcctgggctgtgaacaacactgcctggctttgcagtaagggtggcaaaaatgcactccctggccacccagctggtgtctcaataggtcatgtgcacctaagtctactgggctagtggagtggcaataacagacgatataaggtaggagttgcattgtgtctgagaagatgtggagaggactgtgaacctacttttgtgcaacactgaaaagtatatgcttcctttcagttaattgacatgagtctttgaagaatagactcacattctgagtctgtgagtgagtattttgtcattctacacccttacttagcaagctaaagtcctgaaaaatatgattcctgcattttcctgatttccagaataatatagcgtattccttaaaagaaagtggtttcatgaaaggtgttactttcaaaaaattaatcttcttttccttttttaaaaaataggattaaaagagtaaaattaatatctaacaaagggactgaaactgacaatgacccaagttgtgtccatcctatcattaagaggagacaatgtcgaccagagattagaatgtggcaaacaagagagaaagcaaaattttcagatggagaaaagtgccgtagggaggcttttaggcgtttgggtaatggggtgtctgatgacctgtcaagtgaagaagatggtgaagcacggacacagatgatattattgcgtaggagtgtggaaggggcctcaagtgacaatggttgtgaagttaagaatagaaaatcaatactttcaaggcacctaaactctcaggtaaagaaaaccactacaaggtgatgtcatattgtgcgggattcagatagtctggctgaatcagaatttgaatcagcagccttcagccagggctctagatcgggtgtgagtggtggctctcgaagcctcaacatgtcaagaagagactcagaaagcacccgccatgactcggagactgaggacatgttatgggacgacctgctacatggcccagagtgccggtcatctgtcaccagtgacagtgagggggcccatgtgaatacccttcactcagggaccaaacgtgaccccaaagaggatgtttttcagcagaatcatttattctggcttcagaattcaagtccttcctctgatcgagttagtgcaataatctgggaggggaatgagtgcaaaaagatggatatgtctgtgttggaaataagtggcatcatcatgagcagggtcaatgcctatcagcaaggagtaggttatcagatgctgggaaatgttgtcactattggattagcattttttccattcttacatcgacttttccgtgagaagagccttgaccaactaaagtccatttcagctgaggagatcttgactctcttttgtggggcaccacctgttacacctattattgttttgtcgataattaatttttttgaaagattgtgtcttacttggatgttttttttcatgatgtgtgtggcagagagaacatataaacagagatttttatttgcaaaactcttcagccatattacttctgccaggaaagctaggaaatatgaaatacctcatttcagacttaagaaggtggagaatattaaaatatggttatcactgcgttcctatctaaagagacgggggccacagcgttcagttgatgtggttgtatcctcggttttcctactgacactttcgattgctttcatttgttgtgctcaggttctccaaggacataaaactttcctgaatgatgcttataactgggagtttttgatctgggaaacagctttactactttttttattgcgtctggcctcactggggtctaaaaccaataagaaatacagcaatgtttcaatattacttacagaacagattaatttatatcttaagatggaaaaaaagccaaataagaaagaacagcttactctagtaaacaatgtattaaagctgtccaccaagttgttgaaagagctggacacaccatttagactctatggactgacaatgaatcccttaatctacaatatcacaagagtagttatcctttctgctgtctcaggtgttataagtgatcttctaggatttaatataagactgtggaaaattaaatcataagctgagtaaatgcctggactctcccctggctggtatcaaaacttacctatcaaggaaagtgatgactgcagaaaccagtgagatacccacctgcttgttcacatgcacaggtgctctcagctctgccaaagcgaatgaatggtgtttccggaggagcaagtccttttccaactgggtgtgcatgctaaaaacctgtattttcatgcttttcaaacaacatgaatagtcagctgactaaagactgtgtgtgttgtggtaacacaaagacaattttgtaagtttgcgcttcagtactgtgacagttatgtttactggacatagtcttttgggcaactatgatagatgcccaaagcatgaagcaaatatcttttattggaaatatgcaaattcaatacttttccattatagtctatagaactggagatttcatttctctatcaaagagagatcaagcgaactattttaggttaaatccgaataaaagaactttactggagactttcagtttctaggttttctttgttgttgaaggaagaaaattaacttttaaactgtgagtttctgttaaactgtggagaaatgttttgttcgtttacgattttgggttaataactgtatagttgttggcaaacgatgcatgcatacaatatgccatgtaattcagcatgaaaaatttaagtatatgcctactcatccatttccatcatacaacatggtttccacgttctatgtggaagccatggaagcattgtttccatatagatcatctgagttgtggttcctaacacagtgctatgtgtcctatcacaagcatcattgatagtttatcagttgtgcaacttaatgtattaaaccctccgtacattttcaggtc

SEQ ID NO: 202 - DNA, 3211 bp, Homo sapiens
caggggcttcacctcaaccctcatgctgtggagaaagtcagactcaactggccacaggttcctgtttcttggggctgctaatcaccatttctaacagatgcctgtggcattgcaaacacaagatggaaaactatagctctaaactcccttctgaagggtaaggaaaggaagaggaaggcagatgttaaatgagcccagtctttctcatctcaaaaaattcagagctgcctgttagagcacaagagctctcagagctcccaaccacactgcccactccccatagtgttgcctctcccctttcctctttaagacgcaggagcgaatcgtggtctttgtgctttcactgcaatctatcccaggggaagagttctcccgggtatctgtgggatgcccttgctgcatgtgaggcacaaatggcttcagggaccaggatcctcactcactctgcagtccatttttctaaattggaatttgcgatcggtttcttcaggtgtcccaccatcatctatcattatctgagttattccttatcctctcccaaccccaaggagaggatcttaattgtttttataaactgacagaaggaattggtgattcttggaagataattttaaatggttatattactttcctattactgcatttactgcatttaaatagcaggtctaaggtggggtgcgagaagatgtgacccctaggaatattggtatgacctttctcaagcaatttgaagtcctttagatctgaaaatttaatgtcttcaatatcatttcacagatgagaaaattaaggcacatatagtgacatatttaggagctgaagtgtgttacagaaacaaagtttttttgtataagcctttccctacatgggatgttatcattgtcacctatgtgcctttcaggaagcaccaagtgcagtatgcgtgactcagttggacccctagttcccttctatttctccagctggcaggagacagcaaaggacagtggaggtggttattttgtggcccacatttctgccattaaaagggacataagagactatgtagtgtggccaattttttttttttttttttgagagagagagtctggctctgtcgcccaggctggagtgcagtggcaccatctcggctcactgcaggctccgcctcccgggttcacgccattctcctgcctcagcctcccgagtggctgggactacaggtgcccgccaccacgcccggctgatttttttgtatttttggtagagacggggtttcaccgtgttggccagggtggtctcgatctcctgacctcgtgatccacctgtctcggcctcccaaagtgctgggattgcaggtgtaagccaccatgcccggaatatggccattattttaagtgtttttattattgctctggttctccctttagggaggcattcagtgagtataccccatctgtcacaggcccccaccactccctgtggtcttacactctgctgaattcatacatttaggtaacttccctggccctcctgagaatcacttatttttgtaacctcctgtatttgagatgtaggaaactggggcctgaggagaagttgacttgccttgggtcccacagtggtacaggcagatctagaactcagattttccagggctctttcagtaggctgtggttgagcagtagtcaagaccacctcttcaagaagggaaaaacatttgtcttctctttctcctctttcttccttctgcctctcactgtaagaagaaacgtgttaataagttgctaataccttactctaggtgtatttcatgttacaccagccagtgcttgtattctcaatgaccataaggagaggaatgcggaagaattgatttctgtactaaaagttcagactctgtggcacttgtgatatttctggacaactgactcttctctattgcctttcgaatcatacagtggcaaagctgctcacccatgtgtgtataaagctgacccttcatcagaaaggcagcccccagtgtctccccacacagggcagaagagcagagggagcaggtggcaatgtggcagcaccttgaactgtgcatcactgggcctgctccccctcatcccaaagcaataacccagaaattacatcctgagacttacttcctcagaaagaaaaggaaggggagggataacttaaaaaggagaaacttctaatatggtattagactgtaattcatagggaaatttatgcctgagatatgaatttctgaaaataaggggcttttttggaagggaaacactgacacatccttaattatagagtaataaataccaatggtatattatctttcgatatttccttacacagatatcaaagcatgcagctgtttttgaaaactgataatcaagtacaatataagtatattacatcttgcacttacaacacacccttcaactaagcagcatcatggagcacttaacggtgagaaacagagctgctcatagtagaaacctaactgaacaaattagctttgaattgtaacttaagaatcgtagtcaaaccaaagcgtctgtccttgccaggaaaggcattccaaaggcagagagcatgccaagtaaaaaggctttgcttcaggattatggagacagttctgaaaagccagcataacttaatgatcaatcagaaaaatatagagcagtaactacacaactgaaggatgcataaaaattgtacaaaacgttaatagtggaatggggaggtaggatgggattttacgggcaagtattaagctcttggaaagcttcatttgttgccctcaatccacacagcagaaagaaagagaaagagacaaacatggtcaaagaaaagtatgtggacaaatgtggggggtagaaaaggaaatgaaggttaagcaaggccaatataattcagaataaaagggagggagggaagtataaggagccagctgtaattactgaatgttacattaagaagagctgaaattgagagggggaggtcttgagtattttactaagtggattaatgtcctcttcctcgggtgtctgaagttgcagattttaatttatttggtgcagggatttattacagaattcttaatgggtggggagataaacagggacaattataagctcttaagaagaagaaaagaggaccatataatactttctataaatttaactgtaataaacagggtttcaagctatggacaaaggtagtc

SEQ ID NO: 203 - DNA, 3944 bp, Homo sapiens
attcctgagcaggctccgaaggaggcagctgggccaggcagggagctctgccccctccccacttccccagcctcagtgcccgcccaccactctcaacctgtctggagggcatggcaatggagccgggggctctgtggaccttcctgggccacctgtggctcctggcagggccgacatgtgaggaagatgtggatgaatgcctgtcggatccctgcctgcacggcggaacctgcagtgacactgtggcaggctatatctgcaggtgcccagagacctggggtgggcgcgactgttctgtgcagctcactggctgccagggccacacctgcccgctggctgccacctgcatccctatcttcgaatctggggtccacagttacgtctgccactgcccacctggtgcccatggaccgttctgtggccagaataccaccttctctgtgatggctgggagccccattcaggcatcagtgccagctggtggccccctgggtctggcactgaggtttcgcaccacactgcccgctgggaccttggccactcgcaatgacaccaaggaaagcttggagctggcattggtggcagccacacttcaggccacactctggagctacagcaccactgtgcttgtcctgagactgccggacctggccctaaacgatggccattggcaccaggtggaggttgtgctccatctagcaaccctggagctacggctctggcatgagggctgccctgcccggctctgtgtggcctctggtcctgtggccctggcttccacggcttcggcaactccgctgcctgccgggatctcctctgcccagctgggggacgcgacctttgcaggctgcctccaggacgtgcgtgtggatggccacctcctgctgcctgaggatctcggtgagaacgtcctcctgggctgtgagcgccgagagcagtgccggcctctgccttgtgtccacggagggtcctgtgtggatctgtggactcatttccgttgcgactgtgcccggccccatagaggtcccacgtgcgctgatgagattcctgctgccacctttggcttgggaggcgccccaagctctgcctcctttctgctccaagagctgccaggtcccaacctcacagtgtctttccttctccgcactcgggagtccgctggcctgttgctccagtttgccaatgactctgcagctggcctaacagtattcctgagtgagggtcggatccgggctgaggcgccgggcagtcctgctgtagtgctccctgggcgctgggatgatgggctccgtcacctggtgatgctcagcttcgggcctgaccagctgcaggacctggggcagcacgtgcacgtgggtgggaggctccttgctgccgacagccagccctggggtgggcccttccgaggctgcctccaggacctgcgactcgatggctgccacctccccttctttcctctgccactggataactcaagccagcccagcgagctcggcggcaggcagtcctggaacctcactgcgggctgcgtctccgaggacatgtgcagtcctgacccctgtttcaatggtgggacttgcctcgtcacctggaatgacttccactgtacctgccctgccaatttcacggggcctacatgtgcccagcagctgtggtgtcccggccagccctgtctcccacctgccacgtgtgaggaggtccctgatggctttgtgtgtgtggcggaggccacgttccgcgagggtccccccgccgcgttcagcgggcacaacgcgtcgtcagggcgcttgctcggcggcctgtcgctggcctttcgcacgcgcgactccgaggcctggctgctgcgtgccgcggcgggcgccctggaaggcgtgtggctggcggtgcgcaatggctcgctggcggggggcgtgcgcggaggccatggcctgcccggcgctgtgctgcccataccggggccgcgcgtggccgatggtgcctggcaccgcgtgcgtctggccatggagcgcccggcggccgccacctcgcgctggctgctgtggctggatggtgccgccaccccggtggcgctgcgcggcctggccagtgacctgggcttcctgcagggcccgggtgctgtgcgcatcctgctggctgagaacttcaccggctgcttgggccgcgtggcgctgggcggcctgcccctgcccttggcgcggccccggcccggcgcggcccctggcgcccgagagcacttcgcgtcttggcctgggacgccggccccgatcctcggctgccgcggcgcgcccgtgtgtgcgccctcgccctgtctgcacgacggtgcctgccgtgacctcttcgacgcctttgcctgcgcctgcggcccggggtgggaaggcccgcgctgcgaagcccacgtcgacccctgtcactccgccccctgcgcccgtggccgctgtcacacgcaccccgacggccgcttcgagtgccgctgcccgcctggcttcgggggcccgcgctgcaggttgcctgtcccatccaaggagtgcagcctgaatgtcacctgcctcgatggcagcccatgtgagggtcgctctcccgctgccaactgcagctgcctggagggtcttgctggccagaggtgtcaggtccccactctcccctgtgaagccaacccctgcttgaatgggggcacctgccgggcagctggaggggtgtctgaatgtatctgcaatgccagattctccggccagttctgtgaagtggcgaagggcctgcccctgccgctgccattcccactgctggaggtggccgtacctgcagcctgtgcctgcctcctcctcctcctgggcctcctttcagggatcctggcagcccgaaagcgccgccagtctgagggcacctacagcccaagccagcaggaggtggctggggcccggctggagatggacagtgtcctcaaggtgccaccggaggagagactcatctaggccagcctggctgctggcaccagcacctggaggtcctgaatggtttctacctggagacccaaggaagctgcttccagggctcgggacattgctacggaagtgtccccttggctggcagcctctgcctctgcctctgccccatcctggatggaggacgaggggagcaactcagggaaacagaggcctagagaggctgcggacttctccatcccaccctcggggttccgccttggcaggtgtacggctgtgcgtgggagggcacacgtgggttcacagtgtgttcaggagtgtgtgtatctggaggagtgtgtgtgtgagtgtgtacctgggcctgtgttagtctgcagatgctagtgtgagtgtgtcctgacatggctccagggcgtgtctgccgtgtttactgtgtgtctatgactgtgatgggtgtagctgatcccaggaggtggcggctgcgccatggggtcaaccattacagtcctagggcaggggcggcccaaggctgcatgttctccaggaggccaggccggggttgcccaggcacctccttccccgcctctgggggctgctcctgctgtggaggcagctgggaagtcagggaaggccactagcagagcccattcctgagccagacaggtcacggttgacccaggaagagccatgtgccaggatggccgccaagcctcactgagcatgtgcagcagtggcagcctctcagacatagagggggctccctgggtgacatctccagagacccccttgtcccccagacacccctgggtagactgtgtctgacccttcacaaataggaaatgagagctcgggtcgaaatgctcacaatttcctgcgtgtctcagatggttgttttcttaaatggtcgggccatactttaacttggtttatggaaatgaatccatttcaagattcatcaaatcaataaggtaaaaaggaaaaagaaagataataaacattcaatct

SEQ ID NO: 204 - DNA, 3027 bp, Homo sapiens
agtttgagtgttaccagctttcgctatgcaacggccaagtgtttctcgggctgagaattatcagcttttgtgggatactattgcttccttaaaacaatgtgaacaagctatgcaacatgcatttattccggtcaatgggacagaaattgaatatgaatttgaagaaattacactggagagggggaattctggcctgggattcagtattgctggggggacagataatccccacattggagatgaccctggcatatttattacgaagattataccaggaggtgctgcagcagaggatggcagactcagggtcaatgattgtatcttgcgggtgaatgaggttgatgtgtcagaggtttcccacagtaaagcggtggaagccctgaaggaagcagggtctatcgttcggctgtatgtgcgtagaagacgacctattttggagaccgttgtggaaatcaaactgttcaaaggccctaaaggtttaggcttcagtattgcaggaggtgtggggaaccaacacattcctggagacaacagcatttatgtaactaaaattatagatggaggagctgcacaaaaagatggaaggttgcaagtaggagatagactactaatggtaaacaactacagtttagaagaagtaacacacgaagaggcagtagcaatattaaagaacacatcagaggtagtttatttaaaagttggcaaacccactaccatttatatgactgatccttatggtccacctgatattactcactcttattctccaccaatggaaaaccatctactctctggcaacaatggcactttagaatataaaacctccctgccacccatctctccaggaaggtactcaccaattccaaagcacatgcttgttgacgacgactacaccagtcattcccaacatagcaccgcaactcgtcagccttcaatgactctccaacgggccgtctccctggaaggagagcctcgcaaggtagtcctgcacaaaggctccactggcctgggcttcaacattgtcggtggggaagatggagaaggtatttttgtgtccttcattctggctggtggaccagcagacctaagtggggagctccagagaggagaccagatcctatcggtgaatggcattgacctccgtggtgcatcccacgagcaggcagctgctgcactaaagggggctggacagacagtgacgattatagcacaatatcaacctgaagattacgctcgatttgaggccaaaatccatgacctacgagagcagatgatgaaccacagcatgagctccgggtccggatccctgcgaaccaatcagaaacgctccctctacgtcagagccatgttcgactacgacaagagcaaggacagtgggctgccaagtcaaggacttagttttaaatatggagatattctccacgttatcaatgcctctgatgatgagtggtggcaagccaggagagtcatgctggagggagacagtgaggagatgggggtcatccccagcaaaaggagggtggaaagaaaggaacgtgcccgattgaagacagtgaagtttaatgccaaacctggagtgattgattcgaaaggggacatccccggattaggtgacgacggttatggaacaaagactctgagaggacaagaagacctcattctttcctatgagcctgttacaaggcaggaaataaactacacccggccggtgattatcctggggcccatgaaggatcggatcaatgacgacttgatatctgaattccctgataaatttggctcctgtgtgcctcatactacgaggccaaagcgagactacgaggtggatggcagagactatcactttgtcatttccagagaacaaatggagaaagatatccaagagcacaagtttatagaagccggccagtacaatgacaatttatatggaaccagtgtgcagtctgtgagatttgtagcagaaagaggcaaacactgtatacttgatgtatcaggaaatgctatcaagcggttacaagttgcccagctctatcccattgccatcttcataaaacccaggtctctggaacctcttatggagatgaataagcgtctaacagaggaacaagccaagaaaacctatgatcgagcaattaagctagaacaagaatttggagaatattttacagctattgtccaaggagatactttagaagatatatataaccaatgcaagcttgttattgaagagcaatctgggcctttcatctggattccctcaaaggaaaagttataaattagctactgcgcctctgacaacgacagaagagcatttagaagaacaaaatatatataacatactacttggaggcttttatgtttttgttgcatttatgtttttgcagtcaatgtgaattcttacgaatgtacaacacaaactgtatgaagccatgaaggaaacagaggggccaaagggtgggacagaaaagacattgcagtatgaaggaaggctttggtttgctcaaagtgccaggtgtagggatgaacctctgacgggctttctgcccaagagatgagatgagagcctcctcaccccagcagatgtccagagctgatttagctgcagagctctctgtgtcttttgctttaaagaaaaattgccagcactcgaacctcatcagccttcccattacccacatctgtaattggtacactttgaattttataactatgcacatcttttgatttcttaacaagcaaatgaaagaaagaaggaaaaaagaaaggaatccctttggagacgacatactatcagggaaggataagtgtgtagttttttgactggcatctgcaaagacaagaatttcataaaatttgcaagtgtatggaggactaacctcactgacaggaggggattccacctgggattagctttatgattgttgattgcctattttgccatttataaactgaaagaaggcactaaagatgagaataatttatacaataaaaatatattaaatgtatagaaacaaatttctataggtt

SEQ ID NO: 205 - DNA, 3663 bp, Homo sapiens
ttttctatgtcagatttttttcttcttaatctttttttccctttcctctcttcctctgttatttttttctttcaatttatgttgttattttggcagtggctcaggggcaaaaagccattagtagtactgaggaccaagaaagttgttttattttttatttttttgagatggagtctcactctgttgcccaggctggagtgcagtggcgtgatctcgtctcattgcaacctctgcctcccatgttcaagcaattctcgtgcctcagcctccccggtaactgggactacaggcatgtgccaccacgccctgctaatgtgtgtatttttagtagagatatgttcaccatgttggccaggctggtctcaaactcctggtcttaagtggtcggtctgcctccacctcccatagtgctgggattacaggcgtgagccaccacacctggcccaagaaagttgttttaaattaaggaagtccaatagttacaaaaaagcactcttagatgacaaattttgttttaaataagaaagcataagagcattatttccccaccctttatatattaagtgtgatgctgagatttgacttttccctctttgtattagcttgagaagtgtttttctaacaacatgggagattataaacaagtcaggcattctagtgggcttctagactgaaatgatcaatttaagttggccattttatggtcctagtgtgagatcaagacattttggtgtaattttgtcagctttctacctaaaaaatagaaatatattttgatgtatttactttttattatggttgccctttcaacatttagaaaataatcttaaatctcttttctagtgtactaattacttcaaattttttttttacttaaatctcttttctagtgtactaattacttcaaatttttttttctaggtataatgtatacaaagaaaaagtgatgcttgttttctttctttttttagaatctcaaaatgtagattttatttgtagtgttcttgtggtggctgatcaacttctcataacccggttgaaagagatttgtgaagtagcattaactgaaaaacttaccctgaagaatgctgctatgctactggaatttgcagcaatgtatagtgcaaaacagttgaaactgtcttgtttacagtttataggattgaatatggcagctttacttgaagcaaggtctcttgatgttttaagcgatggtgttttgaaggatctttctgagttttaccggaaaatgattccagcaatggatagaagagtcattacaccatatcaagatggaccagatattagctatttggaagtagaagatggagatatcttcttgaaagaagaaataaatatggaacaaaatcattcggaaactatgttcaagaaagcaaaaacaaaagctaaaaagaagccacgtaaacgttcagatagttctggaggttataacctttcagatattattcagagtccatcatctacaggattattaaagtctggtaagaccaattctgtggaatctcttccagaactgttgacatcagactctgaaggaagctatgcaggagtgggtagtcctagagatttacagtcccctgatttcacaacaggatttcattcagataagattgagggaagatttaaaaccatgggaaaagtcaccaatacttaaaatatctgctccacagcctattcccagtaacagaattgatactaccagctctgccagttgggttgctggttctttcagtcctgtcagccctcctgttgtggatctcagaactatcatggaaatagaagaaagtagacaaaaatgtggagctacaccaaagtcacatttaggcaaaacagtttctcatggagttaaactttctcagaagcaacgaaaaatgattgcattgactaccaaggaaaacaattcaggaatgaatagcatggaaacagttttattcactccttcaaaagcccccaaaccagtgaatgcatgggcatcttctctgcattcagtttcatccaagtcattccgggatttcttactagaagaaaaaaagtctgttactagccatagttcaggcgatcatgtcaaaaaagtttcttttaaaggaattgaaaattctcaggcaccaaaaattgtcagatgctctacccatggtaccccaggaccagaaggcaaccatatttcagatttaccacttctagacagtcccaatccctggctatcttcttcagtgactgctccatccatggtagccccagtcacttttgcatctattgtagaagaagaactacaacaagaagcagctcttattagaagtcgagaaaaaccgttggctctgattcagattgaggagcatgccatacaagatttattggttttctatgaggcatttggcaaccctgaagagtttgtcattgttgaaaggacaccgcagggaccactggcagtacctatgtggaataagcatggatgctagttcactgtggagttgagatgcattttacataattatgagtttgttcatataaagaaaagctgtggaaaagagtcttagagattttgtaatatcattctaaatagattaagaaaagatataatttctttactgcagttaaatcatataatgtttgtatgattaaaaataaatttctcagaattgtgattttagtaactttatataaaatgtgtgagacaaaaacttattaaggttaaatagaattgtttcttctgaataatctaacaaaggaaaatataagtgattgaatcataagatataaggggggtaaagtattaaaaataacttttttgtttgataacttgagaatttagaagattttgccaagtatgtgttgttgcttgacttcttaaatatggcattgatgaatttaaagtaggagcatcagttattacttctgattcattaatggccagaattttgtgtttggtgtaatagttgtgtcaccattcttgttgctttttaaaaatcaggctaatcatgtggtccatgtctcttcaaagcttgacctgcacaaatgccatatttctatttggaccacatattctccattttgcattgagcagtagagtacagtggaaagggaataagaatactgattattctgaacagtttagtcccaagagaatagcgttttaaaaaagaaaaacaagatttggagtcattgtgggttatttttggtgggatggaggatcttaaaaatgcctaattgtgagagaatcaattgctgaaagtgttaaaatttctgaaaataaatgcttaattacatatacaggaattaaatagtttggaagagggttggattatcattacctttacaatactgtataatcagaagttctctgaacctcaattgtatatctagacataaaaattgttttctgtataggatgttgtttggtttgtttctgagtgtttaaattttgcaaaaacaaatgttaaatttgtgcttcagtacctagataaattggaaaggttaatgttctagtttctggaaggtaagcctgggagacacataagcaattcactgctataatttagttgatgtaaaatgacggaaactgactcaatatgtcaggtttaactctgcccaaaagcagcagacatgtaagcagatgtgcaataaaaaatgatcttgatccatttc

SEQ ID NO: 206 - DNA, 3207 bp, Homo sapiens
gtgcctggcgccgagcctcccaagatggcggtgtgcatcgcggtgattgccaaggagaattaccccctctacattcgcagcacccctacggagaacgagctgaagttccactacatggtgcacacatctctggacgtggtggatgagaagatctccgcaatggggaaggccctggtcgaccagagggagctgtacctgggcctgctctaccccacggaggactacaaggtatacggctacgtcaccaactccaaggtgaagtttgtcatggtggtagattcctccaacacagcccttcgagacaacgaaattcgcagcatgttccggaagctacacaactcctacacagacgtgatgtgcaaccccttctacaacccgggggaccgcatccagtccaggtgggccctactttctgtgtctgcatccagtccaggtgggccctactttctgtgtctgcatccagtccaggtgggccttactttctgtgtcttgccaccttctttctgtaggacatgccttgccattttggttgccaaaatgcaaccatttggaaaataagggaggaaagatctttttaagctatgagcaccatccccctagggcagaggttttaaagccacaaagccccgtttctccacaccaactcttacacagatctccagcgcataaagtggatagagtgtgtgtggtgtggggagtagagcttgcccatttggcttcccaggtgtgcccagtgggtacctggggcacctgcaggactcagggccaagcacatgggcagtggctttcagggatcacacgtccttttgtagctacctgatcttttatgttgaatttggaacagtcaggaacctggtttgcaggtgtcttccgaatagtccacaaagtaaacagatttaacttttgaacatcatgagggaaatgtggggtccatgcccacattccagacttgcttccagtgagtccccagttccaagacataattccctgtggttggcagggaagaggacgctgcagtgatccaaggcaggcccctccctccaccaggacactgtcttggggccatcctggtcccagatgggagcaggcaggcgaatgtccacagtcttgcctcctgggctgcacagggccgtccttgccacaccaccgctctgcctgcccatgctgctccctcctccaccccttcctggggccttgggaggctgcacagggaacttggaggcagcagatgggttctcagtgcccggtggggtgggactcctgtcctggcctctcagcggagttcacatttctggaccctggagaaggccccgagcatcctgtggatggagccatgctgcccggcccgtctctgagcagaggggtggagggcctggctctcctctgagtgggtctgtttctcttagcagggcctttgataacatggtgacgtcgatgatgatacaggtgtgctgagtgagctgtgctgccagccatcgcagaggagcccgcgcacgactgtggtggggccgtcggtctgttctggttgcctcttcctgaatgggacgcccggggctttcagggcaggcagctgtgcatgttctctcaactaaaggtcttgtgagaggagatttggctttttccttccgtgtcagccaaggatttaattaagaagaattcaactaaggacttttctggggtgtgggcagaggtttgggatcagatggcgcaggtagcctgtcctcagttgtcccaaaggggcagaggcaggggtgcctggagccaagagttcctgagcctgcaggacctgtgaccatgtgggtcacccactggctgaacaggtgggctggtctggagggggcggcctcctgagcccagaaccagcctaggatctaggggcacaaggggagccggcgtggcttcccacaggggagggccctcctctttctggacttggcctccattctttgcatctggctcaatgtctggattccgcccggccttaaaaggagcccttgtgaaacctgggaagcctcgtggccccgcggcgttggctcagctgcagccctggtcctaaaccttggagcgcagacttgaggcaccccctcctgcctgttggtgctgagggggttgggtgctgtgtcacttgatgacgtggctgactactacccagggcagcggccgagcccatagtggcgtcagtgccgccggcgtccttggggtccagcggtcaaggctcagcccgctgaggggacccccccggagttggttccagcactggtccaggactggagagtttctcaaggaccttgaggaccccagaagcccttgcagcaggaaaggctgtaagggggggtcagcctagggcaggacctagggaggggaactttcttgatacatatttgccttttcatcccatctagcaagcacagtgttaattttagaaattatagaagaaaaaatcagcaaggagtgtgggaaaactgcatgccccaggcctcccccgccccagggtgaattggaagtcctggaatgggccgaggcacaccaggcagctgatctgggtgcatgtgggccacagaccactctcacaaggttaaatctttaacaagagcctcatgtttgttaggagaaggtgggaccccagcccaagcacttccccattgcagcctggcatgaaatctttgccttttagtggggatcactcctgcccgagtcctggctgtggtggggactctgcaagttgctaacccagcgtccattctctttcctccgtactaacagaaccccggtgcctctgcccagttccaatagcgggcagacgagagccatgtcctgggctcccttgcagcccggggtgtgcagctgtggcgtggaggtgggtggtgctgggagagacttgcagggaagctcctgtgaaggggactcagctgccacatgcaggacccttcccctttgccttcttcctgcctggaacatggatgtgatggctggtgctgggacagctgtcctgagagcgtgaggaaagggtcacaccctaaggacagtggagcagaacacaggaaggaccctgggcctttgctgacgcagaacgcgggaaggacgctgggcctttgctgacgcagaacgcgggaaggaccctgggcctttgctgacataccagccccagactacttaaattcagctttttttttaatgtgagaaaataaatgcacccctctctggttt

SEQ ID NO: 207 - DNA, 4895 bp, Homo sapiens
tgaaatggtggcagaaggggcaggaatggggtccggcagttctcttccctcaggtcctggcggatggatagcaaagtcctgtgtagacaaggtcacccacaggtggtatatgccggctgctaagggccttgggtggcgggccttggcccccgcagtccagagagtgtctgtttactattccctgcagggtaggcaccttgggccccagaattcggaaggcacttttttcctacctggactcacttcctgcagtgttggaggccacctggccctagtctattttatagagacggggtctcactatgttgtccaggctgatcttgaattcctgggcttaagcaatcctcctgcctgggcctcccaaagtgttgagattacaggtgtgagccacctcgcccagccccagccttagtctgtagtctaatgctggagggtagtatgttgactctggaataaagatgtcactattctggaactttttctggggtcactgtcgggaggcgttgtctcccttgagcacttgctgcagccccaggctgttgacctgcacagccgtcctcagagggtggggaagctgttctgtcttgggggcgttgagtccactaggtaggccctgtgaggatcccagctgtcacctagtgggtacctgcagaggttttgttttgttcttttaattgaggcggggtcttgctctgttgcccaggcaggagtgaagtggcgcaatcctaggtcactgcatccttgaactcctgggcccaagtggtcctcagcctcccaaagtgctggggttacggattagagccaccggccgcggccccctttggcttgtgtttttaagtctttttttcctccatgtttctggctgttaattttttataaaagtttgtatctggcatggattgaagcaggagacactggctcagtgcccagtggggagagccctgtgtgggtacctcccgggcggtgtgggtgcatgagttggctgctgcgggtggcaccgggaggccctgtgtgggtgcctcccgggcagtgtgggtgcatgagttggctgctgcgggtggcactgggaggcatggcaggggccatgaggccacaggtggcagctccctgtgcttgacctgcatcgggtctggagtggcgggcactcgggaaggaagcgccaggacgacacattggaaggaggagctgcagggcaggtccagccagtgcctgggagctcgggagggcacctgggtggacgcagcctgcaggagcgcctgctctcctgtatgaggaacagacctgaatgccgtttcagacactgactcattcctgccctcctgtgactttgttggttttctgggttttagtgcagattgtagctggcagctcacaacagagcccttcctggtgcaggctgacaggcaggagggattctcctctacagaaatggacattactatatctggaaacagtttttttttttttcttctttttgagatggagtcttgctgtgtcgcccaggctggagtgcagtggcgtgatctacgctcactgcaacctctgccccctgggttcaagcgattctcctgcctcagcctcccgaatagccggaattacaggtgcacgtcaccacgcccaactaatttttgtgtttttagtggagatggggtttcgtcacgttggccaggctggtctcgaactcctgactgacctaaggtaatccgcctgccttagcctcccaaagtgttgggattacagacataagccactgtgcctggcctagatttgttttaattgaaaaagctgaagcaaataaaaattgtgctggggaaaactctgagtgctcagagcatgggctgcgtttctcactggcctcaccgcaccttcctctgcactcagactctcctaaagatgctggcatttactgaactaaaggtagcatttcgcagagcagggccgtgggccatgaaccacagtcatctggccatttagacagctctgccctgcccccggcgacttgggtacccaaccatgtcattcccacccctagctttgtggggcaacgttcctctaggccgggttctcttccctgaagcaccccaggcatgtagaagatgttctcagcagaggggagacaccacagtgtagctgatttctgtctctcttcactttcaccatatttacttacttttggtagaagtggggttgaaaatttatgtgaagttttctttactactggggacagcggggcagattactgccacacataatcacctctgctccagcctaggtgctacctgctggaggcgatggtggctttcctgagagcacctcctgggctcgggctggtggggagcttgattttacctttttatgtggaaataacttcaaatttacaaaatattcacaaaaataaagagagcagggactacccaggtgctctacatagagttgcctgttgctggggctgcgtcctcttttgcacaccctgccccgtcggagaggatcccagatgtggcccttgcccatgcacgtcaggcatgtgaaaagagcaggtgtcccctggcgatgggcagcaggctttgtggtgccccagccttggtgcaggagtcccctgaggtgagattcagggctctggccggctggtctcatgtgtttcctgagcgatggatgtgggcacggcgtcctccacctcgcaccacctggcatggggtctgcgtgtgtgtcatgccagggttctgggcctgcaccgggggctcctgccctgcctgtgcactgtttgtcgggggcttgtgcccgtgggtgagtgtatcttttcatttttagtgatgtctttaaaatattcttttttagtttggaaatctttggagagagccccctgttctttcactcaactttagaagttatacgcacctggccagcctcccctctcccattccttccattccattgttttgaagcgagtcctggccatggaattccgttcgtgcacccgtcagtgtgtaaaggttctgaaaagcagcctgaattttctattgtctgatgaaccgaagtttgttcatttcatcgtactcctcaaatttatcaccctttccccatgtggcatgtgcatgctgggtctgcttgaagaaactcgtccccactctgcagccgtaaagctgctccctgtatttcctctaggagtctttacaaattttttttttttttttaaatggagtctcactctgtcacccaggctggagtgcaatggcacagtcttggctcactgcagcctccgcctcctgggctcaagcgattctgcctcagcttcccgagtagctggcattacaggcgcctgccaccacacctggctaatttttgtatttttggtggagatggggtttcgccgtgttggccaggctggtctcgaactcttgacctcaagtgatcgcccacctcggcctctcaaggtgctgggattgtaggcgtgagccattaatggctcctggccaaaaatttttttaataaaaataaaaggctgggtgtggtggctcacgcctgtaatcccagcactttgagaggccgaggggggcggatcacgaggtcaggagattgagatcatcctggccaacatggtgaagccccgtctctactaaaaatacaaaaattggctggtcgtggtggtgggcgcctgtggtcccagctgctagggaggctgagaggcaggagaatcgcttgaagccaggaggcggaggttgcagtgagctgagatcatgccactgcactccagcctagcgacagagcgagactccatctcaaaaaaacaaaaaatagagatggcgtctcgctgtgttgcctgggttggtcttgaactcctgagctcaaatgatccactcacatcagcctccgaaagtgctgggatcataggggtgagccatggtgcccggccacctcgaggagtcttgagccctcctggaattgctgtttggtgtgaggttgggtcaggcctggtgagtcatctgggttgtgagccagcctgcttggcctcctggtctcaggccagctgtgacctggaccttgggccacccagcagctttgtgctgagcctcagtctgcggttgggagggcaccccttgtctccagaatggtcctggcgtgtgaggtccttggtgcgtccgtgtacagtgggcggcaccttgtctccagaacggtcctggcgtgtgaggtccttggtgcgtctgtgtacatgggcggcaccttgtctccagaatggtcctggcgtgtgaggtccttggttcgtctgtgtacagtgggcagtagctttaaagttcctgcttcaccttgtcagacttctggttagagtcctcccgacattagtgttcctttaggaagcttggactctttacaccgttaattacactgttaatttcacttaaacatggaggtggcccagtttgctgcccatgtaagactacttttacttttttgagacaaggtcttgctctgtcgcccaggctggagttcagtggcatgatctcggttcactgcagcctccacctccagagttcaagtgagtctcatgcctcagcctcctgagtagctgggattataggcatgtgccacgactcctggctctctctaggacttctttaatgtcataatagaagctgatggttttctccataaaagtctattagatttatttctaggcacttgttaatatagtacttcttaaaattagcatttttgtttttagctatgtgttgtagatggatacaacatgttgtaagattcttttggatcgtctttgtggacagtatctgtgaagaatgactcctgcctcagtctcccacttgaacccaggaggtggagcttgcagtgagccgagatcgcgccattgcactccagcctgggtgacagagcaagactgtctc

SEQ ID NO: 208 - DNA, 3456 bp, Homo sapiens
aagcaaaccgcatgcatttcctaggactgcccataataaagtaccccaaactgggtggccgaaaacaacacacttattctctcccagttctggagactggaagtctgcaatccaggtgtcggcaggactgctgtctcttcgaagtccccctggggagaacccttctgagcccacctgaccgccccggctcttggtggcctctggcaagcatctctccatcatctctgcctccgttttcgtgtggccttctctgcctgtgtctctccaggactccagtcgtactggatcagggacccaccctactccagttgtcctcatctttttttttttttttttttttttggagacggagtctcgctctgtcacccaggctggagttcagtggcacaatctcggctcactgcaagctctgcctcccgggttcacaccattctcctgcctcagcctcctgagtagctgggactacaggcgcccgccaccacgcccggctaattttttgtatttttagtagagacagggttcaccgtgttagccaggatggtctcgatctcctgacctcgtgatctgcccgcctcggcctcccaaagtgctgagattacaggtgtgagccactgagcccggcccagttgtcctcatcttaacccattacttctgcaaagaccctatttccaaacaagttctaaagtactgggagttggtacttcaccatatggtttttggaagggacacagctcaccctgggccgcggatgctggctcctgttagaggactgtgctttacaggcagcgcctgtggccctgtgagaactctcgctgcaatctttgctttctcacttttacagaccaacaagccctaccacagaccaggctgggccttggctctggccacttcgtgtcgcgtgcctgctgactggcgcttgtctcctgtgttgccagcctgcttgttagagctcagaggcagggaccttgcccccacatctcctgaatctcccacctcgggcagcctggcaaggccatagagatatgaacagcctgcccttccagctcctggggtacagcccgatgctgttgacattgcctccacctcccttccttgtctgggctggggagggatttcttggctcccataagcctttgtgggcttcctagtgtgtgtgttttgtcctttttcgtcctctgggctctgggctagacagggctgctctccatgaagtccccacccaaccttactcccaggagcagcagtgattgacagacagctgggcaccaccacctgccgctcacccacagatgcagccgctgcggatgctgcccccgccccacctagagagcataacttaacccatggtgacttcgttaacaagagatgcgtagcggggccccaggaaggtggccctacacccacggtagctcttggttgggtgcctatgtttcaggctgtgctgatgagcctggaggtgcctgggctggcccatccatcggagaccccggacagcctggctacccaggaaggggagctgtcacttcccagcgctgagtccagggctgtccacgtgggccttcagcaaagcctgactgagcctgccaggtcccaggctctgctcccaggtgggtgggcatggggggcagtggtggtgtgatgggggcgcagcaggagtggggcaggtgaagctggtcctgccaggtgctgccgcccttccaggtggtacttccgataggtggtgttcggctggtgacccctgcctggaggtcgaggggaagcacagcagagccagggcaaggagaagcgtgtgctgcgcgcagcccaggaaggaggggcatggagcagaaagaaacacaggtgaactggaagagcagagagggttcatgcttcctgcacacatgggaccagggcatgggcctggtggggggtcagcattcctccaagccaaaaaacacaggtgtgacagccctttttctaaaacattacagaggcagcaggagcagagatggctgcagggaagtgactgttccccaaaagcaagaaactcctgttgcctcacttgtataagccaagggaacccctcgctttctgtctctggagtcactgaatatttttgtttatgtcactttatagcagtactgatgcttaggttgatctaagttcgtttttaaaacacaaaacacgtctttaagtggaatgcacagttagtatgctcctgcgaagcggcagccccgctgccctccctggctctgcggccacctgctgaggatggttcttctaggatgagtcaggagagtggagcaaggctcagcctgcaggtccttgctgagctcagggaagcagccccgtgaggatcgggctgcgtggtctgcaggggaacctgcctgggaccctgtgagatttacctgtttcaggtgccagtgatctgctgggattctggagaggtccctcaggggagcctggcacttcctacccccttgagtttgcaaagtcacaactgagggcctgggttgggacggtgtcatgagctctccataagctttgcttatggtacaggagcagactgtctggcgcttatggagacctttaacgtgctcctgtagacagtcgggtaaactcattctggtagcacagcgtggcctccccctccacctgacatctgaggaagtggcaggctctgcatctcggtggcctcgccccagggtgcagggagcaactttgaggaaattagtgctgagcctccagtaggaaggaggactgtgctggggaggcaggtgagccccttgtggtgccgcccgcaggtcacactggcctggggcccctgcagaggaaacaggatccaccagccaggcccgctgaccatttggaagtggagcgtgcacacaggcggctgtgcggtcatcgtctggcaaacaaatgatgggaccggaccaggagcagactggctccctgtggtggggactcttggcaggcggatcggcttcttaggaattaattctcaggaagccagaaaagggggaccctgtggcaccctctgcttttgctttggtttaacatgtttcctaggaggaataattaatcttctttctctgaggcaggctgtgtgtgtgtgtgcatgggttgtatgtgtacagtgtgtgcgtggtatgtgcatttatgtgttgtacatgtgtgtatgtgtcatgtgcattgtgcatttgtgtatacatgtgtgtggtgtgtgccttgtgtttgtttttcatgtgtatgtgtgcagtgtgtgcatttatgtgttgtatacacacatgtgtgggttgtgtatgtgttgtgtgtctgcacgcacagatgttgtgtacatgtgtagatagcatctcagcctccttgggaggaagccttgagtctttttggctctgctgagtcatagctggtgggcttgctctgcagtgctgactcaccacacagaaaaacaagaccaaaaagtcccctcagtctatt

SEQ ID NO: 209 - DNA, 4450 bp, Homo sapiens
tggctcccagggtgacagtggtggcagcagtgatcttctgagactgcagaggccccctcctctggccttctgtaggctggactcttcctacacaatgtatttgatgttttattttgtttttcccaccccttcaatctgtcggggagcccctgcccttcacctagctcccttggccaggaacaagcaaagccatggccttggtgaagctgccatccttttccctgctcgcactacagccctggttggggggagacggtgggcgatgcttgtggtttatttatttgagacagagtctcactctgttgcccaagctggagtgcacggggcaccatctcggcttactgcaacctccacctcttgggttaagcagttctcctgcctcagcctcccgagtagctgggattacaggcacgtgccaccatgccaggctaatttttgtgtttttggtggggacggggtttcactgtgttggccaggctggtcttgaactcctgacctcgtgatctgcccgtcttggcttcccaaagtgctgggattgcaggcatgagccactacccctggaccaagtgagcatgtatatgtgtgtgctaagcactggttccagggagggaccctactaactcactcactcgccacacgaccctgggagttagttacactcatccccattttagggataaaacagttgaggcacgggtcacattgctttgctcaagagtttgagttgggcgctaggatttgaccccaggcagtctcgccccagaactcatgttctttttgtgtgtccgtgagaaggagtttcactcttgttgcccaggctggagtgcagtggtgcgatctcagctcaccacaacctccacctccacctcccgggttcaagtgattctcctgcctcagcctcctgagtagctggggttacaggcatgcgccacaacacccagctaatttttgtatttttagtagagacggggtttcaccatgttggccaggcttgtctcgaactcctggcctcagatgatctgccctcctcagcctcccaaagtgctgggattacaggcgtgagccaccgcgcccggcccagaattcacgttcttaaccatattgcaagactctatatctcaggtgggacctgtgagatgctgtgaagcccacctaaggtcactgagtgtgtgagagagacagcaaagatcccagccccatccctcagggccacagctgtgccctaaccactgcgcagcccttccctttggaacctggctctgagctccagcccaggccctacaccaaagcctttgaatgaactacagtcctgccatggctgtttggccttgcctgtggaataggggtcctgtggctatgctcccctggatcctggggacccacccctttatgagacttcagtcactctgcctggaagccgtgactgacaaagatcacctgcttcctgctgccttaaaggagacactgggcatcacatgaccttttccatgtccatcatggggtcatgtgggctgtgacatggcagagtcagatgggtccaagctggccctgtggtcagacgtggtggacccatcacctcccctcgtgagtccgcattgagtgcagatactgaggaactgggtgtgaaatgcctcgggtagcatctctcatgtggttagtgctcagtacgccagagtcagttattttgacccacgcctgctcatgaactgtttcacgctgccattttcttcttagccacctcctcacaccattttaaatggacaggtgtgtgtaggggcccatcctgggccagccagctgctctccctgcaactttggacaagttatcgcacctctgccccatgccgcagttttctcctctcttttttttttctgaaattttttttgtagagactggctttgttggcaaggctggtctcaaactcttggcctaaagcaatcctcctgtcttggcctcacatagtgctgggattgcaggcgtgagccatgtgcccagtctcctctctaaagtgggaggatactaatactcccgtgatggaagtgatcagggaattgaagctgtgtttatttgcattggaagtgctggggatgggcctggcgggtgtgagtgctgtcagcgcgaacttcctctctgatctgcccatgctgctctttcttttttcttattaatagattggtttcttttttatttgaatacatttggcctcatttctaagcaatagtatttgtaaaatcttagttttggtgtgctcattcctttttttttttttttcttgagacagagtcactctgtctcccaggctggagtacagtggcacgatctcggctcactgcatccttcacttcccaggctcaactacttgagagtgcctcagcctcctgagtacgtggaactacaggaacccaccaccacgcccggctaatttttgtatttttagtagaagtgcatttctacggcgcttctgtaagcacttgggcggatgtgacctcctcggtctctgactctggtggtgactcctgcaaggccggacctggttccagaccctgtaggtgcccagctgaaggtgtggtctgattgctgtgtggggagtgaaggttgccagcctagaaactgggcctcaagctcactcagaggctcttggaacaaagaagaggcaccatcttggctgggattacaggcatgagccaccatgcctggcctggaatgatgatttttaaggcgaaacattaaataggattgcaaaggatgccagttggaatatcattagctaaatgctcttcctcactgaattgacatgtgaagcgataggatgtagcagcagctgtaataaggccttcagtctcagagtagtgatgggcattcagaatctgcagtaacttgatgcaatgggaaaatatctgtcgtttcttttcatgtcagtctcaaggtctgctaaacactgtttcttttctctctctcttttggcctctgttaataagaaggaaatgctaaatttcagttccattcatgaaaataaagagataagtgtctcccctcaagttcgtgggccctttgggggtcaaatggttaagaccagggcatgcatgggcttgtccatggcttggggtagctgctgcagtcctgggggctgccttcccaggcagggcaagctccggtccccactagagctccagggtcaccaagcacatgggcctttgtcagacagctccctttctgtctgcaagaggggcacctgccatcagctgatcccctgcagctcctcccaggcctccacccccaaggaggaggaagtgctcaggcagggaccaggcctgacctctggggaggctggcggctggcctctgtcggcttctttcctccagcaccgcagttcagcaacccaccgccacccagcacagtggccagagcggagtcccagggtctgatgctagactctgctctggaccagccacctggtcccagggagacaccatactttacccagacctcagcttcttcccctagaaaatggggcagtgcttgatgagaccaggggtccagagcccctggcctagcagggtggcaggaggaggagtccacacggagatattactggactgggagctctctcagggactcccactgcgtccagcagcagcggattggcagcagggcgaggggccccccccccaagaagctgccagcaagccctcttcctggcccccttccctgcccattgtggcatctccatgcccaatatctgctggcccgaagatctttctaacggccagtcctgacctctccctcttctgctcctagcctttccttcctgctccgctggtcaccctgaggtaaaatccaagctctaatagccaaaaactggaaacagtacaaattcctgtcagctggtgaatgggcaaacacaacgcagcacatcctataattactcttcagcagtataaagggactgaaactcacgctcattatgctcagtaagagaagccaaccgcagaaggccacacagtttcaattccattttaatgaaatgtctagaaaaggcaaatctgtgtagatagaaagcccagccctcccttccgcatggtggcggctgtggccctccagggaccggggctgcagctgttgggtttgggctacgtcccttcattcatgctgggagccactgcctgttagcctgggaacacccgggaccaggcctgtctcttccaactgcttctgtgtcctgcgtcaaggggccgggccctgaatagcgtacggcgatgtttagctgttgagagtgttttgggagtggggatcctgagaggcacgtggcattgtagttgagagctgagttcaaagcccggctcgcatatataccaggtgtgtgatcttgggcaaggttgtttctctgagcttggtttcctcatagggttgaagtgaggattcattctttcacccaaaaatacaaaaatac

SEQ ID NO: 210 - DNA, 3929 bp, Homo sapiens
attcatccccagcgcagagcagcgctggcagccggcgccgcgatggaggaagagctgaagtgtcccgtgtgcggctctctgtttcgggagcctatcatcctgccccgttcccacaatgtctgcctgccttgcgctcgcaccatcgcggtgcagaccccggacggtgagcagcacctgccccagccgctcctgctttcccggggatcggggctgcaggcgggcgccgccgccgctgcctctctggagcacgacgctgcggctggcccggcctgcggcggtgcaggcgggagtgcagctggcggcctcggcggcggtgcgggaggtggcggagaccacgcggacaagctcagcttgtacagcgagacagacagcggctacgggtcctacaccccgagcctcaagtcccccaacggggttcgcgtgctgcccatggtgcccgcaccacccggctcctcggctgcggcggctcggggtgccgcctgctcctcgctgtcctcgtcttcgagctccatcacgtgcccgcagtgccaccgcagcgcatccctggaccaccgcggcctgcgcggcttccagcgcaaccggctgctcgaggccatcgtgcagcggtaccagcagggccgcggggccgtgccggggacgtctgcagccgcggcggtggccatctgccagctgtgcgaccgcaccccgccagagccagcagccacgctctgcgagcagtgcgacgtcctctactgctctgcctgccagctcaagtgccatccatcccggggacccttcgccaagcatcgcctggtgcagccgccgccgccgccgccgccgcccgccgaggcagcctccgggcccactggcaccgcccagggcgcccccagcggaggcggcggctgcaagagcccgggaggcgcgggggcgggggcgactgggggcagcacggcccgcaagttccccacgtgtcccgagcatgaaatggagaactacagcatgtactgcgtgagctgtcgaaccccggtgtgttatctgtgcctggaggagggccggcacgccaagcacgaggtgaagccgctgggggccatgtggaagcagcacaaggcacaactatctcaggccttaaatggagtttcagataaggcaaaggaagcaaaggagtttctggttcagctaaagaacatattgcagcagatccaggaaaacggactggactacgaagcctgcctcgttgctcagtgtgatgcccttgtggatgctttaactcgtcagaaagccaagctgctcaccaaggtgactaaagagagggaacacaagttgaagatggtttgggaccagatcaatcactgcacattgaagctgcgtcagtccaccggactgatggagtactgcctggaggtgatcaaggagaacgacccctccgggttcttacagatctcagatgctctgatcaagcgcgtccaggtgtctcaggagcagtgggtcaaaggcgccctggagccgaaagtgtctgcggagtttgatctgactttggacagcgagccgctgctgcaggccatccaccagctggacttcattcagatgaaatgtagggtgccacccgtccccctactgcagctggagaaatgctgcacccgtaacaacagcgtcacgctggcctggaggatgccacccttcacccacagccccgtggatggctacatcctggagctggacgacggtgccgggggacagttccgggaagtgtacgtcggtaaggagactttgtgtaccatcgacggtcttcacttcaacagcacctacaacgcccgagtcaaagctttcaactcttctggtgtcgggccttacagtaaaactgtcgtcctgcagacatccgatgtggcctggttcacatttgaccccaactctgggcatcgggacatcattttatccaatgacaaccagacagccacctgcagcagctatgacgaccgggtggtgctgggcacagctgcgttctccaagggcgtgcactactgggagctgcacgtggaccggtacgacaaccacccagaccccgccttcggggtggccagggccagcgtggtcaaggacgtgatgctgggcaaggatgacaaggcctgggccatgtatgtggacaacaaccgcagctggttcatgcactgcaactcccacaccaacaggacggaaggtggcgtgtgcaagggggccaccgtgggcgtgctgctggacctgaataagcacactctcaccttcttcatcaacgggcagcagcagggccccacagccttcagacaccaagttcagccctcggttacttccctcttttaacctggctttaatagtgattcatggtatgagtgggggccaatctcttatcctttctgtgcctcagtatccccacctgaaatgagactagtcatactaacctacctcctctgatgtattgtgaggattatacaataacatttttaaagaaaaaaagtgcagtctttcatctctggcatctaagctaatgattcccattcagtgactcaaacctgtggggggcgttccagtgttctctgaccagtgtcttccatccaagcctccttgtgaccagggcaaggagctgcctggcctccagtgggtaaaatagacctttaagacaggtttcctatgaccatagaaagtaacaccccatatgtttccattcccggcgaggcctgtttgaatggcgctctgtgtgagtgctatgaacaggctacctgtcagcagtctcactgcgaggcctcaaggcctctgtgagcagaagcccctttaaaccaaggaaggacactaacccaggcctctgccttctttgttacctaagttctggtatctaaggggtctctcatctcacagcttgcctcctttgtttcgaggggtctctgcagtgtgaatgggtttgaaatccagtatggatagcacgaagagatgcaactgagccgaagttttgaaggctggttgggctagtgggtcatcatgtcactttcagatgactgataaccgctgggactgctggggcttcaccagcacgagctatgcaggttgggggaggccctggctttttcaatgattgacgttgacatcagtcaggagctgggagttgagacctccagggaagtctcgtccggatccatcgctcttctctcaaggagcacagtcctgggaaaggcctagggacctgtgggccggtgatgcgggcactgcagaccaggccaggccctcgggtaaagttctgaggagaggccaaaaccaggcttcaggttcgggaaggtgactgcttgcaactgcagtagcaggaacatgtcaggtgcttactgggtgagacccagccggggaagcctctccaactcctcctagccctggaaaccagacacccagagccccaggctttctcggcacccagaagaagtggggagcgggcaaagcagaaaacattcaatgcatgatgtaggattgctgcgttggcactaagctgttgtattaagcatgagaggtgtttgtttaacgttggcaaagggatttaacaagaaacaaaaagcttcgcgtccttgttttgaccgtcgacagaagtccaattttcttgcctttctttatccccatttctcctccctccccttcccccatcacatccactttcggtcactcgttgttggtatttggtggcagctcttggtcctattgctgtggatgttccactgaaaacacggggggtagcggggagtggtaaggaaagcaacttttttctaatttttgtattggtatccacaagcgtttgtattttttgaattgcaaacactgtgttttctggtctttgggggttagttgaactttctgtattaccttttggaaaacctgagttttaccacagtcttaagcagatttgaaataaattcttttgacactgccaacaacagaaagac

SEQ ID NO: 211 - DNA, 4473 bp, Homo sapiens
aaaagtcgggagtgccatggtgccagctggggatcaagaccgcgcgccacacagggggaagccggcccaggctggggctcgcacctcacgtgcctcccgggccctgcgatcctggaggcgctcccaggccgcgcgcgccacggtcacccacccacgtggggggcacgaccgtgggagtcacggggggtaccgtgagggtcacagggggtgccgcagggatccacagtgggcttccgcggggcctccacccctgagcttcacagaggaagtgaaatttgagctgcgcgccctgaaggactgggacttcaaaatgagcgtccctgactacatgcagtgtgctgaggaccaccagacgctgctcgtggtggtccagcctgtgggcatcgtctccgaggagaacttcttcaggatctataagaggatttgctctgtgagtcagatcagcgtgcgggactcccagcgagtcctctacatccgctacaggcaccactacccacccgagaacaacgagtggggtgacttccagacccaccgcaaagtcgtgggcctcatcaccatcacagactgcttctcggccaaggactggccacagacctttgagaagttccacgtgcagaaggagatctacggctccacactgtatgactcccggctctttgtcttcgggctgcagggggagatcgtggagcagccgcgcaccgacgtggctttctaccccaactacgaggactgccagacggtggagaagagaatcgaggacttcatcgagtcactgttcatcgtgctggagtccaagcgtctggacagagccacagacaagtctggggataagatcccccttctctgtgtcccgtttgagaaaaaggactttgtaggactggacacagacagcagacattacaagaagcggtgccaaggccgcatgcggaagcacgtgggggacctgtgcctgcaggcagggatgctgcaggactccctggtgcattaccacatgtcggtggagctgctgcgttctgtgaatgactttctgtggcttggagctgccctggaaggattgtgttcagcttctgtcatctatcactatcctggtggaactggtgggaagagtggagctcggaggttccagggcagcacccttcctgctgaagcagccaatagacaccggccaggggcacaggaagttctcattgatccaggtgccctcaccaccaatggcatcaaccctgacaccagtactgagatcggacgtgctaagaactgccttagccctgaagacataattgacaagtataaagaggcgatttcctattacagcaagtataagaatgcgggagtgattgagttggaagcgtgcatcaaggctgtacgtgtccttgcaattcagaaacggagcatggaagcatcagaatttcttcagaatgcagtttacattaaccttcgacagctttctgaggaagagaaaattcagcgctacagcatcctctccgagctctatgagctgatcggcttccatcgcaagtctgcgttcttcaagcgcgtggccgccatgcagtgcgtggccccaagcatcgcggagcctgggtggagggcctgctacaaactcctcctggaaacgctgcccggctacagtctgtcgctggatcccaaagatttcagcagaggcacgcacagaggctgggctgcggtccagatgcgtttgctccatgaattggtctacgcctcccgaaggatggggaaccctgccctctctgtcagacacctgtccttccttctacagaccatgctggacttcttgtcggatcaggaaaagaaagatgtggcccaaagcctagagaactatacgtccaagtgtcctgggaccatggagcccatcgccctccctggcggcctcaccctgccaccggtgcccttcaccaagcttcccgtcgtcaggcatgtgaaactattgaaccttcctgctagcctccggccacacaaaatgaaaagcttgctgggtcagaacgtgtcaaccaaaagtcctttcatctattcaccaattatcgcacacaaccgtggagaagagcggaacaagaaaatagatttccagtgggttcaaggagatgtgtgtgaagttcagctgatggtatataacccaatgccgtttgaacttcgagttgaaaacatggggctgctcaccagcggagtggagttcgagtctctccctgcggcgctttctcttccggctgaatctggtctgtacccagtgacgctcgtcggggtcccgcagacgactggaacgattactgtgaacggttaccataccacggtcttcggtgtgttcagtgactgtttgctggataacctgccgggaataaaaaccagtggctccacagtggaagtcattcccgcgttgccaagactgcagatcagcacctctctgcccagatctgcacattcattgcaaccttcttctggtgatgaaatatctactaatgtatctgtccagctttacaatggagaaagtcagcaactaatcattaaattggaaaatattggaatggaaccattggagaaactggaggtcacctcgaaagttctcaccactaaagaaaaattgtatggcgacttcttgagctggaagctagaggaaacccttgcccagttccctttgcagcctgggaaggtggccacgttcacaatcaacatcaaagtgaagctggatttctcctgccaggagaatctcctgcaggatctcagtgatgatggaatcagtgtgagtggctttcccctgtccagtccttttcggcaggtcgttcggccccgagtggagggcaaacctgtgaacccacccgagagcaacaaagcaggcgactacagccacgtgaagaccctggaagctgtcctgaatttcaaatactctggaggcccgggccacactgaaggatattacaggaatctctccctggggctgcatgtagaagtcgagccgtctgtatttttcacccgagtcagcaccctcccagcaaccagtacccggcagtgtcacctgctcctggatgtcttcaactccaccgagcatgagctgaccgtcagcaccaggagcagcgaggcactcatcctgcacgccggcgagtgccagcgaatggctattcaagtggacaagttcaactttgagagtttcccggagtcccctggggagaaggggcaatttgcaaaccccaagcagctggaggaagagcggcgggaagcccgaggcctggagatccacagcaagctgggcatctgctggagaatcccctccctgaagcgcagtggcgaggcgagtgtggaaggactcctgaaccagctcgtcctggagcacctgcagctggcgcctctgcagtgggatgtgctggtggacggacagccatgtgaccgcgaggctgtggcggcctgccaggtgggcgaccccgtgcgcctggaggtgcggctgaccaaccggagcccgcgcagcgtagggcccttcgccctcactgtggtccccttccaggaccaccagaacggcgtgcacaactacgacctgcacgacaccgtctccttcgtgggctccagcaccttctacctcgacgcggtgcagccgtccggccagtcggcctgcctcggggccctcctcttcctctacacgggagacttcttcctccacatccggttccacgaggacagcaccagcaaggagctgccaccctcttggttctgcctgcccagtgtgcacgtgtgtgccctggaggcgcaggcctgagcccgcctacttccgtccctctttctgcagggccagaggtgaccctgcctggcctcccacaccccctgcaatgagcaaggccttcactgcagccccatctcctcctcctcccccagacccctcccagccctctcctcctgttcctcctgtagcatctttgctgggctacgcagaagccccggacatggcagccccaccccatgccacgccccttcctacactgttccctggaccatacacaggctgaagcagaggaaatcccaaagcgggtgcccatccagcccaggtcccaggatccctgcacccatttctgtgacctggggccccagccgtgctgtgctgctcatcccagcagagggacctccctcgtccagcgacttccctttggccatagaaagaaatggtgagcatgagactgggcacagcctgagggcgtgggcagcttcccaccctccctgggccttggaatcccccaaggctggttttcttcctggagacccccatgggcaacttggcaggagagatggtgccgtaggaggtcgtggatggttgatgccaagagaggccctccacccgtggtgggcaaatgtccaggcctgggctggcagcccagggctgtttctgggtgctccctggccccagggtggcgtctggttaccatggctgtgtgtgtccatgtctgcaagcagttcttcaataaatggcctgcctccccc

SEQ ID NO: 212 - DNA, 3873 bp, Homo sapiens
aagtagaaaaaagaaatgccgtgcctatgataagggagggattccttataactctgtgcagatattcacagttctgtaaagattcttgagaaatctctgcataaactgagaacttcatgacaaaggacattagatttttagaatttgaaaaaataaactcttctatacaacccggactggtccacaatggatttcactttcaatatatcaaacagctcctgtaacttggcaaagttcttgtacatccgctgcctctcttactcgtcctcccaccaataatccaatgagatgtacaaaagtcaacttaccagaaacaacacattacaactatttagctctttatggatttcaaacatacttttccatctattttctctttgaaatctgtccaaaagttggcaggaaaatagcattaaccttggttcagcttttgtcagcaaatatgattaagcagaaggccagtggtgggcgatggggcgtaagcacatgtgaaccacatgtgaaccacggtccacgcccaaaagtagcagcagtagcaatagtaatgacaaaggaagagctaacagccactgttgtttgaatacatgccagacattctcttaagtgctttactgccaaggtcattttgaccactcttcttggtgccttattttcataaggtgctcatgctggctggtgacccaagggttattaactttctgtggatcgatcgcatctgtctagttctgtctataagacaaaaaccttgtcagttttccttgatctcatgctctccctcaccgtccaatccaatatgaattttattacctagatctgattgattttccaaacaaaatatctctgcgttcatgactgttattttatttaaccatcatacagccccttgaagttggtgtttttcttatcccattttacagcagaggaaactgagatttggaggtttaataacttgtccgagtccacatggccagtaagtgatgggacttggatttgaatataaacccattcagagtccaagtctatcttctcagtctccagagcttaagttcttgatagtaatagctaccattagttgattacttatcaggttttaggcactgtgctatgggctctgcctgtgtgatctcatttaatcttcccacacaacaactttatgctcgtacttcaggtagatactattgttatcccacttttatagagaggaaacagggactcagggaggttatggaacctgcccaaggtcacactgctcatgagtgagttgacctcagctatttgattccagattccaagcaattactcaggatactgaactgctttccaaaattggggttcagaaaagttaagggatttgtaaaggagcataggtcaggtaaatacggaccagggccaagacccaactcttcacatgggattatacttgaggcatgcagttatcttatccctctctcctctgcagatcaatcataccctcaccttaaagcctcttacctctaacatcagccttaccctgtgtaagtctcttccactgcatctagtgatttcccatcagcgattccccagtgctgtgtctacacctctgccatggctaccactgcccgggcctccctacccccacacggtctccagtccctgagctggtctgctgtctgctacagttcagacaggctgattaccatacagtcttggctgctaagaaccacgagaacccttcaaatccaccaactgccactgtgacttcctaccttttgaaaccagacatttcaaatgagtaggagccccagtcccagacaaatcctgcccatccccctcactgataaattttactctattggctgtattgcatccttccagatgttttaagttaagattgggaaagctgtgtttttactggattgaatcacagtgcttggctggcattttttggccctccatacaccccttagatttatcagctaattgcagacactttgagagaataatacagcatgtgtttattatgacaacccctgttagtgtgcctttgtggttaaagatccacggatggttcctttaccaatccctggttaaggatcagagttggttcaaaaaggttggttgaaactcgggttgggtaaaaatttcatgtgtgtgtttggggaatgggaacaggactagtccaaaagctctttttaaattcttggactgttttgaagtctttagttttggatgataaaatgatttattaggagatgtcaaatgcctgaggaattttatttaaaacatcaaaaaacagctttgtgttgttctaatatcactgtttaataagtttctccctctgggctacctctatttctcaaatgtgggctgtctggagacttgtgcctgaggacaagtcaaagggggtggcttcctcccttggtcatggcaaccactggctgaagtaccccatcaaacaggaagagcccaagagcagcaagttcagggattggcaaatggacaatcttcacaattcaggcagggctgtctgggatgaatcactgtgcaccaggatgctagcaagtcccagtcctaatacggtgctatatgcgcaagagaccgaaaagactagatcaaccataaggcgctggggaagccagcagggaaacacaggtgcccaggatatatccttggggtccttgttcccaagttagactgacaatgagtggaaaacaggagctcagtgttttccccaggtgcccagagcaggtgtgtgaggaccgctgactctaacagagatgggcaagggacatgggagtccggagcattcccttcatgctacagtcaggatagacttagggaccagggaggaactgaggctgcacctgtgtctggggtgggtggaggtggctaggtaagccagaggctgaggaaatgaggcagaagctgaaggaactaattacttccaactgcggagtcagaaggatgctgcaaacaaataggggaatcaaagtataaaaatgccatgaagttctacagagtgaaggaaaagtagtcagaaaatctgaattttagaattgtcaagaagaaatgttgcttttggtgacattcaggtacatagagttacctaaaatacatggttgggagataacctatttcaatgaatgcatcttaatattttcttaagcatgtttgttcattttctttcgcaatgcttctctataaggatgcccagatttctctctggaatggattttgaagaagtcctgcatcgaaattctagcagctgaaccatccaccatatgtgcaggagagtcatttcaagttgtcgtgagaggaaacggcttccgacatgcccgcaacgtggacagggtcctctgcagcttcaagatcaatgactcggtcacactcagtaagtccttgcagagtccatgggtttcttcgacaagtggcttcaaggaagggaattcccacccttgtcttccagcaaggccacacacatgaaaccagcagaaaagagtcttatttgctggaaagacccccagcaagggcatagtgagcccttacagtggttccagtcagaaaaggcaccacttgggtgggcacagccccatgggtgtccaacttggtaagcagagcaaggctggacttgagtccccgtcctccacaaaacacagagccacaagccccagccctgcagcagccctccggaagcagcggggcactggtttccttgtcccctgccatctaccgagtggctcactctcaggtgggagtgctggtgatggttaattaggactgcagaaacatgagcctccttaacaaagtattgggactcttaagggtaagtgtgaaaaaggaatggtctaaatgcattaatcttgaataaaccgaaaaccaaaccattaggcttgc

SEQ ID NO: 213 - DNA, 3534 bp, Homo sapiens
tgtttgctcacatatttatgttttctggtgtttttctttccatcctgccttttttacttccatctgggattacttttcttcatctggagaattctctttagtatttattttagtgccagtcttctgacaatgaattctctcagcttttgttttttgaaaccttctttcttttgcctttatttttctgtatttttatttttttaagataaaattcatgtatcatgtaatatacccatctaatcattccattcagatacaattcaatgttacctttatttttgaaggatatttttgccttgtatgaaatactaggttcaccattttattttattttatttttgagaccaagtctcactctgtcacccaggctggagtgcagtggcacaatcttggctcactgcaacctccacctcctaggttcaagtgattcttgtgtctcagcctcccaggtagctgggattacaggcatgcaccaccacgcctggctaatttttgtgtttttagtagagatggggcttcaccacattagcgaggctggtctcaaactcctgacctcaagtgatctgcccacctcggcctcccaaagtgctgggattacaggtgtgagctactggcgcccagcctaggttcaccattttcaagatatcattccaatccttaagttctgtggaaaaagccattagttatatttcctttgaaggtaatgtgtcttttttctgtggtcacttttaagattttctcttcgtctttgtttttattttttattatacttttaagttctgggttacatgtgcagaacgtgcaggtttgttacataggtatacacgtgccctggtggtttgctgcacccatcaacctgtcaccaaattaggtatttctcctaatgttatccctcccctagcccccaaccccccgacaggccccagcgtgtgatgttcccctccctgtttccatgtgttctcattgttcaactcccacttatgagtgagaacatgcggtgtttagttttctgatcttttgatagtttgctgagaatgatggtttccagcttcatccatcctaagattggtaaacttcctgaatctgttggttgatgtccttccttattagaattcttaaccagtcattcttcaaatagttttttccaatccgttttctctctcccgttttctaggattgtgtgttatactatgttccatatgtctgttatagtcctttgtttgccatcttaatttctccctgtacttcaatctgtatagtttttactgacctaattaacttatcctgttctgctgagcctaatcaattttaaatttagttgtatatcttatattttggattctaaaatatccatgacacttttttgtaggtgccaagtctctgatcatatcttgtcttttcctctatattcttgaacacattaatcaaagtaattttaaaactcttgtctgagaaatccagtgtctgattactactactagttgtttgtttccattgtctgttgtcagtcatttggtgctgttttttagcatgccttataagtttggtgaaatgtcatacattgtgtgttaaatactgtaggggctttgaacgatgttatcttcctctaagatggttatgttttcttcttgcagtctgataaaatacaggcatatcactgtaatcctattgaaggttggttttagactttgttgggcttgtacatttcagttttgctcttactcctagcatatggcctctttgggctctcatctgaaaatctagggtgtttatcagggccacttcacctcggtgaccttgaattccaacctttccctcctcagtactaagagctgctcagctcgttagcctctcatctgctgctttttgctggatttcttgaagtctcaccttgttgcacaggagtctgcaattggcagacacctcaaggagatactgtaccagtatttcaggctcacttccctgaggtttcttcgctctgggattttgccccttaagtcctagctactttcccaagctccaacttttgtctcttcaaccaagtgggattactgcttgctgctaggtatttatttccctgtgttgtgaatttgcagtgccttgaagaagtaatcaaaatgaacacagagctcaccaaagtgtgcttcccttttttccctcctttcagctattttattgcagctcgtcaagttctccctgcattggtttgctccctgttgcctataaaagatgttctacttaacccttttcctgtttgccccaagaatacttgccagcagcacttgctgctgcagtatttaccccaagataactttgccacgaactctcgcttttattattactttcgtttagctctagtatattgacttcagaaaaaaaggacatcgttctctttatagcattctgttcttagtagtggtatttccatttacaaagtataataattctcgatcgctgaaaatgtcgaatcctagaaaatgtagcattcctacacgtgatgttaacatcattctcgaacagttcttggacagagatttatttaatgaattcgatttttctgaaatagatgattttgatgattcagatgcttctgatactagatctgtttagaaataacatcaagaacagtttttatattttattttcacattgaaaatcagtcagatttgctttagcctcaaagaatgtgtttacgtaaaattaaatgaatgctggcagtgagctgtacttttttttctaaaccggaaaagggttaatatagctttcatcgttgttttcagtaggagggctagtccaatcacaagctactctattgtggccaaaagcaaaaatctggtggtaatcatttttaatcgccattgttgatttctccgcagtggcttctggcatcgataacttggttgtcacatggtcatatgtgaaggcacccggtttattcatttgttcctttgtccattaaatagtttttgagcacttctttcaggccaggtattactctagacacaagcaatataacaatatttaagataagatctgtgtcactttggcacttgcagcctgtttttatagaaaggctactaaatggttgccgagtcggacttgtggtaattaaaatagacttttcttgtgtgggggttgggagtgagaaaaaagagactggaatcttttagatgattacatcttctttatataaatatttttagccttttgaaaaaactctgtagagcttaatgcagttcacagttcacccacactacatcaatatttggcctaccttttgcaagcccaattccctaactatgagtttctgtgttacataaaaatctcaccgggagcacaattatttgacaatttgagttgaaactccaggaactgatttatggagaacaaacttagctctgaaattatgtctctttatgaatatcgacatgaaatctgatgaagaatcatcctactgtggtttcccattttaacttctgtttttgaaaaacatttcagatgcaactaagcacttattaaatgcttcgtgatacc

SEQ ID NO: 214 - DNA, 998 bp, Homo sapiens
agggctgacagaagtgaaagtgcccctttcccatgtagatagtgcggaggactgcagtaaccctgctctctcactctcctccagcctgcatgggagccccctgacagatgcggggctggccttgctgaacccagccctggccctccaccctgccctcgtggctctggacctgggggactgcatgctgggtgatgaagccatcaacctcatctgtggcctcctgcccccagatggggccaaatctggcttgaaggagctaacgctgagtgccaaccctggcatcacccctaagggctggagccgccttgccattgccgtggcccacagctcccaggtgaccatgtggcaggaatgctggctgtagctgtggcctctagtcgtaccctagaggtcctagacttggagggcacagggctcaccaaccagtcagctcagaccctgctggacatggtagaaaattaccccacagctttgcggagcctggtgttggctgagaacagcattagcccagagctgcagcaacagatctgtgacctcctctctgagggagaggaggaggaggaagtggcaggaggggctggcgacacccaggaatgggagagagggcgggagcctgctgcccaccagagaggcagcagctcctggatgtgccccagcgatcccagctctcagatggtgctaatgacgtcaggactaggggacagtctgttggctgagaccgagatgtgactctccactgggcctctgcacaccatttcacttatctatgtcccgagcaccttgccccagatatcagggtcaggccctgggacttgggagggaactggggtcaggggctgcatgggggctctggcagctcctggcagtgtggtgggaaggaagctctggaagctgtgactgagcaacagccttggggggcacttgaacccacggcaatgcctttgaacttggcagctctggctgcaacccgctggctcggaaaagattttatgaactcc

SEQ ID NO: 215 - DNA, 3916 bp, Homo sapiens
gttgatgagagctgctgctgaataaaatcatttttcacctgcctacggccccccgagtgttctttctgcttacccacccactccctccagacctcaacatgacctttggcgtagtcatgtacctgacaattgcgacgttggcaggatgaagtgagtaggtctttggcccctgagggctcctgggtcagctatgtggctgcagcacgggctgtacccaggggcagcggtgctgcttggatgagccccagtggaaacgcgggaggcagtggagaggtctcctgcaagtgtgcgagcacacagcaccaagaaggaatgcacctttgctggcagcgtcggatgggcgtttctgacagcactgcaggaagtacatgctcagttccacaggtaagggacctcccaggacaagctgagcacctgggggcccaagtgcacagcttggagcaggacctgggggtgggggacctccaggtgcaagcagggcacttagaggcccagataaatagccaggaacaggatttagcaacagctgtcagcccggccttgagcccatcctcctggcgggacactccgattcagtctgatgctgaggaggaggttcctccactgctggatcaccctgtgatccatcagaaggtagaacatgagcagccaatgggaccgcaggcgagatcccaggacccctcacagtggtggcacatacctcttatagtgcttatacccccactgatttgagggaagtaggtaaacagtctggcagcgtctgaaggagctgatagcatttcttgctccgcctctgagatggagaatctggcttctatcacaactcacccttcccttcatcggcggctgcagctgtgccaacggttaacacaagggcaaagtgactacatgtaaatcaagtggctgacggcagccatacggactgtttggaatgatgccagagagaccccagaaactgtgagtaaatggcaatcatatactgatttggtgcaggtgctccgggagacggatatgcaatatgcagcaggctgtttgatcggaatatctggggccagatgatgaacgctttacctcccctatgagggatcttgtgctgagttcagcacccccggatgctttggccctctagctgctgttctcaccccgtatgtaggacaccgcatacacaaagtgactattgctatggcagcccttggggaggcagaaggccattggtgggacctgggagtccacgccgtaaagaaatggaaggtgcacccttcacaagtaaccatccacgagattaaaaggggcccaggcgggtgacccacatgcggatgtggattgatttacttgcagctggggttactagagagaaaattgacaggcaacccaatggaatgctgttggctctgtggaggcaatcgtccccagagctgcaattctgaagaatgcccaaggaggggcaagacaatgttgttcaacccagccccacctggaaacttttcagctcaaggactatttgcagatgggagaagacattaggcctttcctgtttgattagggaactggctgagttgcccaactcaggggaactggacaactggaggctatatgaggagctggcaatcctctggtcccctactaatgtacagcgggccctagcactggtagacactggtgcagactgcagtctagtttatgggaacctggataagtttctgggaaaagctgcattcattgacagttatgggggccaatctgtgatggtgaacctatattggcattggctactctgctacccacctgtacactctgtatgtttctcctatacatgaatatattctgggggtggacattttgcatgatctggacttacacaccacagccagagaatttggaatcctggttcgtgtagtaaagccagtactccatacacatcaccggccccaagttctgccacaaccccaacaacttacttccactcatcaataccgtttactggggggcggcgggggagcacacagagataactgagactaataagaagttagaggaggtgcacccataacccctatgattctctagtatgaccagtcaaaaagcctgatggaacttggcagatgacagtggattatcaggaactgaataaagcaacatcccctctgcatgcagctggaccttccatcatagacttgatggctgtttgacaatggaactgggacagtaccactttgtgatgggacttggctaatgcattcttctccattgacattgctccagagagccaggaacagtttgccttcatgggagggtgacgacggactttcacagtgttgcttcagggcttatatgcatagccccaccatatgtcatggtcttgttaataatgttatattcacttctgattctcttgcaggtttagaagcagcaatgcccttcttgcctgggattgggatgatgcagctgagacagccttcctggtagccaagtaggctattcagcaagcacaagccctatgggtagttgaccagaggtgcccatttaagctagatgtgcatgtgaccacagatagtttcagttagggcctatggcagtgcatgagtgcctgagtatgccagtaggcttttggtcccaattatgcaagggagctgagctccagtattccttgatacagaagcagttagtaataataggatgggtgtgttcatggataaccaccccctggacagggaaagcagttagtaactgtatatactgcccttcaggctcataagagcatggcaggaatggctacaatcatcaggcagacaactttcccaacagtggggtgggtacactcgtgggtaatgaccccatcgactgggacagcacagacatccactttagcaaagtggggagcctacttgcagcagtaaagtacactgattacaagtcccttagcagtagagttacaggaagtcttgggacctgtagtcctaatgccaagtaaggccatggggcctgaggcacccctaaaccctaagccttcatcattaggaagggcattctcccattcctaatagggcttggtacacagagatgtgtaggcagggagctactgctgcctggattgctgccacagtccagcctagtactaacaccatatgggttaaaaccaggtgtaggcaaagtagctaatgagctgcactcagggcaatgtgaacagtaatcaccaatgttgcaacatctatggtaatctgtgccaacagccgagcagtttattgaagcttatgtatgtgatgggcttgtgtgcccagagcctatgtataaggcttatgtgtcaggcctatgtgcccagaagcctatgtgtatgtatcaggcctgtgtgccaaacctgtgtataaaacctgtgtgtccagggcctatgtctccctcagcctagggggagtagtgaaaggtacatggatgtgctttggtcaaggaataggccaaggtggatatccaagcgagtttggtgcgtgagtgtgcacctccacttgttatataacttgtttgtgtaagttcatacttggctctgagccactattgctgtaaaaggtagaactgccctgtcgacactgtgcacaagagacatggctcttggggctcggctcagctcaacatggcttgacatggcgggcgtgctggcgtccacagaaagagagagtcagggctgtccatatttgcagatgctccctggggagccaggatacagcttggattgcttgtgcccagagaaagagttaagctgttgaccctgaggccaagggagagcaggccatacagctgcaggtgtcggggcagcaggggccacagagcgggagcagacagccgagacacaggcgaacagtgtagagagctagcgtgagaaagctgttgatgagaagtgctgctgaataaaatcatctttcacctg

SEQ ID NO: 216 - DNA, 4199 bp, Homo sapiens
gacctctgatggtggcagggttgcctgcagcataccgctggggagggcgtgcacccttcccagccttgccacccagggcaggctctggaacctcagtttaccctgctgagaagcagggactgctgcgtggatcaggcgatctatgtaaagccgctgatgtgatctcatctaggacagctgagaaggatacacctagaatctgcatgcttttaactctatcggcatccccaggccacagacaggagactttctgcagatctgtactttgtgttggaaaatacgtctgcttgtgtgtgtgcgtcggcagcattgccataaccagcattcactttcctgacttgcccaggctgcagcatgcaagatgagtgtcgcatgggtacctccccgcctcttggacttttaaaatagagccgtctctccagaacagacgggcacaactaaggccagatcactgataacagtatcagtatctacatgctaaagacacagcccgcccccttcccatggggttctttccttggcagaagtcaccaaggagactgactttgggagaagtaatttctcccccttccggatatgttttgcttaaaacctaagaagaaaactcacaagaccagactaggaaaatttcagcccccaaggataatttttcagaaagtaatgagcactggaaaatgagggctataaaggaagtctttaggtaataatcataactataatgttcaccactttgaagtgcattaatatatactaaaattacagaaaatattaagtctgctgcaggggaagggggcgtgctttggagcttgtggctaaacctcctggaccagctctgttctcccggccacagctggggctatgtggcccctggcctgtccctgccctcacagagacacccaccctaagagaggatcctgtgcccctagctggggtccagttgcagacaccgtgaatgtgggatggagaatcagtatcccccgcagcgggctccttttggggctgtgatgttttatagcctggcaagggaatgccaagactccctgagggtctggctcactttatcagggtcccgctgcttgagagcaggagcctgggaggcgaggtgtgtagacgccccagccggggcccctcgaggctgcagtcgggctgaggcattcattcctccgcaggggccccggggcgggagcagcgggagcatggccatgtcggctgcttgctttctcctgctgcctggctctctctgttcccctcctgacccccttctgcctctcctgcgttccccttcctcactcccctccttcaccttcagagccagcggacttctccaggctgcacgcaggcgaggggctggcaattgcaggtcaagcaggctcagctcggagcagcgggaggaaagatttacggttcctccctgccctgcttgatggacaattaaagccgtgcatggttggaggagagcagtgtcgtgaagagtcaggatggtcagaataaatcagtcacctccacttagacggctgagctagactgcttccccgggccttcgaggtgggagccccctggggtgtggctttgaaggttcctgaatggactgttcaagggtttgacatactctgagctccatcagagtcagagcctgaagaccccgggggtctcctcacaaatggggcatgtgctgtagggaattaagggaaaattctggataatgtgtttggagggcgttttgtctccatggtatctggcatttgcaagagcctcaaacctgaatgtttggaagtcaggatagtggacccccacctgcaagcagagcttgtgcacatgtatgtgtgcacaggtgcgtgcatatcagtgcacacatgcacacgtgtagattgtacatgcatgtgcctgtgtgtagagtgtgcacacaggcatgcatgtgcatcctgtatgtgtgcatgtgtgtgcatgtatgtgcacatgcacaagtgtgtttctgcatttgtgtacccacatgtacctgtgtgcgtgcatgagcatatgtgtgtcgtacatgtgtgagcacatgtgtgtgtcatgtattggtactggtgcttgcctcttggacatcgcaggctccacttgtgtctttaaacacacacgcccctctgcaaggctgccgggagctgggcttctgagcatccaccaagccctgcggccgtccttcttcatttgttctgtgtgttatttcagtaccttgaagactctggcaatttcctcaaggaaactttgtctttgtggaaatgagatgccagcactcctcggccctcccactggctaattgatgatatgatcccgcgtgggagacttgccattcctggaaatgctctttatttcctgggccccccctgccccctgcccgccatcgtctgatttctacgagctgctgcatgtgaggtgcagggccaggcatttgctgtgactcagcccatgtgccaggcctttcattaacttggatactacaattatgtgtgccaagagactgcgagggccatttaggatttttctccctttaagaaaatattcctttttccccagccaggtagcccagccctttgcctctgcagctgtggcccaagcactcctcagctctcccggcaccaacctgcaacaaactcttgttggggggctgcggctccgccatggttctgtcggaggtgctcagtgggtggtcaaggcagcctgcccttgggagccgcaggacgtggcctgctgcggtggcttcacggtcacggcacgaatagcagcgtgcgtgcttttgtgcctgtgtgagcacatgtacaccccatcggcacacgcgaggatgacctttggcacagaacacctgctgctgtggcctgcacagagaagggctgaccccaggacagcggctcccattcgcctccaccaaggccagctggacccttcaagggaccctgagaatctccgagcgtgggcagtggggtcgtgtcgtgcgggggtggagttgcacgggtctcctgtgcacctacacatgcgtgctggccagcatattagtatgttcgcaggggtagcctgaccctcttcccccacttaggagatgcgtgcgtggaaacttgcccccgtgggtgtcttgggatgaatatttgggatcctggtggatctggattgcagagtagctgggcactgtaagagttcctgtaaatgttgggtctcctggggagggggaggcatggagcacttctcacttctgtgggtgggtggaaggttggggaggggccacactggctcaagatcaccccacagggagcaacctaatctgaggacagacctgcctgggactctgtggaactgagatgagacacttgcttcccccttcaaaggtcatgagattctggggacacgggctgccttccatacggtacccacaaagctcattaaaagcaccattcagaggcctcgttatctcaaaaaggaaggcaagagtccaacccactaagcaccaaataacaactcaacaactcaaaaacttatttttttaaacttcctggagttgccatggttacttgcacggtccctgcgtctctgttgctctacgtggagctgcttggaggaggaattaaagcctccaaggttcaccccttggaagggtctgtttatgctcctctgtggaggaaaagagctggagaaggtagggatcttccaggaccatgggatgtgattttccaacattgcacttcggagatgctggagacagaatttgtctcccacgctaaaataattatagccaggagaacagagaatacatcattctaagttaaggtccttaacaacgaggagggtgtgtgcgcgtgtgcatgtgtgtgtgtgcgcgcacatgtgcatgtatgtgtgcacatgtgtgcatgtatgtgtgtgcatgtgcatgagtgtgtgtgtgcatgtgtgcacgtgtgcatgtgtgcatgtgcacggtcatctctgcattgccaccaccttcctcctggagtgctcttttgtactggccacgtgtgtaaaggcagtggcacctgaggcccctgcacctgttggtcaccctccagcaggcagcgctcctgctcctgtggcttctgcccaggcaatgttattggaaggcagatttctgcagcaggattttggggagaattgctagtgagggatggtggcaagagggtgggtcaaggaggaataaagaagccaagactcct

SEQ ID NO: 217 - DNA, 3549 bp, Homo sapiens
attgcatgtaatagataaggaatcaagcttcagttattttgacttgcccaaaattgatttggtaagtgacagaactttatttgctgatagtccacaattaaaacttttcattattcaggtagaattcttttcccttttattctatacatgttgatatgcttgttataaagaagcctaggcctgtgatctcgatacccgtggagctctgcagctgcagcagatagtagaatgtatgggaattcacccaaatgcacctacagtagaagtattattcattatttcagagatgctttttcctctgtgtctggttatagatcagttggcatggcatcaagcaggttgatgttcctcttatcccaagccccaagccttactttttcttttttttgtttttgtttttttgagacagtctcacactgtcgcccaggctggactgcagtggcacgatctctgctcactgcaccctctgactgctggattcaagtgattctcctcctcagcctcccaagtaactgggaccacaggtgcttgccaccacacccagctaatttttttgtatttttagtggagacagggtcttgccatgttgcccaggctggtcttgaactcctggcctcaagccatcgtctcacctcggcctcccaaagtgctgggattacaggcatgagccaccacgcccagccattccagccctttttacttttaccaagtggttaccacaacaactttgatgagctgttattcaaaggaatcctgtgatgagcaattttgaaaagaaaaatgatctctgtattatatatttggaattttgaataggaagtaggttaaacatgtgtttaacacttaacacatcccaggggcctctcaattgtggcacagtgtgacccctacatgctgtatgtgtatgaagcacagcagaagcacagaggcaaaacacacctcagtcggcttcccttgagttcccttttaaagagtcttttctatatttctggatcattcctttcttttttatgttttttttggttttgttttgttttgagacagggtcttgctctgtcacccaggttggagtgcagtggtgcaatgactcactgcaacctctgcctcctggactcaagcaatccacccaccttggcctccccgagtgctgggattacaggagtgagccaccatgcccagctttttaattttttttttttgaaacctattacagtaactccctgagatgaagatgagacgtttagcttcctcacactccctcctcctcctccttccccatgcacctcccatgctttgttcaatgttactctccttttacttgcttaaggtactctttcttatgccattgactttagacggaattccttggctttactgagtaagatggggaaattagaaatctgcagtccccaatgttaacactcactcattttgttagctatgactatttcattgtcaagcggttggttggttggttagttggttggttggtttgttttgttttggtttcaccattcatacacagtctgtccactaattataattttttgtgctttatgtgtgggtagattctaaaaagtcagaaaccaataaacctgtattatgattatatagtatattattcacattagttcctagaagtgtggttgactcattaaaaatgtaatcctatattacaaaattcatacaactaaagtgtcaaaggaaattaatgttctctgtttcccccctcaatagctcaggatcatgccacatttaagcttcatattttgatcatgtttttattttcagtttcatcctgaaacttttatttccagttttatgaaagtagtacatgttcacacttttaaaactgaaatagttccacatggcttaaaatgcaaaacacgcttccctttcactaccctttggtgcttcctaaaagccaccattctcaactcttttagctcttcccttagctattgatttttgtatttgttaaaaacatgctcttactgctgtttgttgtttttcagtttgagatattatattatgattattattattaatattagagacagggtcttgctctgttgcccaggctggagtgcagtggtgcaatctcagctcactgcaacctctgcctccccggctcaagcaattctcccacctcagcctcctgagtagctgggaccacaggtgtgcatcaccacgaccgttttttgttttgttttgttttgtttttaaggacacagggtttcaccacgttgcccagactggtctccatctcctggactcaagcgatccacccacctcagcctcccaaagtgctgggattacaagcgttgagtcaccgcgcctggccagagataatatcttattgacctcctctatatgggatgctgtgcccggccacacctcacatacacacattgcactcacacatgtgcttctcctccccagttccttcagcatgtttatgccagtttttgttgaatcagtagtaagtgttcatattatgttaactctgtaattgttctttacacctgagctgtgtagtttctatgtacatgtcacttattcatctccaaattctccaaccaaattgaaaatctcagaacataatgaaagatgtaggccctccttcggattgcattgttttttggagccatccctgcccctgctcccaggtagtctggctgctctgcaggcctgctgcaagctgtcaggcttacattgcccttcgtctgcactctggggatcctcatttctctcccaggttgtgttccttattacctggaccctcttgcttggtttacactcctgtttagatagagcacctcctcctgtaccttcacagaaaaagcacagagaatggaaaactcatatcttgcatgtctgaaaaaatccttattctgccttacatttgaataataattttataggatatagaattttagtttggaaaacattttccttccgaattttaaaggcattgctctgttgtcttctagtttcaaatgttgctttacataaatattctgatgcaattctaattactgattatttgcacatgacctacttttttctctctggaatattttagattcttgggtatctgataatctggaatttcatggtaagatgccttgttgtgaacctttttttattttttatttttattttttgagataagttcttgctctgtcacctaggctggagtgcagtgatgtaatcacagcttgctgcagtcttgacctcttgggctcaagtgatccttctgcctcagcctcccaagtagctgagaccgcaagcacgcaccaccacacacagctgattttttaaacttttggtccattccaagatggccgaataagaacagctctggtctgcagctcccagcgtgattgacgcagaagacgggtgatttccgcatttccaactgagcgagaaggcatccatctccaaaccaaggagagggccctcaccggacatcagatctactggtaccttaatcttggactttccagcctccagagctgtgagaaataaatgtttgttttttaaacc

SEQ ID NO: 218 - DNA, 3978 bp, Homo sapiens
tgggtgcccaaattacctgactatgaaagagcctcaagtttggtctgggtctcaagttcatttccaccttggcatcccagacaggagaagctcccaggaattggcttcccttggctttcccttccttgctctccaacactggccagaggtgctggctgcaggtgcacagccactgagcactttcctgatggttttatatctctcaacgcagcctcaggggcaagcagggcacacatgattgtcatgtctgttttgaagagtcacagagagaggaactgtctttcagaaagcccacagcaaagaagtcttcttgttgcaactgaaagcccaggctcctgacccctatccggtgacactctctttaggaacagaaagggtcaacgagaagtttccccagttgtaagtcagtctctaattttcatttgtccattccttctgcatactctctcaaacagcttttacgcaccagaccctctcttgggctcatagacatcatcggccttgaccttgtcctcaggttactcccagcatggtgaagaagacagagacctctcaggggaaacaggaacaaaggggcctgggaacaaagggaggaagtgactcatcccacctggggagagtgctcagacaaggttccaaaaagagacaacatttggtggaggaggaagagagggatcccctcctacaggagcccagcacggtaggagggaagatcagagggtagggtagccatgctcatcatggcttagaatcagcaggaattccacagaggcagaagtacctggagtggggtagaagggaggctgaaacagaagtcagttcccaggagccttgaatgccaagcttagaagtttgatattttatcctggggacttcctggaggtttgtaagcaggtgccagtgtcatcagagctatcaaattcctctttccctctcctccattccttcaggccctcacttaaagtcattagcatggagaccccagatgccaactgcagatatgtcccttctgtcttgtgtgggtcccaggttacaccagtcagagcaggtagcagcttagagcagttgccttctaaatcctccagttcacagatggggagcccaaagcccagagaaggggagcaagggaagcaacatatcagttgtctaccacctcctccagagcagatacagagcctgcgggtcacatttcagccttgggagcctctgcagatgaggacacagtagtcagggaagggcctgcttgacagcccaggtggctggagccaggtctcccccctgcagtgtcacaggctgtgttgggcctggaggattcaggggtggggtggctgctctgcaggaagcatctggggcagggttgggagaggaggggagggcctgcagctgcgctgacattctcctgccacatgcagaggcatctccccatggtgggcacttgaaatagctccctgagctccagaggcccagcatctatggactttaatgtttaaagaacctttgtgtgcagagcagagcaactggagatggaactggactctctacccatcaaccagccaactccaacagaagtagcaacgacattaaccataatgaaaataacagccgaaatagccacctttccagtgctttgaccacaggccaggccctgtgcagagcccttcacctttatttgctcaattcgtcctccccaaagccctcagatggagggaatttttgtatccctgtttcacagatgtggactcgagactcaaagaggttagcaactaccccaagacacccagctgaaaaatggtgggttgggattcaaacccaggtctgggcaatgtcatggcccagctttctccactgctctgcacgtacttctgagaaaggatttcagtatcacataagccaggagagcagcactaatgacagagtactcatctgttggcaaaggctcccctcacccagacacctgcacagctccttcttgtacctcttgcagtctttgtccagtcatccccttctccccgaggctttccctgaacactttatttaaaaattgaaatccctgttcctccaactcccacttgtccctttctgctaattttctcctccatttcactgattgatatctattttcatttcctgggactgctgcgacaaagtatcacaaactaggtggtttataacaacagaatgtactctctcgaaggcttagggctcttccttgcctttctcttggctgctggcgtcaccagtaatccttggcagtttgtggctcaccactgcatcacaccaatctctgccacacatggcatgtcctctcttctctttatattgtctttttaggacactgatcatgttagataagagcctcccctattctagtatgaccttgacctaactagttacctctaacaatatctggacttctattcattttacctggtgttttatcatctgtctcctcccattagaatgtaagctccaggaagcagaaatttctgtctgtcttggtcactcttctgtttcccatcacctaaaacccaacgtaatttgctcaacaatttgttgagtgtgtgtgaatgaaataccaagtctggacaaagtgcaacagaggctacaaggacataatactcaggaacaacgggaaggtagttacttttggaaatctcagaggaaaagcaagtttctgatttattgtgggataagatggagaaggaggtacagaggacagacaagaaaaccagatatcaaatagtagaactggagtctgcattggaggtagtagagagcagaattaaagccgagaaatataaaaatcagtaaggtggagggcaaacttgagatactttcccagaattcagaggaaatcgccaaatagatcaatccagtgagataaaggataacagttgtggatactggagaagggagttttcctaagggaaaaccaggacaaaagaaacagaatcaaaatccaaaacagtagaaacagtagcaatgagcacacctaacacccagattttggttcctaacaccattctccagtaaaaggaaccagggctccttagacaaatggctggttctatggggcaggaaatagacaagatgattctggagtattttgtaataccagaaggtaaggaataacacacatactggtggggctgtatcaagggagtacagttgccaattgaaagagctcccaatggccaaagctggaacaatttgaacacaaaaaattaaagtagtattagaatataacccaaagtataaaataaatctccacaagtttactattatgtaaatgattgactaataaatgggagaatataggcaaacctcctacacagaagaattcaaaataacttacatagatacttcacactccaaagaggtaggtcataactacacacttcttaagttacttccttccaaagggtacagtaggagaaggggggataaaaaagaataacttgacggtcgagaaacctgacaaacgttcccttagcgaggcaatcaaggtcaacatcagcagtgataagtcacattgaaagctcccttgacatgatatgatgggaataactttacctctgtggtcttcttccccaaatcccataaccccagtctaaccatgagaaaaacatcagacaaattacagttgaaggccatcctacaaaatacctgaccaatactcccccaaactgtctagttcatcaaaaatagagaaagccttagccaaaaggagctgaaggaggcatgacaattgaatataatgtggtatattctagatgggatccaggaatagaaaaaggatgtttgagaaaaagactaaggaaatctgattaaagaatgggtgttagctaataataacatcaatatttattcattgtgacaaatgcacaaaatactaatataaaacattaataatagggaaaactggatgaggggttgtatgggaactctgtatatagtctccacaatttttctgttttc

SEQ ID NO: 219 - DNA, 3896 bp, Homo sapiens
attgtgcactactatgcatttctttccaactctgcattcagtgatgtcacactggtggcctggaatctgccacggtaaaagtatttataccatggaaatcggtaaatgccacaattcgggactctttgctttggagagccgctggaaaggatggtccccctgaggaatgccagagggggtctccagatttcaggtccacttagggaagagagctgggtggggaagccacacctgttcctcgcaggaatcccaggcagaaaatgctgccccctattggtggagagaaatatggtcattgtttcacaaccggagagcctgggtgactccagggaggcagctaccaggagctgtagcttatcccaaaggggctggcggcggaagcagttggtgtgggatgaagggatgcccaggccacatcatgtttcaaagggtgtgacaggaatgataaaccactctgcttgtgagaagcctgtccctccgtccctgactggaacatgtcacccttgcattgccttgtgaatgggcagcattgagcttgtctgagggaggaggctcactctaagacagccataagcaccacctggcatgttctaaacatttacagtggtctcacgctatgccaagagctttagatacttcctcatctcaaactctcacaactccacaaggtaggcattattgatcccatttgacagataaggaaaccaatgttcagagaggttgggtctcttgcccaaggtcacagagcaggtaactagtggagctgggatttgaacccaggtctgtttgactccagagcccttggtcccaaccactatagcatccttccttccttcttatattcattcactcattcacttgttcaacaattattatcaagcaaatttcccacagagaatgtagaatttggaaggagtaagaggccatgctatggtggccccacattccagatgtttggagacaggaccagtcttccatattctctctggctgtcagagcgtgtgtcttggtgttgtgtttggtaagcacatctcctgtaactgaggatccagaaagcctgggagagtagacaaagcactgttggcaaaagggggtcaaaggaagatctctgcctacacagaaatacaggagagacctctgtgaatatctggagatatttccccttggcctgggcttgtgggtgagtaaacagccaccgcctggccctctggggcacgctggccagttcaggtagacttcctccatctctctcctggactacccattttccttttgcccaggcaggaggttttggctctgaaggatgccttgctatggacattggtcttccctctcctcacacatgcatctaccctgccccaatgcctcttcaaaggggaggaggcccaaggaaatttcttatgatctctccaaggaactgtggagttcttcctcctccgttgcctcttcctcccaacgctggaccagcaaaggtgctgcctgaggcctctcctgacctatcttgggttctggttagcattgctcaggggtgctcatttcaggggtctggagatatggcatttgggtataggggctgaagacttttggggtggctgggagctcagcctttgggacctctggtcagggcacattgggtggttttgtccaagcaaccagggaagaatcactgagtctccaaagcaatgtaaccagagaggaaagtgtctctaggtggaaactcggggtttgagacatctcacacagcagcagaggtagcactcagtttgtgcaggaaaatatcagtaggggtcatgggtccagtggacttggaagaggctgggtaggggagagtgctggactgcaggactgcccaccctgggaagctgtggggcagaggaggaagcacctcttggggagatggtggagtgagtcccagggaatcccagaggtggtgttggttagaggggtgctggcgatgggaggggcttggccttcaagaaagaagcaggcttacttacatatgtgaggtgtgatctgagaaatgctaggaaagtctaacttggccccactgacctgctgctagtgtccgaaattccactgtaggacctagctcctcgtaaggattcctagggaacatctggccttttgaggcaggtgcagggagagagtagaaggtggagtgataggtccaccgcaggcatgtcccctgacccagagcaggctaaggtgggtgagctctagaaggtccctagtgcaccagggaatggaggtccagggcccctcaaggtgtaggtataggtaaagtcacttagctgatggatatgaggatatggatttttacagtctcctgtgcgtgtcttcccagcaacatttgctatgggatcattgtataccacagactctgcataacaacaggaaacagggctttgccctccatgtgtccatgtgtcaggcgagtggtgcactgggcatcaccttgggtacgaggagcatgacccgggaagccatgcctaaagggaatggtaagggtgccctgcttcttggatatctgattgtctggttctcatgactgctgcttcatttaaaacatgcacccacacacaacagtggggtaggatcccaggcatcttggatgattttcacatcaggaatgaatggatgcatcctttctctgccctgcccacatggaagttctgcagcccacatgaaggcacatctagttctggtgggtgaccatggtgaatgtcagggattgggctgcctaacctcctccacccaccctccttctacggagcctcctgcgctgctgagactgaaaagctgcacactccattacccagcctcccttgcagcctcctgcgctgctgagactgaaaagctgcacactccattacccaggctcccttgcagctgggctctggatgcaaattagattctaccattcagatgctctcctgggagggccgtcctcctgtgtagacgtcctcctgtaccttttagctattttcagttcacaggcaaagtggtggagatgagaggtgttctagagcaggcttcagtatccacttgacagctttctgggtcccaagggtgggaggttggcagagtggggctggactgtgattccagtgcccagtcaccacctttgtgatggttgagaggtggttgtggcactggtgacagcatcctgatccctaaatcccagctccatttgtggttcttgaactcacagccccagcagcagcctctggggttgtgtttgcagaattgttccttgaggcccaccctggaacactctcccccagcccttccaaggatttcttaaacactttctgttttggaaaaaattacaaattcacagaagttgcaaaaatagtacagggaggtcctgtgtacccttcacccagtttctcccgtagttacatcttccttaattgtagtgtgatatcaaaactaagaacttgacattggtacaatatgtgtgattccacagtcctcttatcacgtgtacattcatcaaacaccacggcaatcaagataaagaactgtttcatcaccacaaagatctcctgcactcctatataatcaacctacccctttcgctctctgccattcctaaaccctgacaaccacaaatctgttctccatttctataattttgtcatttcaagagaaatgttacataaatggaaccacccaggatgtaaacttttgaggttggcttttcttccactcagcacaatgtccttgagacccatccaagttgttgatgtatcagtaacccactcccttttgttgctgagtagtattccgtggtatggatgtaccacgttttgtttaacgatttgcccattgaaggacatctgggtcattttcagttcttggctattgcaaataaatctgcttggaacatttgg

SEQ ID NO: 220 - DNA, 3218 bp, Homo sapiens
aagtgcaggctgccgagtcggggcggccgcccacggggaagctgcgaggcgcgggagcacctgggggaccgcttgcagcggggacgcgaggacccgggctgggctttcctcacccgggtaccttgttatcccataactttggtatcctgaaatctgaggattccaccaagataatatgataagaactttcagtgatttggggccatatcctacttagactaatgtggaatttccagatttcctgagagcttggtacagcagcacacactgcttgctaatcagcacaggcaataatgccatctctgcctcaagaaggagttattcagggaccctctcccctggatttgaatacagaattaccttatcaaagcacaatgaaaaggaaagtcagaaagaagaaaaagaagggaaccattacagcaaatgttgccggggcaaagtttgaaattgttcgtttagtaatagatgaaatgggatttatgaaaactccagatgaggatgaaacaagtaatcttatatggtgtgattctgctgttcagcaggagaaaatttcagagctgcaaaattatcagaggatcaaccattttccaggaatgggggagatctgtaggaaggatttcttagcaagaaatatgaccaaaatgatcaagtctcggcctctggattatacctttgttcctcgaacttggatctttcctgctgaatatactcaattccaaaattatgtgaaagaattgaagaaaaaacggaagcagaaaacttttatagtgaaaccagctaatggtgcaatgggtcatgggatttctttgataagaaatggtgacaaacttccatctcaggatcatttgattgttcaagaatacattgaaaagcctttcctaatggaaggttacaagtttgacttacgaatttatattctggttacatcgtgtgatccactaaaaatatttctctaccatgatgggcttgtgcgaatgggtacagagaagtacattccacctaatgagtccaatttgacccagttatacatgcatctgacaaactactccgtgaacaagcataatgagcattttgaacgggatgaaactgagaacaaaggcagcaaacgttccatcaaatggtttacagaattccttcaagcaaatcaacatgatgttgctaagttttggagtgatatttcagaattggtggtaaagaccctgattgtagcagaacctcatgtcctgcatgcctatcgaatgtgtagacctggtcaacctccaggaagcgaaagtgtctgctttgaagtcctgggatttgatattttgttggatagaaaactaaagccatggcttctggagattaaccgagccccaagctttggaactgatcagaaaatagactatgatgtaaaaaggggagtgctgctaaatgcgttgaagctactaaacataaggaccagtgacaaaagaagaaacttggccaaacaaaaagctgaggctcaaaggaggctctatggtcaaaattcaattaaaaggctcttaccaggctcctcagactgggaacagcagagacaccagttggagaggcggaaagaagagttgaaagagagactcgctcaagtacgaaagcagatctcacgagaagaacatgaaaatcgacatatggggaattatagacgaatttatcctcctgaagataaagcattacttgaaaagtatgaaaatttgttagctgttgcctttcagaccttcctttcaggaagagcagcttcattccagcgagagttgaataatcctttgaaaaggatgaaggaagaagatattttggatcttctggagcaatgtgaaattgatgatgaaaagttgatgggaaaaactaccaagactcgaggaccaaagcctctgtgttctatgcctgagagtactgagataatgaaaagaccaaagtactgcagcagtgacagcagttatgatagtagcagcagctcttcagaatctgacgaaaatgaaaaagaagagtaccaaaataagaaaagagaaaagcaagttacatataatcttaaaccctccaaccactacaaattaattcaacaacccagctccataagacgttcagtcagctgccctcggtccatctctgctcaatcaccttccagtggggacacccgcccattttctgctcaacaaatgatatctgtgtcacggccaacttctgcatctcggtcacattccttaaaccgtgcttcctcctacatgaggcatctgcctcacagtaatgatgcctgctctaccaactctcaagtgagtgagtctttgcggcaactgaaaacaaaagaacaagaagatgatctaacaagtcagaccttatttgttctcaaagacatgaagatccggtttccaggaaagtcagatgcagaatcagaacttctgatagaagatatcattgataactggaagtatcataaaaccaaagtggcttcatattggctcataaaattggactctgtaaaacaacgaaaagttttggacatagtgaaaacaagtattcgtacagttcttccacgcatctggaaggtgcctgatgttgaagaagtaaatttatatcggattttcaaccgggtttttaatcgcttactctggagtcgtggccaagggctgtggaactgtttctgtgattcaggatcctcttgggagagtatattcaataaaagcccggaggtggtgactcctttgcagctccagtgttgccagcgcctagtggagctttgtaaacagtgcctgctagtggtttacaaatatgcaactgacaaaagaggatcactttcaggcattggtcctgactggggtaattccaggtatttactaccagggagcacccaattcttcttgagaacaccaacctacaacttgaagtacaattcacctggaatgactcgctccaatgttttgtttacatccagatatggccatctgtgaaacagaagggaagatcgccattggttatacataacagcaattcatttttttcctctgaagttgaacatgcaaagaacatgaccattaagtgctgttttatgtatataagacatatatatgtgtgaaaatatatgcacatatgcaccctaataacatatatttattatattaaatgatatatgaaagaagaattagcagaaaatggaatataagacttaacctttctggaaacgtaataaaccatgttaaaattgtttacac

SEQ ID NO: 221 - DNA, 4144 bp, Homo sapiens
aagcagaaggatatcacttaatgaaataaagcgtgatgataagattagagaaaaaataataaaaaagaatgaacaaagcctccaagaaatatgggactatatgaaaggaccaaatttacgtctgattggtgtacctgaaagtgatgggaagaattgaaccaagttggaaaacactcttcaggatattacccaggagaacttccccaacctagcaagatgagccaacattcaaattcagaaaataaagagaacacctcaagaagagcaaccccaagacacataattgtcagattcaccaaggttgaaatgaaggaaaaaatgttaagggcagccagagagaaaggttgggttacccacaaaggaaagcccattagactaacagcatatctcctggcagaaaccctacaagccaggagagagtgggggccaatattcaacattcttaaagacaagaattttcaagccagaatttcatatacagccaaactaagcttcatacatgaaggagaaataaaatcctttacagacaagcaaatgctgagagattttctcactatgaggcctgccttaaaagagctcctgaaagaagcactaaacatggaaaggaacaaccagtaccagccactgcaaaaaacataccaaattgtaaagaccatcgacactatgaagaaactgtatcaactaacaggcaaaatagccagctagcatcataatggcagaatcaaattcacacgtaacaatattaaccttaaatgtaaatgggctaaatgcctgaattaaaagacaccgattagcaaattgaataaagtcaggaaccatcggtgtgctgtattcaggagacccatctcacatgcaaagacacacataggctcaaaataaagggatggaggaatatttaccaagcaaatggaaagcaaaaaaaagcaggggttgcaatcctagtctctgataaaacacactttaaaccaacaaagatcaaaaaaaccaaagaagggcattacataatggtaaagagatcaatgcaacaagaacagctaactatcctaaatatatatgcatccaatacaggagcacccagattcataaagcaagttcttagagacatacaaagaaacttagactcccacacaataatagtgggagactttaacaccccactgtcaatattagacagatcaatgagacagaaaattaacaaggatattcaggacttgaattcagctctggaccaagcagacctaatagatagataactacagaattctccatcccaaatcaacaggatatacattcttttcagcaccacatagcacttattctaaaatcgaccacataattggaagtaaaacattcctcagcaaatgcaaaacaatggaaatcacaacagtctctcagaccacagtgcaatcaaattagaactgagaattaaaaaactcactcagaactgcgcaactacatggaaactgaacaacctgctcctgaatgactactgggtaaataatgaaattaaggcagaaatgaataagttatttgaaaccaatgagaacaaagacacaatgtatgagaatctctgggacacagctaaagcagtctgtagagggaaatttatagcactaaatgcccacagaagagagcaggaaagatctaaaactgacaccctaacatcataattaaaagaactagagaggccaggtgtggtggctcatgcctataataccagcactttgggaggctgaggtggatggattacctgaagttgggagtttgagactagcctgaccaacatggagaaaccttctctctactaaaaatacaaaattaattggatgtggtggagcatgcctgtaatcctagctactcaggaggctgagacaggagaatcgcttgaacccgagaggcggaggttgcggtgagctgagatcatgccattgcactccagcctgggcaacaagagcaaaactccatcctccccactccccccacaaaaaaaagaactaaagaagcaagagcaaacaacttcaaaagctagtagaagacaagaaataactaagatcagagcagaactcaaggagatagagacatgaaaaacccttcaaaaaattaatgaatccaagagctggttttttgaaaagatcaacaaaataggtagaccactagccagactaataaagaagaaaagagagaagaatcaaatagacacagtaaaaacgataaaggcgatatcaccagtgatcccacagaaatacaaactaccatcagtgaatactataaacacctctacacaaataaattagaaaatctagaagaaatggataaattcctgacacatacaccctaccaagactaaaccaggaagaagtcaaatccctaaatagggattatcccttggaacaagttatgaaattgaggcagtaattaatagcctagcaaccaaaaaaagcccaggaccagacggattcacagctgaattctaccagaggtacaaaaaggagctggtaccattccttctgaaactattccaaacaatagaaaaagagggacgcctccctaactcgttttatgaggccagcatcatcctgataccaaaacctggcagacacaacaaaaaaagaaaatttcaggccaatatccctgatgaacatcaacgcaaaaatcctcaataaaatcttggctggttcaacatatgcaaatcaataaatgtaatccatcacataaacagaaccaatgacaaaaacccacatgattatctcaatagatgcagaaaaggccttcgacgaaattcaacaccacttcatgctaaaaattctcgataaactaggtattgatggaacgtatctcaaaatagtaagagctatttatgacaaacccacagccaatatcatactgaatgggcacaagctggaagtattccctttgaaaactggcacaagacaagaatgccctctcttaccactcctgttcaacacagtattggaagttctggccagggcaatcacccaagagaaagaaatacagggtattcaaataggaagtgagaaagtcaaattgtctctgtttgcagatggcatgattgtatatttagaaaaccccatcgtcccagcccaaagtctccttaagctgataagcaacttcagcaaagtctcaggatacaaaatcaatgtgcaaaaatcacaagcattcctatacaccaataatagacaaacagagggccaaatcatgagtgaactcccagtcacaattgctacaaagagaataaaatacctaggaatccaacttacaagggatgtgtaggacctcttcaaggagaactacagaccactgctcaaggaaataagaaaggacataaacaaatggaaaaaacatttcatggtcatggttatgaaaaatcaatatcgtgaaaatggccatagttcccaaagtaatttaaaaattcaatgctgtcccatcaagctaccattgactttcttcacagaattagaaaaaactactttaaatttcatatggaacctaaaaagagcctgtgtagtcaagacaatcctaagcaaaaagaacaaagctggagacgtcacgctacatgactttaaactatactacaagtctacagtaaccaaaacagcatggtactggtaccaaaacagatacagacaaatggaatagaacagaggcctcagaaataacaccatacatctacaaccatctgatctttgacaaaaaaacctgacaaaaacaagcaatggggaaaggatctcctatccaataaatgatgctggggaaactggctagccatatgcagaaaactgaaactggaccccttctttacaacttatataaaaattaactcaagatggattaaagacttaaagctaagacctaaaaccataaaaaccctagaagtaaacctaggcaataccattcagaacacaggcatgtggacaaagacttcatgagtaaaacaccaaaagcaatggcaacaaaagccaaaatagacaagtgggatctaattaaactaaagagcttctgcgtggcaaaagaaactatcatcagagtgaacaggcagcctacagaatgggagaaaaattttgcgatctatccatctgacaaagggctaatacccagaatctacaaggagcttaaacaaatttac

SEQ ID NO: 222 - DNA, 3816 bp, Homo sapiens
agacgggcatgggggggctgcggctgctggctgtggccctcacgtgctgctggtggccgcagggcagccagggtaagaccctgcggggcagcttcagcagcaccgcggcccaggacgcccagggccagcgcatcggccacttcgagttccatgaatcaacaacatagcagtagctgttggaaaagaagctaaactctacctgttccaagcccaggaatggctaaagctacagcaaagcagtcatggttatagctgtagtgaaaaattatccaaagctcagttgacaatgaccatgaaccagaccgaacataatctgacagtgtcccagattccgtctccacaaacgtggcatgtgttttatgcagacaagtatacatgccaagatgacaaggagaattctcaggtggaagatatcccatttgaaatggtgttactaaacccagatgccgaagggaatccatttgatcattttagtgctggagaatctgggttacatgagttctttttcctcctagtcctagtgtactttgtgattgcttgcatttatgctcaatcattgtggcaggctattaagaaaggcggacccatgcacatgattttaaaggttctgacaactgcattgctgttacaagctggttcagctttagctaattacattcatttctccagttactccaaagatggaataggggtaccatttatgggaagtttggcagaattttttgacatcgcttcccaaattcagatgttatacttacttttgagtctatgcatgggttggacaatagtcagaatgaagaagtctcaaagcagacctctccagtgggattctacacctgcatccactggcattgcagtattcattgtcatgacacagagtgttttgctactttgggaacagtttgaagatatcagtcatcatagctaccattcacaccacaacttagcagggatcctcctaattgttctaagaatttgcctagcattgtcattaggctgtagactctatcagatcatcacagtggagagaagtacactcaaaagggagttctacatcacatttgccaaaggctgtatcttgtggtttttatgccatccagttcttgcatgcatttctgtcatttttagcgactaccaaagagacaaggttattacaataggtgttatcctttgccagtctgtttccatggttattctctacagactctttctgtctcacagtctatactgggaagtttcttcactttcttcagtaacactaccactgaccatatcatctggacacaaaagtcgccctcatttctgatacttgatttttgttgagaggaaaagtgaattggttaaaagagtgcaataaggatccaaatacagtgacttttttttcatacatttagtatgaaaacttgaacagcgaaagcagagcatgttatttatataactgcatttaagcagtaccaagactgaaaaaaaaggtaataaatgaaatgttttgaaatatacttaaacaacaaactttgaagaaagtgttgttataaaattattgaagcgatttctatgtggaaataaatgtgaaaaataactatgatattttggtaaaatattcaccacttataatgcctcatcttaatagctaactcaggtttaatagtcttataaaaagtaatcagttaaatgattacttgcttataaatatctaaactagtccagttatgaaatcagtgtaatacattgatttttaaaactgctgctttttatgctttaaggaaaatgtatttcatatttgagtttaaaggaattgaaattacttcaggaagtgaatataaaataggttcacagttaaatgaataagcttttgtttatttgtgggtggagttattctccaattttttctgccatttttggctctagttcaggttttagcttgattagcaaagtttttgacaaacagtttatgaaaaaataaaacttaaatacattacacgggttgtaaggacaaaggattttaaaatctgagcacttaggtgaagggacaagcaggtttatgtgtttaaacagaaggaagggaaaaggtactatgtgatatggtactgaaattttgatcccaatagaattcatttctcttacgttgaatccccaatcataattaagccgtatacacagattaaattaacagaagcatttcacataagtgttggtttcagtcatcaactacccatgaattcctgcccaaggatacttaatcaggattaaattttctatgaataattgaaaaacaaaacactcactggatttgttataatccgtgttggcactggattctaagtagttgccatcttgaatcctttgtaataaagccatacttttgtgtgtgtgtgtgatgccccagtattgagtatgctagctaaaaaatatcaagtgcctgattaaagaattgctaaatggttgtcaatacttgctgtataaaatgagtattcccattaatagtcactgattggaaattattctgttgctgtttgtcaagctgttcaggccttttcctttttacttctggcttattttaaaaatattttttatctatttactgtgtgtttaagcaagcaacagtgcactgatctggtagttaaattttttaattaaatagttaaaataatgtagtgcaacttaaaaatatctatggctttgtttttgtttttcttttgtacctagtctcattggaaatgactagtattctgcctcattttcagggcagaatatgtgtttgtgacccaaaatgacaaagttaccaagttcaacctgctcattaaatcatctctctattagttctttgtaaatcacttagtacattagagctacaggttaagactagaaagtctgagttatgttttaggtatacatgatcgtctgagtggtcataaccttttcttttatcatgtctcgctaataaccccagctattgtctgttgtgttcagctgagatgcaaaaaagaaattaagcaaaaaagaaaaagatgaagacttttcatgaattttgtgaacttgccaaaaggggaagggaaaaatctttgtgttacttcactcaaagaacataagtaactgcaattaacatatatgaaatttattactctgcttgcatttatgaaactaaccagttttttaaactttaattcttaaatttatggttggaaatgctgataatttattttgttatttaagagctgttgttaagtggaggaaagtagttgttaataaatgtataaaactgttcttgactagtaatcagggacaaaatttatagttcataagtcatgacacagtattcgctctttttctgaatgtttacatagagattcatcactgcagattacagaaagttaagtgtatactacaaactctaattaaagataaaaatcttttctacttttctttgtcagataatgcttttttatgtgtttttacattttttgaaagaagataaatggttcatccagagctttattaagaagcatttcttttcttcccttaaaaaatagatgcttatttttattgacatgtgtataataagatgggtgcctactgtgatgcattttaccaggcattttaccttcattattactcatctctattgtgataaccaggctcccatttaactgagtataagagagaataaatgatttctctaaggtcatcaaactatttagtttttccactttaccttcatgatttaaggaacatgtattagctgtgttttagtgagaatgaattgctatccatcataatttttgctgttgatttgaacattaaaactggaattgtgct

SEQ ID NO: 223 - DNA, 3244 bp, Homo sapiens
cttataagtttattcaatgcaacataaccctcaccagttttactgaggtggctgaccatgtccacgaccaaatacgcctgtaaactgaaattcggttgctgacccattcccagcctcagctttctcactggcaccagggggacagcactccatctgtgggtgtctctttctctctatggctgtctgtctgtgggtgtctctctctgtctgtgggtgtctttcgccatctgtgggtatctctctctgtctgtgggtatctctcccatctgtgggtgtccatctctgtctttgggtgtctctctttgtgagtgtctctgtctgtggttgtctctgtctgtgggtgtctctctgtgagtgtccctgtgagtgtctctgtctgtgggtgtctctcctcgtctgtgggtatctctccctgtctgtgggtgtctctgttggcttccccacttgtgggtcttgcaggtcggtcacgctccagacctttaggccgcagcctgccagtctccagaccgctgtggcatggggtagcagacacgctctccaggggcagatggtggtaatcgcagagattctggatccccatgtgggtgaggtaccagtagaaatgtctccaggcaaactccttcctgcaacctcaggacctgagagactgcctggccttcatgacgtgaaggttgggcacattctcatctgccagctccgggtcttaggcaggtggacattcttcttggctaccgtgactccctccttaaaaaggagttcataaatagcaatctggttcttcttaggcatcaacatctctgcagctgtagggtccaggtccggggctggaaagcatgatttttttctaactgatctctgctgatggcatctagattgttcctggtttttcaccataccagggctgtgatgagcatcttggtgcatttcggatgacgtctccagatacagttacagaacgagtatttttgaggttcttgaggcatgttgccaagttgtttccagaaagctgcacagacttattctgcacagcctagaattctagaatcacagggttctgcacaacctagagttctggaatcacagggttctgcacagctagaattctagaatcacagggttctgcacagctagaattctagaatcacagggttctgcacaacctagagttctggaatcacagggttctgcacagcctagagttctggaatcacagggttctgcacagctagaattctagaatcacagggttctgcacagcctagagttctggaatcacagggttctgcacagcctagagttttggaatcacagggttctgcacagctagaattctagaatcacagggttctgcacagctagaattctagaatcacagggttctacacagctagaattctagaatcacaggctcccagggttgcaaggacactttggagtgtctacctcagcatctcatgaagtgtgggaattccgaggcggtggcggaggaagtgttttccatcttcggtgctttcgttgcttctggtgacagcgctcactgcctctgcttgctgtacgggaccagctgatggaaccgacagggagggactttttatctggccattggccactgccacacactttgtgtaccccgttttgtgtaattctgactacaaccttgtgggatctaggcaggtcattgctgttttgcaagtggggttgttgaagccacaggagatgaaataagctgctgtcccccagccattgagtgctgataggatcaggagtgccagttggtgtggctgaccccagaccctgtgcgtgttacctctaagctacattctagagcagactttttgcccacacaagccttaaatgtgggctggggacagtggctcacgccggtaatcccagcactttgggaggacaaggtgggcagatcacctgaggccaggggttcaagaccaggctggccaacatggtgaaaccctgtctctactaaaaatacaaaaattagccaggtgtggtggtgcgtgcctatagtcccagctactcgggaggctgacgcatgagaattgcttgaacctgggaggcagaggttgcagtaagtcaagactgcgccattgcactctagcctgggcgacagagcaagactccatctcgaaaaaaacaacaaaaccttaaatgtatttttgaggctgtgtttaaaaatggggatattttacacaaaatatccagatttctggattcttttgaagaatcagaagatctgacaatacggagcctcacattcctgcacacacagcagccatcgctggagccactgcctccattagtttgaatttactgcagaccccactcctccctgtcgtccctgtctccagaccacagagttagttgtcattgatcgtgtgccatttgttgtttttttcaaagtagagaagtacttcttcacgctgtgtctctatcaaaaatggacaagtgaaagatgtttcaagaaatgaaaagattttctttttagtgacaaaaaatttctagtatgtttctcatataaataaaatgtgtcctgtatgtagtcagggttcctcagagaagcccgaagctacaggatatagatatgtagagagattgtggaggcttggcgagtccaaaatctgcagggcagggctggcaggctggggactcaggaatgcgcgcagcagagtcgtaaggctgtgtgctggtgggattcttgctcggggaaggtcagtctttgttcttgtaaagcctgcaactggttggatgtggtccacccacattgcggaagggaatgtactctcctcctagttcaccgatttaaatgttaatctcatccaaaaacaccttcacagaaacatccagaataatgtttgaccacatatctgggcaccgtggcccagccaagttgacatattaaattaacccttgtagtccctttttaaacttacacccattgcaatttaggtcgctgctatggagcaagccacagaacctggcctcttaactcatttacccgggctgacccattaggcctttgagtcaccaacaactcactagagaacaagcataatgaagaagctctgctgtaattcgttaatgttaacacttttttctttaaagatgtctcatgctgagcttcgtggcgcacgcctataatcccagcactttgggaggctgagatgagaggatggcttgagctcagaggttcgagaccagcctgggcagcatagtaagattccgtctctac

SEQ ID NO: 224 - DNA, 3729 bp, Homo sapiens
ctggcaggtggactctggtgccagcgccacggccacggctcgctggcctgggggcagtgtcagcgcccgctttgagaatgcctgccctgccctggtggccaccttcgtgcccagctgcccctgggagaccaatgataccctgttctcagtggtagcactgccgtggctcggtgagggggagcacgtgatggacgttgtggtggaaaacagcgccagccgggccaacctcagcctgcgggtgacggcggaggagcccatctgtggcctccgcgccacgcccagccccgaggcccgtgtactgcagggagtcccagtgaggtacagccccgtggtggaggccggctcggacatggtcttccggtggaccatcaacgacaagcagtccctgaccttccagaacgtggtcttcaatgtcatttatcagagcgcggcggtcttcaagctctcagacgctgccatggctgtgctgacggcctccaaccacgtgagcaacgtcaccgtgaactacaacatcaccgtggagcggatgaacaggatgcagggcctgcgggtctctacagtgccagccgtgctgtcccccaatgccacgctggcactgacggcgggcgtgctggtggactcggccgtggaggtggccttcctgtggacctttggggatggggagcaggccctccaccagttccagcctccgtacaacgagtccttcccggttccagacccctcggtggcccaggtgctggtggagcacaatgtcacccacacctacgctgccccaggtgctgatccgcagtggccgggtgcccattgtgtccttggagtgtgtgtcctgcaaggcacaggccgtgtacgaagtgagccgcagctcctacgtgtacctggagggccgctgcctcaattgcagcagcggctccaagcgagggcggtgggctgcacgtacgttcagcaacaagacgctggtgctggatgagaccaccacatccacgggcagcgcaggcatgtgactggtgctgcggcggggcgtgctgcgggacggcgagggatacaccttcacgctgacggtgctgggccgctctggcgaggaggagggctgcgcctccatccccctgtcccccaaccgcccgccgctggggggctcttgctgcctcttcccactgggcgctgtgcacgctctcaccaccaaggtgcacttcgaatgcatgggctggcatgacgcggaggatgctggcgccccgctggtgtacgccctgctgctgcagcgctgtcgccagggccactgcgaggagttctgtgtctacaagggcagcctctccggctacggagccgtgctgcccccgggtttcaggccacacttcgaggtgggcctggccgtggtggtgcaggaccagctgggagccgctgtggtcgccctcaacaggtctctggccatcaccctcccagagcccaacggcagcgcaatggggctcacagtctggctgcacgggctcaccgctagtgtgctcccggggctgctgcggcaggccgatccccagcacgtcatcgagtactcgctggccctggtcactgtgctgaacgagtacgagcgggccctggacgtggcggcagagcccaagcacgagcggcagcgccgagcccagatacgcaagaacatcacggagactctggtgtccctgagggtccacactgtggatgacatccagcagatcgctgctgcgctggcccagtgcatggggcccagcagggagctcgtatgccgctcgtgcctgaagcagacgctgcacaagctggaggccatgatgcgcatcctgcaggcagagaccaccgcgggcaccgtgacgcccaccgccatcggagacagcatcctcaacatcacaggagacctcatccacctggccagctcagacgtgcgggcaccacagcgctcagagctgggagccgagtcaccatcgcggatggtggcgtcccaggcctacaacccgagccctacctggcagtctacctgcactcggagccccggcccaatgagcgcaactgctcggctagcaggaggatccgcccagagtccctccagggtgccgaccaccggccctacaccttcttcatttccccggggaccagagacccagtggggagttaccgtctgaacctctccagccacttccgctggtcggcgctggaggtgtccgtgggcttgtacacgtccctgtgccagtacttcagcgaggaggacgtggtgtggcggacagaggggctgctgcccctggaggagacctcgccccgccaggccgtctgcctcacccgccacctcaccgccttcggcaccagcctcttcatgcccccaagccatgtacgctttgtgtttcctgagccaacagcggatgtaaactacatcgtcatgctgacatgtgctgtgtgcctggtgacctacatggtcatggccgccatcctgcacaagctggaccagttggatgccagccggggctgcgccatccccttctgtgggcagcggggccgcttcaagtacgagatcctcgtcaagacaggctggggccggggctcaggtaccacggcccacgtgggcatcatgctgtatggggtggacagccggagcggccaccggcacctggacggcgacagagccttccaccgcaacagtctggacatcttccagatcgccaccccgcacagcctgggtagcatgtggaagatccgagtgtggcacgacaacaaagggctcagccctgcctggttcctgcagcacatcatcgtcagggacctgcagacggcacgcagcaccttcttcctggtcaatgactggctttcggtggagacggaggccaacgggggcctggtggagaaggaggtgctggccgcgagtcacgcagccctgttgcgcttccggcgcctgctggtggctgagctgcagcgtggcttctttgacaagcacatctggctctccatatgggaccggccgcctcggagctgtttcactcgcatccagagggccacctgctgcgttctcctcatctgtctcttcctgggcgccaacgccgtgtggtacggggctgttggagactctgcctacagcacggggcgtgtgtccaggctgaacccgctgagcgtcgacacagtcgctgttggcctggtgtccagcgtggttgtctatcccgtctacctggccatcctctttctcttccggatgtcccggagcaaggtggctgggagcccgagccccacacctgccgggcagcaggtgctggacgtcgacagctgcctggactcatccgtgctggacagctccttcctcacgttctcaggcctccacgctgaggtgagggctctactgggggtcctgccgccttggcgcagcttggactcaagaccctgtgcacctctcagcaggcctttgctggacagatgaagagtgacttgtttctggatgattctaagagtgaccttgaggaaccctgggagctcaggaaggaaggagcacccagaagcagggacagggagctggttggggaggaccagaaatcaggttatcaatactctggctgaccatcgtcatcgtgggactgactttggtggaagtccttggttacttatcattactgtgtttctgagaagttataaatttgccatctccctctgcacaagttacctttgtgtgagtatactaactttctgtagaggtatacttgtaatcacaaataagaataaattatatgaaac

SEQ ID NO: 225 - DNA, 3045 bp, Homo sapiens
atttttgtagagatggggtttcactgtgttggccaggctggtctcgaactcctgacctcaggtgatctgcccacctcggcctctcaaagtactaggattatagacgtgagccaccgggcccagccatttgtatattttctttggagaaatatctattcaaaaatgttcctatttttaattgagttatttgtctttttattattgacttttgagattttttttttttttttgaggcagagtctcgctctgctgcccagactggagtgcagtggcgcgagctccactcactgcaacctccgcatgctaggttccagcaattctcctgcctcagcctgctgagtagctgaaattacaggcgcacaccaccacgcccggctaactttttgtgtgtgtatttttagtagagacagggtttcaccatgttggccaggctggttggccaggctggtcttgaacttctgacctcaggtgatccgcccttctctgcctcccaaagcgctgggattacaggcatgagccaccatacccggccaactttcaagaatgtttttaagattttgttgcataccaaaagtgttctttatatattctggatgcaagtctcagacataatgatttgcaaatattttttcttccattctgcgagttttaacttttttgatagcatcttttgaacaaaaagtgctaactttttatgaagctaaatttgtctatttttttcttttaccacttgtgtttttgttgtcatgaagatttactcctgttttctcttctacaagttgtgtggctttaattcttacatttaggcctacaagccattttgagctaagtttgtatatgctgtgaggtgtcactgccctcatggttagagcccagaaagcaagagagaaagccttctccagcctgacctgagccctccctcttctgttcctgactctcatccggcagtagcttcactcactgatcgtggttggagcccttttgagctctggggaaggatggacagaaagaagagtatcccctggttcccctgagttatcaagcccctgtgggaggcagttgggagggacatgaggcagattagcacagggcatctggagccagcaaagcagttttagagcgggagcctgcttcggggatgcttgaaggtgggcactggggtcaggctgctggctcaggcccagctggtcttgcagcaaagccgccgcagggaagatgaacctgtacgagtcatttgcccaggctacccagctgggcgatctgcacacctgcctgatgatggacatgaaggcctgccaggaggacgatgtgcggctcctgtgccacctcacgccctccatctacacagagtttccagatgaaaccttgaggagcggagagctgctgaacatgatcgtggctgttattgactctgcacagctccaggagctggtctgccacgtgatgatgggtaacctggttatgtttcgaaaagactcagttctcaacatactcattcagagcctagactgggagacctttgagcagtattgtgcctggcagctctttctggcccacaatattcccctggagaccataatccccatcctgcagcacctcaaatacaaggagcacccagaggccctgtcctgcctactgcttcaactccgaagagaaaagcccagcgaggagatggtgaagatggtgctgagccggccctgccatcctgacgaccagttcaccaccagcatcctgcggcactggtgcatgaaacatgacgagctgctggccgagcacatcaagtccctgctcatcaagaacaacagcctgcctcgcaagagacagagcctgaggagctctagcagcaagctggcccagctgactctggagcagatcctggagcacttggacaatctgcggctcaacctgaccaacaccaagcagaacttttttagccagacgccaattctccaggcgctgcagcatgtccaagcgagctgtgacgaagcccacaagatgaaattcagtgatctcttctccctggcggaggaatatgaggactcttccaccaagccacccaagagccggcgaaaagcagctctgtccagccctcgaagtcgaaagaatgccacacagccccccaatgccgaagaagagtcgggctccagcagtgcttcagaagaggaagacacgaaaccgaagcctaccaagcggaaacgaaaagggtcctctgcagtgggctctgacagtgactgaggccctgcattccccatcccacccccggctggactgccctctccttcttggtgattcaaaggttaatagaggctgaggagattgcaggggaaacacccttgctgcatccccaagctcccccggtggaaggaggagctttctcctctggctgagtttgagaagctgccatgcagcccctagccccttccctcctcctggggcctccagcccctcacactgctgttcccagtgatatttgggatctgactgaagccagaggctctgtaaaatcagaccatagtggaagtcctcagccccctggccccttccgcaatctcctcccccagtctcccaaagagccatttcaacagagaagggaaatgacaaaggggcagctggccagataagctaggatgagagcagagactcagtgtgtgagtgtcccttcctgcttccccttcaggtcttggtttgttctgaagggacgttttatagtcactatccacatgccagtgtgaaatgggcatctatgacgtggtcagggtgtccattcctaatcatggggcagatgccacaagcattcagaaaggagtctgaaagggtggccacagccccacgtggtgtgccctggaggcttaggttggtctgaggttggcacctcaatctacaccagagcccagggagtcccagaggcaagtttcacagaattgtcaaatgatcccatttccttgagtctgtttttttttttgtttttttttgtttttttttttggcagagataatcgtgtcttaaaagttgtttttaaatgacaataaaacaagccagaatgtc

SEQ ID NO: 226 - DNA, 4213 bp, Homo sapiens
attctgcccacagctgggcagggttggacctagtgatggaccaagaaattatcttggtttaggtagttgtgaaaagcttgacagaagagaaaggaattgagctttgctttgagtgattagtagggtttaggtaaaaaggaaaaagagagacatgtcataagccacaacccattctggttgccagtgagaaaagttaaccctgctcatttgttcaggatgggggcagtgagggctgggtttattacttggcgctgtctgtggctaacttgtgacaggcctgagtcattttcagggtactcaggagtaaatactgtgataggggtctcagaggccaggccatgcagatgcataagcctggtgtcaagatgtagtgtgtatctgtttctttatcaaaatttttctactttggtatttcattcaaaacaaggagagaaaagtcaaatctttttccttttcccttttctgatggctatgactgaatttttttttttcatgaacgattcttgtgttcttatttaaaagaagaatttggcatatggcagacctcctcaagctatctttagttggttgtggggtgtaagtgattaagaatgcagctgtacttgctaccagcacatgcttttaaggagattgctaagcagacaggcctggttagaagtttagaatagcctcttggaaacaaagatctaatttttcaagtgcatggtatacaagagtccctcccttcaggactgaagcactgagggctgtttgcatcagagcagggtgacttatttgtttaaaatggcaacacccttggctctggggaggcggccatgcttcacttggaggagacaggggaagctggcttcacttcactttgtatagtttggcttcactgctcctttggaataaaaaaattctttacttctctagtatgtcccaggacaaacccatctctgtcctgttgctcagttatactacagtgctggttccgtagtcttcaaagcttggaactccctcttgcctttgctccaaaaatttgttctttcactcagcaaatatttaccaagttcctgctatatgcaggaccgtgtggagaactcaaagatgaatcagacgtggggcctgtccacaaatgttgtcagtcaagtgtaggacatagggcaagcacacgggagcttttgctgttgtgtccaagaatagcatgatgcgccgtaggtatttggtgggggaaggaaattagtgggtgggtttcaagtaaacccacatggagaaggtgacatttgagttgagccttgaaggacaggtttatctgtgcagagagggaagttttaggcagagatatagcacaaaagttagaaaacaaaaccaaaacaggtggaagagaggaagagtaatcaacctttaactgcgttgccatgcccttgactgaggcctcacccacattatcccatctaatcctcctcataagaaaacttttttcctcataagaaaactaaggcctgcagcattaaaataacttgcccgagaaggctcataagtggttagagtggagatttgaacccaagacagttcaattccagatttgaactgagcaggctttagccagagcaaaagatatttgaagagaaaaaggagtaatttgaagagataaagtttaggaaaaaaaagtgacttgaggcagatggaaaaaaggaccctgagtcctgagctaattactctgtaagcagcagggagcaattgaaggtttttaatggagtgtgacgtggccacagcaggacttccagcagtaactgcaaaaatatttgatatttgagttcattactgtgtgctggacactatcccaggtgcccgatacccctaacctgttttaattctcataactgccctatgagataggtgctgttgatgcccacttctacccataaggaaaccgagtacacatttagagaccttaaatgactttttagaagtggatcgaatatgatgtgcaagatgaattgaggtcagaggcagaggtaagtcaagacactacaggaagccatgagagacaggtgatgcggggtgtggtagaaaggaatggatgagtgtgagggagttggggttcagctgaatggatgagtgtgagggaggtggggttcagttggggcagaggcttctaacttccactgcgtagggtactgccgtggtgagaaccctggagagaaggggaagggggaaagtcctcttctttttcaaccccacacacagacttgaaggtcaggttgggacactctgcccattcagctggggctgaagacaggtatcagggctggacctagtgatagacaaaatccgtggagggttaacgttggtaagggaagagtgtgtggaggccaggagccggggccacggagcgagaagtgctggagatcgtggaacacttagatccgaggcccagtggaatgacaggggtcaggcagggacacggggatgaacagtcagtgggctggatacctcgggcggagttaccttgggtgatggagaggtacacccaaggttactggggatggcaaatcctggccaccggacatctcttgtacccttgctactagaatcaaccccaacccacagcagtcttctattttcctcggtcagaaaatagataaaaatcactacaattagcatacatttgcctaagaaaaagacagaagtagcataatgtgaaaatgcagttgttgttgttttattttctcttcatataaaaatgaaaaagccttttagccagcacttgaatatctagtcctttgcattcaaccctccctgcgcctcactgtgatcggaagcggacttcagtgtcccgggaaatagaaatagtaagcaaaacccctcatggctcctagcaatcttcgtaccgtagcagaaaagcaaggaggcctgggactgaggtgcacacacaggggacaaagccctgtcctaatgggtgtttgtaagcaccagggagggggcagggcacgtgtttgttcttctctaagttccagtggtccgatgaatgttggatctagcgtctgtgaaacctgttgtcataaagtatgtgttcctcagttagatttgacccagaggcctttctcattctcagtttttgtgttcattgaggctgcttttaaatggaaggtccattaagcccttgttcctgtccattcacagctgcctctatccgagtggtctgtgcagggcgccagcagccaccctgatggagggcaggtctctaaaagcagcatcctttgccaggcacctgagaattttaaagtgaggatgcatctgtggcatcatcttcctaaaccaaatgatgtgtaattgcatagttgttgaactgtgtggttggtctatttctagcagagtagctacctgagaggaaatgagaatttaaattgtttgctggactttaaaaaatttacatatgagggagacatctcatccagagatgcactgggcacagggaaagctttttttttcaagtagcagctgctattcattgaaatgttacgattttcctgccttagtatttcacacgtccttatactcctcataacattttttgcttgtgtagttttagccccatttcagaaatgaggaacccaggttcagaaggtttagaagcttgctcaagaccccccagctattaggtgccagagctgcaactggaatgcagctttgactccattgtgggtttctgttccattatcaagagtagcctgacagttggcaataacaatgactgaatgaatgaataaatgaattctccaaagaaaatagttcatgtttccctagtatgagggaatacttgagatagttgttttgagaagggggccacagaccaggagacaccaataagtctttctcatttctggtaaatcgctttataatgaccgttattataaagtgtaaaaacaacaacaacaaaaaataataggcgcagtggttcacgcctgtaatcctagcactttgggaggcagaggcgggcggatcatttgaggtcgggagttcgggaccggcctggccaacatgatgaaaccctgtctctactaaaaacacaaaaattggccgggcggtggtggcgcgtgcctgtgtagtcacagctactcgggaggctgaggcgggagagtcgcttgagcccgggaggtgaaggttgcagtgagccgagattgtgccactgcactccagcctgggagacagagccagactccatctc

SEQ ID NO: 227 - DNA, 3207 bp, Homo sapiens
tgatgactaatctgaaatcaacagcacctcattttgtgagatgcataaatcccaatgtgaacaaaataccaggtatactggacccttacttggttctacagcagttgtgctgtaatggtgtcttggaagggactaggatatgccgtgaaggttttccaaaccgactgcagtatgctgattttaaacagaggtactgcattctgaatccaaggacctttccaaagagcaagtttgtgagcagcagaaaagcagctgaagaattacttggctccttggagatagaccatacccagtaccgatttggaatcactaaggtgttttttaaagctgggtttctgggccaactggaagcaataagagatgagagactatctaaagtcttcacattgttccaagccagagcacagggcaaactgatgcgaatcaaattccagaagattctggaagaaagggatgcacttattttgatccaatggaacataagagctttcatggctgtgaagaactggccctggatgaggctcttcttcaagatcaagcctcttgttaaatcttcagaagtaggagaagaagtagctgggctgaaggaagagtgtgcacaattacagaaagccttggagaaatcagagtttcagagggaggaactgaaagcaaagcaagtatccctcactcaggaaaaaaatgacctgattcttcagcttcaggctgagcaagagacactggcaaatgttgaagagcagtgcgagtggctgattaaatccaagatccagctggaggccagagtaacggagctgtcggagagggtggaggaagaagaggagataaattctgagctgactgccagggggcggaaactcgaagatgaatgttttgagttgaagaaagaaatcgatgacctggaaacaatgttggtgaagtcagagaaggagaagcgtactacagagcacaaggtcaagaacttgactgaggaagtagagtttctaaatgaggatatcagcaaacttaacagagcagccaaggttgtgcaggaggcccatcagcagaccctggatgacctgcacatggaggaggagaagctcagcagcctgagcaaagcaaatctgaagctggaacagcaagttgatgagcttgagggtgcccttgagcaggagagaaaagcgagaatgaactgtgaaagggaactgcacaaactggagggcaatttaaagctgaatcgggaaagtatggagaacctggaaagcagccagcgacacctggcagaagagctgaggaaaaaagaattagaattgagtcagatgaattcaaaagtggagaatgagaaaggcctggtagctcagcttcagaagacggttaaagagcttcaggctcaaataaaggatttgaaagagaaactagaagctgaaaggaccactcgagccaagatggaaagggagagagctgacctcacccaagacctggctgacttgaatgagaggctggaggaggtaggaggatccagtttggctcagctggaaataactaagaaacaggaaaccaaattccagaagctgcaccgagacatggaagaggccactctgcactttgagacaacttctgcatctttgaagaagagacatgcagacagcctggctgagctcgagggccaggtagaaaatctacagcaggtcaagcagaaactggaaaaagacaagagtgacttgcagctagaagtagatgacctcctgacccgtgttgagcagatgacaagagctaaggcaaatgctgagaaactctgtactctatatgaagagcgcttgcatgaagcaactgcaaagctagataaggtgactcagttggcaaatgacctggcagcacaaaagacaaagctgtggagtgagagtggcgagttcctacggaggcttgaagagaaggaggctctgataaaccaactttccagggaaaagagcaacttcactcggcagattgaagacctgagagggcagctggaaaaggagaccaaatcccagagtgccctggcccatgccctgcagaaggctcagcgtgactgtgaccttctacgagagcagtatgaggaagaacaagaggtcaaggctgagctgcaccggaccttatccaaagtcaatgctgaaatggtgcaatggagaatgaagtatgaaaacaatgtcatccagagaacagaagacttggaggatgccaagaaggaactggcaattagattgcaggaggcagccgaagccatgggggtggccaatgccagaaatgcctccttggagagagccaggcaccagctgcagctggagctcggggacgccctgtctgacctcgggaaggtccgctctgcagcagccaggctggaccagaagcagctgcagtctggcaaggcccttgccgactggaagcagaagcacgaggagtcccaggcgttgctggatgcctctcagaaggaagttcaggctctcagtacagagctcctcaagctcaagaacacctatgaggagagcatcgtgggccaggagacactcaggagggagaacaagaacctccaagaagagatttctaatctgacaaaccaggttagagaagggaccaagaacttaactgaaatggaaaaggtcaagaaactaattgaagaagagaagacagaagtccaggtgacactggaagaaacagagggagccctggaacgtaatgaaagcaagattcttcatttccagcttgaactcttggaagctaaagcagaacttgaaagaaagctttcagagaaagatgaagaaatagaaaattttaggtatttaagatgattttgatgtgtaacaattatgtatttctgaatccttgactaaacagagctcattatgtctggctgcttttatggcccctgttggagcattaccaaagaaacttagtgtaactctatattattttcttttatatacaatatctataatcgtgtatagatattcctttatacacaattagatatccttttatacacaattgtgtatagatattcctttatacacaattagatatccctttatacacaattgtgtacagatattcctttatatcaatagtggtgagcttactagctatctatatacgattattgccagattttataattttcttatatttgaggagcttctactgtcatgtgagactcaagacaacaccaaataaatgattatatgtataaggactgtg

SEQ ID NO: 228 - DNA, 3364 bp, Homo sapiens
tgtcacgactaggggtagttgctgggccccagcgtcaagcacatacaggtgacaaattccgtctctgagtgagggcccaaagaagctctcagctcaataaacggagatgtgtgtgatgtacacacatgtgcagggtactagtgggagacagggcaagggaacctagaggtgttgctggactgatcctagaagatgcagagtattagcctaacagaggaaggacattccaggatgagaaatgtctggagacacagccctgaggacagaaattccccagggctctcagtggccaggggccaagcatggcagcagaaatccaatgtgaggctgttggccaaagccaggcacaggaagggtgtgccatggtcagcacttttgggggtaccattaaaagatgtaccccaaagaggggtatggtctaacatgcgttttaagaaaagttcactttgtcttaacagatggaattatgagaggccaagattgaagatggaggtaaaggttggggggatggccttttgagagaaatagaaaatcagtaatgggcacagtattaggtatgcaaaggattatttaggagaaaataaattagggtcagttattgtagttgctataagaagcgatctcaaatcagagtggcatcacatgttaagagtttatttcttattcacttcccagtccactgtgggcctgcatggggcctggggtatggggaaggagaactctgctccacacagtcattcaggaatcctggctctttcaggcagaagttctgccattcccttgggccctggagttttcagctagttctctgcagagggccagcaaaggggtgaggggaagaaataggatggagcatcctgcaggaggtttagggtccaggtctggggggtggccagcacatcactcacatgcatattttggtggccagaactcagacatgtggccccatctaacttgagggaggctggactatatagtccagctgagagcccagaacaaaaaggaactgggtctggcaaacacagcacactgactttgccacaacatgtttcggaggtaaaatctttgggggctcagtaattgattcaacgtggaagaaggagagaggaaagttcagagagcttccaggtttccaccagggaggtcggaacaggttgccttagatggtgaccgcaggagccactgcctgagcaaggaagatggtgcattcattttaaaatcgctgtgtagcttaacattcactgcccgtattaacatgtgtcctgcattccatttattggagaaatgtttctttttctttattttttaaatgaatataatttacaatgtaaaaggtcaaataaaatgaaagtgaaacagaaaaatcctcacttttcaatattcctttctcatctaatgaagaccccttcccttctctatttctcccggctccctgccttaggcctaaagcaacaaccagaagccttcctgggtgtttacattacagcacaccagactgcaggcactgccaccccagactctgcctgcagctaaagtcaccaagtttgccgtgccccataactgaggtcattggcagcccagcaccaagcctcactggcatcaagggcagcgggttagtaagcatggctccacacgggtaagcagttctaggaaatgggaagaaacccagaccatccatctcagggtaagtttgctggattttctctctcttttaagagtctttcaacagggcatacagcccattctcaaatttagatttctgtttttgttaagaacagggactgtggaacgaatttgcctgactttgccatcattctgccatttcctagctatgtggcctcaggcaaactgattaaacttactggcctcagaatggggaaaatttctgtaactcatgcctggaattacgtgaagatgaaaagcaggcatgtccatgagatgcttacaagagggaccagcgccgtgtacctattctgtgcatcctacccgtccactgttccttctccgtggttcttgaagaagctggagttttctttcagtcttctgcttctcctgttgcttcctctaactgaaggaagaatcagtccatggcttctgctccatgctttctgctcttggttcaggctccaactttcccattaatggaagagaatggctctcctgctcccagctgtaatgaactaattaatttttctatttctctaatcattctctattccctgccaaaccctctgggtgtctgttttgttctattgttcaagcctggactttgagggtaggctgggggcattgctagtccccacaattgctaatccaggcacttgagtcattatcttctatacatcacacttaacaaccagagggaagtgcaacctcgtgggcctcggaaaggaaaccacccacagacttgtgcgccttcttcgcaggccaggctctccttcccccatggtaagaaggtgaagacttggagattggtgagtcaggcaatcaaggtcaaattgacatactctagaagattacatgccgtgtggaacagtactgggcagtggacccactgggacaggggctcaggaggctatggcagtcccgcaggagattctggagtaacagacatccccaggacctcagcgtttcataggaacgacatggcacacattggtggtggctgtcctcccaggcagtaccccacatcttgtcttccgtgtttgggcacccaggctggagtagcaacccatctcagtcaatggcaaaggaagaggggctgtgtgtgagcagcagggaacaactttcagcttataattcgggacttacaggaaagaaaagaaaatgtctactctcctaagagaaatctgatcatctgccggcataaatgttggttgaccttgactcttctctttggatgcctgaaaacctgaacaaggcagttggggccaggacagcccagaaaggcaggtttgagtgggggccccggcctttacagaaacattctagtgtccatggtgatcctaccggaaagccagtgtcaagaaccactgagccccaggacgcaggtttccttgcctctatcaagatacaggccccgctacagtactgctgagagcaagaaatagaagcacctgcaagacagtgcagccctcacaagctagacatttgatgtcatgggaaaacttgcacccaggcagttgagtgcacttgttcagcagacctgttggggataatgggaagagggagcatatctggctgaccttgaggacagagaggaactctcatcaaaattacttgaccaagagaacattccaggtgcccaactctgccaaacataatagcaaatatgtaccaggaaagtaagaaaaacttatgggtt

SEQ ID NO: 229 - DNA, 3289 bp, Homo sapiens
acaataccaggcgggagggcgggtaggcggtttgtatccgggctgtgaggtgctcggagcctcggcggaccttgctgcctctgtctctttaacgcgagaggaagcgatgcagaggggtggaaaatggcagagctgcagatgttactagaggaggagatcccgtctggcaagagggcgctgatcgagagttaccagaacctgactcgggtggcagactactgtgaaaacaactacatacagagacatggttttgctgtgttgctgtgtctgctctcaaactcctggcctcaggctacagacaagagaaaagctttagaggagaccaaagcctatacaacccaatctctagctagtgttgcttatcaaataaatgcattggccaacaatgtactccagttgctggatatccaagcctctcagcttcggagaatggagtcttccatcaatcatatctcacagactgtggatattcataaggagaaagtggcacgaagagagattggtattttgacaacaaataagaatacatcaagaactcacaaaataatagcacctgcgaatatggagcgccctgtaaggtatattcggaaacctatcgattacacagttctggatgatgtgggccatggtgtcaagtggctaaaagccaagcatggaaataaccagcctgcaagaactggcacactgtcgagaacaaatcctcctactcagaaaccgccaagtcctcccatgtcaggccggggaacactgggacggaatactccttataaaaccctggaacctgttaaacccccaacagttcctaatgactatatgaccagtcctgctaggcttggaagtcagcatagtccaggcaggacagcatctttaaatcagagaccaaggacacacagtggaagtagtggaggaagtggaagtcgagaaaacagtggtagcagtagtattggcattcccattgctgtgcctacaccttcgccacccactattggaccagaaaacatttctgtccctcctccttctggagctccaccagcaccacctctggcaccacttctcccagtgagcactgtgatagcagccccgggctcagctcctggttcccagtatggcacaatgaccaggcagatatctcgacacaactctactacttcttcgacatcttctggtggatacagacgaactccctctgtgactgctcaattttctgctcagcctcatgttaatggaggtccactttattctcaaaattcaattgctgatagtccaactccaccgccaccacctccaccagatgacattcccatgtttgatgactctccacctcccccaccaccaccaccagtggattatgaagatgaggaggctgcagtagttcagtataatgatccatatgcaggtggggatcctgcttgggcccccaagaattatattgagaaagttgttgcaatatatgattatacaaaagacaaggatgatgagctgtcatttatggagggtgcaatcatttatgttataaagaagaatgatgatggctggtatgaaggagtctgcaatcgagtgactggtctgttccctgggaactatgttgaatcaatcatgcactatactgattaatttttttttttcttttgaagtagattcttattactcagtcatactgtgggactattatggttaacagaactgtcttaatatgttttaaaatgtgcccatattttcagaacatgctgttttattggtaaattgaatgtctacctgtaagcataaatctttgaggcagtttatgtattgctgaatagcaatttatacaagaagctgtccataactgattatgcttatgtacttacttacacatttttaactttatgaccagcctaaatattctgggggaagtggggtataatatttaacgaatcatgattcagattgtaccattacatgtttcagtgcagcatggttactaacgctatgtcagactaatattaaaatcagaaaatttaaatgctggtgctggtcagactttttttgttagattctctcatttaaaaaaaatactgtttgtttaaagcatgcataaaaatttatgtattgaaatatacttaaaaattcaagatgcttcccatttgtgtaatatttacctggaggactcgtacttaggtgtcttaacgtgaattgagtctccaaggtctccatgtgaaacaagcaaaaagagaattatctgtaatgttgtaatttgtacctaagttttttaatgagtgaaatttgcattataaactttttccattcataaatacataagtgaaccaaaggtttttgtcctttccttcactgatttgctttaaaaaaaataaaagataatgatttattgcagaattatgattctattttctcaatatgttaacttggaaaaaaattttagccttatcttaatctgtcccaacagcaatgtgacggatttttgcagattcaaaatctgcaatggttatttacaagtcaatctactgaattccttttttaaataatcttttgaaactaagaaaatgtgtcaaattgtgtgcattcattctgtaggtaaaattcttaaggattgccatgtcagtccttcggttgtacagtgaactgttgtacactggttcaatgaaaggaagttaaaagtaccttttacatattgtaaaagtggatacagttgatttgtgagtaggcactctttaatccattacctggcactagcaacattagaattttaaaataaaataattgggaaagaaggtgggtcatgtattaatcagtgaacagagatttacctaaccaacagacttggattgtcttttgacataatcaaaatgcaacacatgcactttgtgtgtctcctcttaattgaagggagggctgagggatgttttctcttcttgtcttgtgtataattctctattgcttaggatattaaagtagagcactcaagtgtgggtttctgtgttattgaggatttgtttggaattcaaattacagttatgtactggatgctacagacttataacagcatagtgaatggtaagactagtgcaaaacagttatttctgaaaattaaagaccattattgctaccaaatcaatgtgactatttcatatgcattttgcctttgttaattttaaacaaacaaagtatcattagtgatcagctagctaccttctactttccatttttcaagtggattgttctcttaatttgtatataacctgttgtctaaattttatgtacagtcttttataataaaccattctcctatatg

SEQ ID NO: 230 - DNA, 3455 bp, Homo sapiens
actttctcagaattccatgcacagtagtcctgcatcttccaattatcaacaaaccactatctcacatagcccctccagccggtttgtgccaccacagacaagctctgggaacagatttatgccacagcaaaatagcccagtgcctagtccatacgccccacaaagccctgcaggatacatgccatattcccatccttcaagttacacaacacatccacagatgcaacaagcatcggtatcaagtcccattgttgcaggtggtttgagaaacatacatgataataaagtttctggtccgttgtctggcaattcagctaatcatcatgctgataatcctagacatggttcaagtgaggactacctacacatggtgcacaggctaagtagtgacgatggagattcttcaacaatgaggaatgctgcatcttttcccttgagatctccacagccagtatgctcccctgctggaagtgaaggaactcctaaaggctcaagaccacctttaatcctacaatctcagtctctaccttgttcatcacctcgagatgttccaccagatatcttgctagattttccagaaagaaaacaaaagaagcagaagaaaatgaaattaggcaaggatgaaaaagagcagagtgagaaagcggcaatgtatgatataattagttctccatccaaggactctactaaacttacattaagactttctcgtgtaaggtcttcagacatggaccagcaagaggatatgatttctggtgtggaaaatagcaatgtttcagaaaatgatattccttttaatgtgcagtacccaggacagacttcaaaaacacccattactccacaagatataaaccgcccactaaatgctgctcaatgtttgtcgcagcaagaacaaacagcattccttccagcaaatcaagtgcctgttttacaacagaacacttcagttgctgcaaaacaaccccagacttctgtggtacagaatcaacaacagatatcacaacagggacctatatatgatgaagtggaattggatgcattggctgaaattgagcgaatagagagagaatcagctattgaaagggagcgcttctcaaaagaagttcaagataaagataagcctttgaaaaaaagaaaacaagattcttacccacaggaggctgggggtgctacaggaggtaatagaccagcttctcaggagacgggttctacgggaaatgggtcaaggccagcattaatggttagcattgatcttcatcaggcaggaagagtggactctcaggcttctataactcaggattcagactccataaaaaagcctgaagaaatcaaacaatgtaatgatgcacctgtttctgttcttcaggaagatattgttggaagtcttaaatctacaccagaaaaccatcctgagacacctaaaaaaaagtctgatcctgagctttcaaagagtgaaatgaaacaaagtgaaagtagattagcagaatctaaaccaaatgaaaaccgattggtggagacaaaatcaagtgaaaataagttagaaactaaagttgagacccaaacagaagaacttaaacagaatgagagcagaacaactgaatgcaaacaaaacgagagcaccatagttgagcctaaacaaaatgaaaatagactgtctgacacaaaaccaaatgacaacaaacaaaataatggcagatcagaaacaacaaaatcaaggcctgaaaccccaaagcaaaagggtgaaagccggcctgagactccaaaacaaaagagtgatgggcatcctgaaaccccaaaacagaagggtgatggaaggcctgaaactccaaagcaaaaaggtgagagccgccctgaaactccaaagcaaaaaaatgaagggcgacctgaaacaccaaaacacaggcatgacaataggagggattctggaaagccatctacagagaaaaaacctgaagtgtctaaacataaacaagatactaaatctgactcacctcggttaaaatcagaacgagctgaagccttaaagcagagacctgatgggcgatctgtttctgagtcactaagacgtgaccatgataataaacaaaaatcagatgacaggggtgaatcagagcgacatcgaggggatcagtctagggttcgaagaccagaaacattgagatcctctagtagaaatgaacatggcattaaatctgatagttcaaaaactgataaactagaacgaaaacacaggcatgaatcaggggactcaagggaaagaccatcttctggggaacaaaaatcaagacctgacagtcctcgtgttaaacaaggagattctaataaatcaagatctgataaacttggttttaaatcaccaactagtaaagatgacaaaaggacagagggtaacaagagtaaagtagacactaataaagcacaccctgacaataaggcagaatttccaagttatttgttggggggcaggtctggtgcgttgaaaaattttgtcattccgaaaatcaagagggataaagatggcaatgttactcaggagacaaagaaaatggaaatgaaaggagagccgaaagacaaagtagaaaaaataggattagttgaagatctaaataaaggagctaagcctgtagttgtgctacaaaaactgtctttggatgatgttcagaaacttattaaagatagagaggacaaatcaagaagttcccttaaacctatcaagaataaaccatcaaagtcaaataaaggtagtatagatcaatcagtgttaaaagaattaccccctgaactcctggcagaaattgagtccaccatgccactttgtgaacgtgtgaaaatgaacaaacgcaagcgtagcacagttaatgaaaagccaaaatatgctgaaatcagttcagatgaagataatgatagtgatgaagcttttgaatagctggcttcttcactacacagctacctctctacaacactgtgatcacctgtctttgcactagacttgctatacctcgcctgtcttcctactggtccactgaaaaagttcttctcttttatccctatcttccttcttctggagcaagagaattgagcctagccaagaggggtcagcaaccttgtttgacttaaacggcattcagtggaaacagactatgggagatcttcacttgtgtgccaactgacttagtcataatgaccaaaagaagtgggaagaccaccagtgttctactttttccacctagtgtccatagattgaggtgtgacaagcaagggcaggaaggacagatgcatgctgccatttttaaatgtatattgctgatggaagcccttcacctcctccaaagtttttaatgttaatttactgatttttttttaattgtgagctcttgagctatgagcagtagactatgaatactgaacaaatctgaaaaaagttttaaaattgaaataaaatatacagcaaactt

SEQ ID NO: 231 - DNA, 3016 bp, Homo sapiens
ttataaatgcttcttgtaggctccctggtacaggtgtaagcctgcgaggggtttctgctgggggaaaagaaatttatgacagaaataggcaaagtatctactttccattagaagtgtggaggccgtccaaggcttacctgtagatgctgtccttggtttttctatggaaagttctgatacagctggataatctgaggcttctgttgctgatacaagaggcagaaacacactcacctaatggcaagaaagttgcatgttttacactttttaaacgctttaagcgggtcttgctctgctgtcagattagagtgcagcggcatgatcacacctcactgcagcctcaatcttagctgggtctacagagacccgccaccatgcctgatttttgtattttttgtagggattgggttttgctttgttgcccaggctggtcttgaactgggcttaggctccactgccctcacacctctaggcctctgtttagatagctttattcttattgcctccctactcccctagtaaaattaccagttgttctgaagtcatttttcaatatctgggaataagtttaggtaaaacttccaacttggcactataacactaggtgtataagattagttctgccagtcttggagacaggcataaattggagtggggattaaaagaaaatgcacaatggttgacagaatagtgaaggtttaagacaaattgagagctggtgggggtgtcgggttagttaaatgcatagcataattccctccaatgagtaccttctgataagttgtaagagacaaatcaactggtttgcttgtaatagaataaaatagaaggaaagcttaaatttacctgaaagaagcattttgcttcattctcgctcttctcttctagggttaaatttgcaaaatccatttcagcaatactggtatcagtggtgcttattaaagtaagttctggttcttccattataccatggccagtttctgtttcctgtgaaccacaattaaaaggaaaaccatgtcaaaatagccttaaaagacttaaactaatcgttttgtatataatgcacattttttgcaagtgtatataaatgtgaaaatggaggaagaaaagcaatgattggcaaagaccaacagatcagatttccttaggcttccataactccagcattcagttgtagaaatactggagcctactttggggaggggatgaaatagtgtgacaatggactgaaaggtatctaccacaatgattacaaacctaaatgcttgtagtgttgggcaaaaaatataaatgcaggttggctgtgccgaattgtatcctttaaagggagcaggggtcgactgggctgctaccaaatgtgggccactgactgctaacagataatgtttcaaaagtatctaaacacaacaagaacaaaagcagccacataaaatgtggtttagttgtaattcttattttcaatctgttatgtttatttgtggaaggataaactgcacatactgctagatgaaaaccagtcaccagttgactggtgttgaaagcaagcagattataagttgcttaatatgaggagcaggtttccaatacttattccaataatggatgaattcattgcactggaatgaggctcaacactgaaagtgctgaagcacaggcagaaccaccatttttcagggaagttggagaaaggatatctgaattgggagaaaaaggatcttttgtaaaatactctcagaagacagttttcaaatttttaagtttctgcattatgctggatatttctagtgatcacaagctggatagcaatattaacaagcagttttgcttgtattttgtttcaggtttttcctgccaggcattgtggtgtgtccaaactacttcggaagttgaggcaggaggatcccttgatcctaggagtttgagttcagcctgggtagcatagtgggaacttcatctctaattttagaagaaaaaagttttttcccaaaaaggaatttaaatgttatttatacaacactgatttcacttacccagactggtatagagctctgtaatgaaaatgatccagaacttgcaaaaagctctgattctcctagttgagatagttttttggtgatttttggaatgtctgtttcagctgaattctcaaaatatttttcattttgagtagttaaggaatatggtgcctgaattgaagttcccatctccactgttcttacacataatcgagagtcagtttcctctacctgtggatttatgtctaaaaccctacaggtttcatttttattatcttcaatgagtccttgactttgtaacattgtaacaacccctctttttgatagttcttcaaagcccatactttcctttctgctttctagttggtgttttgttgagcactcactagagttagaaccacatggagtgttatgctgtacatttaactgatcaaatacattagcttcatcagatgaactgtagactgaacttaagtttcctatagaaagctggaaatgaacaatttttttcttgttttgtaatatttcagtatgttcttcagagggatagttctgatttttcatgccttgggaagaatctcttgcttcaatgctaaaaatacttggtagatcagcatgctggctctcctcctgtgaagaatattctggctgaagctgttcaaaacattgttcagatcctgcattaagaaattcaaaaatcagttaatcatcgttacatgttgtaaaagttggatactgacagtctctaatagtttatcatccaattgcaagtaacctacaattttaggcataaaagttgatgtgtataaacatgaatacaaagataaggatggtcacagtgatttctcaaactacagctcacaccaagtattttttctttttctattaatatttaataaggacaatatggctataaactgaggatgttttcctctataagaactgaatatgactttaataacagaaaagagaataaagcatccatgtgtatctcaattatc

SEQ ID NO: 232 - DNA, 5104 bp, Homo sapiens
tccgcctccttcgaggcgctcgccatctacttcccgtgcatgaactccttcgacgacgaggacgcaggggacagccggaggctgaagggggccatccagaggagcacggagacgggcctggcagtggagatgcccagccggacactgcgccaggccagccacgagtccattgaggacagcatgaacagctatggctcagagggcaaccttaactatggaggagtttgcctggcgtcggacgcccagttcagtgacttcctgggaagcatggggccggcacagtttgtgggccgccagaccctggccaccacacccatgggggatgtggagatcggtctgcaggagcggaacggtcagttggaggtggacattatccaggctcggggactgacagccaagccaggctccaagacactgccagcggcctacatcaaggcctacctgctagagaatggcatctgcattgccaagaagaagaccaaagtcgctcgcaagtcgctggacccactgcataaccaggtgctgctgtttcctgagagtccccagggcaaagtcctccaggtgatcgtgtgggggaactacgggcggatggagcggaagcagttcatgggtgtggctcgcgtgctgctggaggagctggacttgaccaccctggccgtgggctggtacaagctcttccccacctcctccatggtggacccagccacaggccccctgctccggcaggcatcccagttgtccctcgagagcaccgtggggccctgcggagaacgatcttagtgctggaatggggaggggctccccaagatggcctggagaccacccagccctgacctgggaccccaggcccaggggcacattgaacaggaggacggggctctcccccacagtggggaagcagaacggggagacctgcccccccttgggcccctcctcaccccttctttgcctcctacccccgagacctcccctctcccaacgggattggctacacttttgacttggccggttcttgacctggtggatgtggctgcagtccagagaaaggaaagattggggtggcagagcagaccactctcccttcccaaactgtccaacttctccccctttttgcctcctcggaagctcgctgcccagagccatgtccagaacccagccggccatctccatggtgccaattaccagcaagtgtctttcctgcggcaccgggttcaggcagctactcctgccccagagatgaaggggcagctttgcaaggatccggagccagctcccaggggcccagagccccccacttgaagaggagcttgagcttccctctgcctgcccgtggaaggagctttgccgcagcctgtccgagtccatccgtccgtcccctcctgcctgcccctcttctggtggctctaggaattggggttcagcagggaccaaaggaaaggaggaggtgccgggggcctggcacagacccctaggtgcctcgctccatgggattgcaacaagctagtttaggaaccgctggcggactagaaagaatgttgtcgtctgtgttccggtggaggagctgtggaacctgagtttccagaaccccaaccctagagagcatttgggggtgctgtattggagggggaggctaaggaaagttgggattgggactggtggtgccaagataagggtttctcaaattggagaacccctccttgttgcatgaggtcaatggtcatcttgtctacccaccctgcctccaggccagggggctggggaggcaaatagagcccccctattttagtctttttaaaaaaaacatcctatactaagggcagaacccactgccccggcctcaattaccttggctgaaggaaagatggcggtaggagagaaaagtgaagaggcgtgagtgtaagaactgggagattccttttccagcaggcctgggtagctgccttcccagcccagccctccctggggcctgcgggagcccttttgcatgcaagggaggatggaggctggcccctctttatagaagcacatttctgccacctcccctgggaggcacccagaagcctgccactctttacctagtccctgctgtgtagggcgtagtccaggttagctaggtagagttagtgctccaagccctggggcctgttcttagctcatgcatagtccttacagagtcccaggaccgggggtggagaggagcctcaagtacattccaggagaccactgtctcctcgctggcctgggcctagatggggcagcctggctcacaggaggccagcccctcctcctccgcccccttccttcccttgtccccgtagggttatagctggagctgcctgttatactcggctgttctgatttattattcttggtactgactttctttatgagggactcctaagggttgtaggaccttggcagagggggcctggtctccattagggggtgttgttttctcctgaggacacccaggctgcctttggtcccaccctgttcctggtcccggtcccggtcccagtcccaccaggcaactccttccacccggaaattcttcccttcccttagcctgtggaaaccctgggtattctttaaagttctggtcaatgtatatcacctccacagagctgcttaccctgcactgggaaggggagatggagacgccccctttacccaggaggtcttcagagtttcctgggaccgcggtgggtggaatcccaaggctgggggtggaaggagcagggctctggagggattcgcattcaaggcacagaattggccccttgcctgtttgtttttctaaccagtgtgatttctctgctgttcgtttattacttaccattggaatattttgagccaggagagcgccttctctctccagccatcaccgctgtggttgttcaggggtagcttttcaaaaacagggcagagcctggctgtcccaaccagggggagcaggggcttggccctgacagcctgagcccttcccctggtgtctgcacagcctttataaagagagagagagctccgaagcaataacaacacctgggggtggtcagtgagggccccctcaatgattttcttgtttgttctgtgaaatcccgctcacctcctggaggggtggagcagctgggggctggagccctgtttctttgtgtcatcgtgagcatgtgccccttcccaggggctgtgaccattgggtgtgggaactacggtctgtcctcaccaagggatgggggtctggggaggagagtgacattttcatcattagcttcggagaagcttcaagcccatcctgtccccgctactgcctggccccttgctgactcaggctgcactgtttgaagaggagcagagaggctggcactaggggccactggggggctggggtctccaggggatgactgttttcaatctctgggccaagatcacatgcaggataccacgggaaggagccatctccactctccttctccagaacccccttgaagggcctttgggaccattagtccatttccattttacagacaaggaaatcaagacccagcttgggggaaaagccacccctggagtcacctgtgtgttcagtggcacccccagcctgggtcccctcctcccaatagaggctgagccggagccagggcagtatgaggtggggctgccactgcccatacctcctcctcccttctttctttgaagcctaatggccccccaaaagatgggcaggacaagctgtagcccatctgagaggttgggaaactgaggcccagaaacaggaagtgactcacacaagacccctcagcaagggtgcaaagggggaagaactaggggctccattgttcttcaggcgacaggagaccgttgctccagtgcatgtctgctgggacaaggattcctggcctcgaagccctgggctgcacagccctactgggctccacctctataaaccagtgacttctctgggcctgggtctgggggagagggttgccagggagactcagctctccttgggggctggcccagctgactgagggtacacaggattgggtctagaccttgatgcctgggtggagggcccttgtaaggggccatagcctcttcaggaccaactggagggagagttaggaaacaccagctcctgcctggggcagtgagggaatgggagcagctgtgggcgcctcatttcaggcaagtcctccccaaaccttcagatgcagtgagacctggccttcctgttgtgcttttcagactttgttttcagaatgcttttatctcgagtgtgcccttcggccctcacaagagcccctggggagtaggtggtggcctgtgccgtcatccccatttcaaagcagggagctgaggtcctgggaggggaaagtgcttgcctgaggtcccactgtgttagtgggtgggcaggactggaactcggttctccaacagcccagagctcactcttttacacccagaggtggagcaggtggcttagggggtggttatgtacttcacaagccaattcccttcagccaggagctcctgggtgcatttccgtgtcagaaacagtaccgagtcccaccccctctggaggcacagctgttgcgtcaggcaaggtcacctgcatttatttattgagcagcagtgctgtgtcaggcccagggaccgagcccctctccctgttcccctatggtgtctccgaggccctctgggagggccccacatctggagcagcacctcagagtggacagaaagcattagcgtccacgagctcacccgacgccgagcctgtgaggtgggctgatggtgcccgtctaacccagcgcttcagggaggtcagaatggagccgaacccagggctgtgagcatcacctctggagccctttcactttatgactgcttcctggacgggtggtgggaaggcaggagcctgggtccttaggctgggggcctctctccatccacccacctttccctcattccctctcttggagcagcagccgcccaggcctttagggagggagggtttctggggcccttgggttggagtggggtcgcgttgcattgtgttcatgaccatgtagctcatgttgaaattaaagtttttggctttcct

SEQ ID NO: 233 - DNA, 2080 bp, Homo sapiens
agtcctgttttatggcctcacgtgttttcgggaacagggagcgagctttcttctaggcaactggctgtcacccaccaggggttagccccctgggtgatcatggccaggctgggcaggacgtgggcttagggcttgtgaggccaaccctgtgccagctgggaggcccagggcactgggatggccaggctacgcagtgagctgtcagctgtgccaggacagaccccaggctcctggcggccctgctttgatgcacggctctgtctcccaacctgggggcagccgagtccccccgcctcgccccactgcaggaaactggctgtccctgccacctgggtgtgtgtagaaaaaagctagaggttcccatggctttatcgagctgggctcagggaacaagctgggctgcaaagggtttttccagatccttctctttggctgagttctcattgttaaagccacgcgctggatcctgcaggacccaggagccaagaaagcctgcagacgggcagccgtggctcaggtgttccccttgcacaggtggacagaggatctgggtccacggggctcaccctgccacgtccccacccattcggcagaaggggaagttgaggcccagaggcagggagagcttcccccagggacacacagcacaggagagccagctgggagcccctcccctgactccctgcccggtgctcctgatgccccccggccggctggctgtgggggtgtctgagggtggagtggctatgggaagatggcagggggaggcacagccacccttgcagacaccccattcccagcactccttcctcacacccagaccccttgcctcccacccagacatgagcaccagcctccaggaaggccaggaggacgggccggcaggatggagagcgaatctgaagcccgtggacaggagaagcccagctgagaggactctgaagcccaaggaaccacgggccctggcagagccgagggcgggggaggcccccaggaaggtctcaggcagctttgctgggagtgtccacatcaccctgacccccgtgaggcctgacaggaccccacgcccagccagcccaggacccagcctcccagccaggtccccctccccaccccgccgcaggagactggccgtccctgccagcctcgacgtttgtgacaactggcttcggccggagccccctggccaggaagcccgagtgcagagctggaaggaggaggagaagaaacctcaccttcagggcaaaccagggagacccttgtccccggccaatgtccctgctctgcctggcgagacggtgacctccccagtcaggctgcaccccgactacctctccccggaggagatacagaggcagctgcaggacatcgagaggcggctggacgccctggagctccgcggcgtggagctggagaagcgactgcgggcggccgagggagatgacgctgaggatagcctcatggtggactggttctggctcattcacgagaagcagcttctgctgagacaggagtcagagctgatgtacaagtccaaggcccagcgtctggaggagcagcagctggacatcgagggcgagctgcgccggctcatggccaagcccgaggctctgaagtcactgcaggagcggcggcgggagcaggagctgctggagcagtacgtgagcaccgtgaacgaccgcagtgacatcgtggactcgctggacgaggaccggctccgggaacaagaggaggatcagatgctgcgggacatgattgagaagctgggcctccagaggaagaagtccaagttccgcttgtccaagatctggtcaccaaaaagcaaaagcagcccctcccagtagtagccagtagggccgtgggctcggcccggacctggcatccggacttggactcggggccatgggcttggcccggacccggaacccggacttgtactcggggccgtgggctcggcccggacccggcattcggacttggactcgggaagggcctcctgtccctacaaggggcatgtggacagcagggacctgcgctaccgtctgtggtctcaataaagaaaccgaccacatggccccgg

SEQ ID NO: 234 - DNA, 2388 bp, Homo sapiens
atattgggtcagcattttagacatagtatatagtcccatactgcatctttgggtcagctatggaccacatatgacagtggtcccgtgagattataatcctctatttttgctgtatttttcctatgtttagatacacaaacatttaccattgttagaattgcctgtagtattcagtactgtaacatgctgtataggtcggtagtctaggaacaataggctataccacagagcctaggtgtacaggaggcgccaccatccaggtgtgtgtaagtgcactctagaatgttcacacaatagcaaaatcgcctaatgatggcgtttttcagagtgcaccctcgttgttaaagcttagttttagtgttactttgcttaccccttccccggttgatcagcacgtaggttgcttggattttcttcatgctcacaggtgtgtgttagtcaacattcagccagtgtttttggagcagctatgggtgcctggtggtttctcagggctgaggatacagcagtggcaaaactcagccatctctgccttcttggagtttctagttggagggagagagtagtgtgaagcctcgtccagagggtgggcctgctggtgggaaggcctgtcactgtggtgaccgtgtgaggtgatggctgggaggtggcttgagagctggtgagtgggtctgtctgctctggttgccatggctgaggctcagcccacttccccagggcctgccctccacggatgactggcgacggacggtctccttacggccgcattctgtccctgcccgcctgtgttcttgccgttggctcagaactccctctcccagcctctcctggtgtcgtcacaccccaggctccctggacccttctgtgacctgcctgtcatcccagcccgctctccttgggctgaccctgggctgcagggaacaggatgggtgtcggccggtctgtcccacacagctagctgacgaggtggtttctggggcaggagtggaggcagcacagacagtgaggacgaagaagaggaggacgaggaggaggaggaagacgaggagggcattggctgtgcagcccgtggaggggccacccctctgtcctaccccagccctggccctcagcctccaggccccagctggacagccacctttgacccagtgcctacagatgccccgaccagcccccgagtctccggggaggaagagctgcacactgggcctccagccccacaggggcccctcagtgtgccccagggcctccccactcagagcctggccagccctcctgcccgtgacgccctgcagctcaggtctcaggaccccacacccccctcagcacctcaggaagccacagaaggcagcaaagtcacggagccctcagccccttgccaggccttggttagcatcggggaccttcaggccaccttccacgggatccgttctgcccccagctcctcggacagtgcaaccagagacccctctacctctgtcccagcctccggggcccaccagcccccccagaccacagaaggggagaagagcccagagcccttggggcttccccaaagccagagtgcccaggccctcacgcctcctccgatacccaatggctctgccccggaagggcctgcatccccaggctcccaatagctgcctggtgcggcagcggcggccaaatcttccgtcctcccgtggatctcccggggtgggggcagggcgggtcccacgatggcccccattgccctcatcaccctgacacccccacattctctcctctggacccccaggaggctggtgccagggagacaggcccaacccacccccatttgcactgagaagagaagttttggagcgttgcctcctagaataaagatacagagagtcaaatagagagaatggagagagagaaacatatattatatattatatagagagagggaggagagcgagagagagtgaggacaccgaactgggctggcggctccaaagcacagccttccctgttccgtcccagcgggagctggtgttaggggtcccaaggttgccacccacgtgcccagctgtcccacgctgcagcgcagacggccacgcccacacccggccttttagctcaggtccaccatgggggacggcccagcgtgggtgggggtgccagagggtcccgagtgggggccgtgcctttgcccagaccctgcactttcaaccaggccagtccggctctggggagcaggggcctccccggcaacagccccaggggccttgagggtctgaggtcccagccctgttgccaagtgaccttgtccccagctccctcctcccaggctggtgtgagtgtgcgtgcgtttgtgccgagcttctatttcatattgcaaatataaataaaggaaggcagtttacg

SEQ ID NO: 235 - DNA, 1577 bp, Homo sapiens
gaatcgctcccagcctgggaagaagcctcccacgccagggccccggacccaggagaggccatggaaagcctgaaccccagctggctgacaccccccacacccccaagggcccttagtctgagaccaactctcctggacaccaggggcccacgcaggccctccgtgccccagttacctgtgccctggaggcagccacggagtcacgaccacgcgggggacgccagcccacaggcggaggccggtttcgaggcggctggcagccgcccccccaccccatgccctttgggtggcacctgtgctggtggagtgggggtggctggctttgcacacaggcctgctcctgtaccgtgctgcgacagccatgaaggaagaacctggctgagtctccacctgccgtggactgtaccaggtttggggaggccaggcactgctaagggtcagtctgcccagaccagtgtggacacaccaagtgcctgcgagcccctgggagctgcccgtgccaggctggagtgccggggaggggcgaggacagctgcagccccgagatgtaaacaggcttgcaggtataaaagctggagcccctgggcctctccacaccccagcctgacccaccttccagaactctcgaaagaagccaggcagagcaggatccagcaccacgcggcgtctacgtctgctctggcccaagcagcacccccaatccgtgcgtgcaccccacgaattgactccctatccaccgaggaccaggatggaggaggacttctcctcccagatgaagaagatggccttggccatgggcacgtccctatcagacaaggacattgagctgctgcccacggacatgagacaccacgggtccttcaactacctcaagttcttcaagcacatccgcaagctccacgcctcgggccagctggacgacgccatccacacggccttccagtccctggacaaggacaagagtggcttcattgagtggaatgagatcaagtaatggctggcggccagggaggggtggggcccaggccacccagaccacgccgaatgcccacatggcggacccggccttcccccaccgggtccccgctggccttgcagctggcagggctgggccagaaccagctagaagcccaggaggcccagaggcccaggctcccggcccgaagtgcccttgcctacaaggtggggggcgaacggctcgtgagtcactgggcactggccggaagccccttggccctgactcgagcccccttggccccaggtacatcctgtccatcatccctagcagcgggcccaccaccccgctgacagacgaggaggccgaggccatgatccaggcggcagacacacacggggacgggaggatcaactacgaagaattttctgaattgatcaaaaaggagaaaattccaaagaagaagtagcaccatgactagccctggccagccaaggggctcccatggggtaaccggggtgaccacgcacctgggcagaagccgttggggccggtaagaggcggcagccgtgagggtggacccagcttttgaaggaaaatggaagaaaagcagcattaagtg

SEQ ID NO: 236 - DNA, 1881 bp, Homo sapiens
agcgcggcagcccgcgcagccggtgactgggggactgggtttggagtaggacctgcggcgtgctcgagactccgacttcggtcttgcggcgcgctcgcgcccgcgggccatgccccactgactctaagtgggcactgccccggctccgggagggcgagaccgagcgccggccatgggaagcttccagctggaagactttgcggcgggctggatcggaggtgcagccagtgtcatcgtcggccaccctctggacacagtcaagactcgcctgcaggctggcgttggctacggaaacaccctcagctgcatccgcgtggtgtacaggagggagagtatgttcggcttcttcaagggcatgtccttccccctcgccagcattgccgtctacaactccgtggtgtttggggtcttcagtaacacgcagcggttcctcagccagcaccgctgcggggagccagaggccagtcctccccgcacgctgtcagacctgctcctggccagcatggtggccggcgtggtctctgtcgggctgggagggcccgtggacctcatcaagatccggttgcagatgcagacacaaccgtttcgggacgccaacctcggtttgaagtccagggcagtggctcctgcggagcagccagcataccaggggccagtgcactgcattacaaccattgtgaggaatgagggcctggcggggctataccggggggccagtgccatgctgctgagggatgtcccaggctattgcctctacttcatcccctacgtgttcctgagtgagtggatcacacctgaggcctgcacaggccccagcccctgtgccgtgtggctggcgggcggcatggcaggtaagggcagcagcagctggagccgcacccctgtgcaggccacagcagtgggacagctggggaactgccatgcccttctcagcccagggggagggcaggacacatttaggtactcacccaacaattctttgttaggtacctactctgtccccggccctctcccacctcagtctcatcccttccctatgcagctatgagaatggcagttcccatttgactttcaggcaacagatatattttgaacacatactctgtgtcaggcattactaagctttggaaaggaaatccattatcatggttcagtttattaaatgcaatctttgtaatgtaaggatgccattagttctacaaggtaggaatcggtttccccatttcacagatgagaaaactcaggtccagaaatgttaagtagccaatcccaggtcatacagctggagctgacagtatagcagggactctgcagtcagaaagatttaagttcaaatccacacttcatcattttgtgaccatggacttgttgcttaacctccctgctcagaatcctgcaccacatccttctttcatttaaggtaaaagttgatatctttgcaatggttttccaggccctcagtgatctagctccctgttccccacccacctcacttctactcctctccccttcctcactttctccagtcacactggtctctgctgcaacttgaccatgcctggcccttccctgaccacagggcctttgtacctgctactcaccacctcctgaatttaacaacgtggagaccactggggattttggcaagggccatttgatggagagaagggtgtaaaaacctgatgaagtgggataaagaaagaatgggatgaaggatattggtgcacccaagtatacacaactcttctgagggttctgctatgctgtaatgaggaacagagaaacagagccatagccagaagggcctttggaagccaagagaggatactttttaagaaggctgacatcatgacatgtttgatgtgatgggaaagatctaac

SEQ ID NO: 237 - DNA, 2396 bp, Homo sapiens
ttatgctcagttcagcctcagatttaagtgatttattgttttctagttcttcagacctaatagagctgctgtggtggctctgtcagtggttggcagtggccatcagccctcaccctgccattgggggccttgtgcgttggcatctggttgttgctagcagccctgagggggatggggcaggccaccgccacctctcactggctgctgggctcaggactggtctgctgttagggaagctgcaagtccagccagttgactgcacctgtttaagaaaaagcactactctgttacctgagaacctttgagattcctgttgtgaaggaacaatcatatggaaatgaaaacttaagcttttagctaataacagaaaagtgaactagcttttgtcagttgttcaaaagtgtaaaattctactgaaagaagacagctcaatatttcaaacgctggagctgtgttatttggtaaccaagtagagacggcgcccggcagtaatctgcggctgctcagtgtggccctttcactgaggccttggtccacagcaccagccccgagaggggtcccagctgccgaccttcaggctttcttttctgtttataaagtgagggtattctcagagagctttgaggagaaaatagtgaagcttgaaggttgttggtgaagctgtgaaatattgaacacttcctaatcttagattaggttttctgcatcttagatgagtcttgaatagctataaccaaaggctcttgtttatttaaacactttaattatagagagctaaaggcaggaggcacagggtttgggtgggtgaggggctttgcagaatacagctggtgctcatcagcccctgctaggaatttaggactcactggtgtagttgctgtaaaagctgccacctccaggaagacaactatgggtgtttaaagtggtggtggtgtagacagcgacatttccagtgagctttaggcaggaatgcagggagggccttgggagcgaggcagcaggcgggcaggtgtggatgggtccatgctcagagccatatcatcacccccaggcagcatcctgaagcccactgagaatttgggctgagtgatgtgccccggagtgggaggcagctgtcaccacacgtttctctggtagcttcttcggctgtggaagtctccaggttaggggctgatcaccaccacttcgtccatgaccctctgtctcctgtctttagaggtcagcggaacggttccgtggagccgccctcccttaagcccagatgctcacaccgagcttcctgattgtccttcttgtcatggctgtgttcaagatgttctttctgtggggcgtctcttccttgctgggctgacagccctgggacagcggggacgccacaccctggggcacaccgcctagggtcccttgtgtggtggggggccaagagagactgctatggaaggtgatgttgactgggattaccagtacaggtcctgacaactgtaaggtcacaattagtatccagcatgcctgtctgccatgcatccctttgcccatcctgagctggcgatgatgccacatgtgaggccctgtcctggactcaccatgtgggtgtttgcagctctgcctgagagaccttgttcctcatgcacaataggaagcagcaggcctgtctgttaggactgctgtgagtcactgcgatggcccaggagcctgccacgttctgaggtcatcagcacagcacccgttgttgttactgggagttaacatgcaggggggactccctctaacggcagcatgctgagtactggcagcctcactgatccggtcatgtggcctcgggagccgcacaggcttcatgggggttttgtggttttaaggactgtgagggttgactgaattatatgcactcacttgtcatgtttctgggctttttgtgcccttttccctggtactgcaggaaaggaaaagacaaagtactgtcaagagcaattgctgagcagatttgatgtgatgcagtaggatgagacatgatactgggatcacctcttccaggtcaccgcaagggtttatactgctccatgcctgcagtgcttctggctctgttgcgggagcacctgaccccagtagccacagccaagaaggttttacttttaaatggcatcggcaggtgggtaagagttgatgatgctgctggcaggtgagggaccggctgtggacttccatcgccggttccacctgccctcctgggccagggtctctgagatcttggatgtggatttcatctccttgttgtcaatacctggtgcttttatctatcatcagtacactgtacttttacttctctgctatgttgactcctgagaacatgagatttaacaatgcatttattttattaaaagccagtttttcttggc

SEQ ID NO: 238 - DNA, 1882 bp, Homo sapiens
agatgcagatggcagcagcgcagccacaggaagtgggacgcagcctgtggcctccgagattggcttctctgtgtcctccttgctgtggaccccgtgacgccacagagcaagaatgcttggacagtgattggaaaaggagataagaatattaaggctttctgtatagactacagagccagggttctagccccagagggcaatggccccaagtgcatgctgagtatcagtgctgatattgaaacagttggagaaactctgaagaaaatcatccctaccttggaagagtaccaccattataaaggaagcaactttgattgcgaattgaggctgttgactcatcagagtctggcaggaggaattattgaggtcaaagatgctaaaatcaaagagcttcaagggaacactcaaacaacaatcaagcttttccgggaatgctgtcctcattccactgacggagttgttcttattggagaaagactatggagttgtagagtgcataaaattatccttgatcttatatctgagtctcctacagaggatgtgcacagacttataatcccaattttcatgatgtaacctattacattacatgatgtaacaccattatattatggtggttttacaatgttgtctgatgaccaccatggatgcctggtggggtttcccaggcagggaagaggtggttttgacagaatgtctaccagtcagggtgggtgttccatgtggccatctggaagagattatgatgacatgagtccttgttgaggaccacctcctccttcttttggacaaggtgcctggggtggtagcaaagctgagaatcttcctctttctccactaccactacagagggtaggagacataagggcctatgacagaagaggaagacctggagatggttacatggcatggctggcttcagtgctgatgaaacttgggactctgcaatagatacatggagtgcatcagaatggctgatggcttatgaaccacagagtggctccagatataattattcctatgcagcggacagtggctcatatggtggacctattattactacacaaggaactattcccaaatatttggttggatctattattggcaaaggtggtcagtgaatcaaacaaatccatcatgagttggagcttcaactaaagttgatgagcctttagaaggaggtgaagatcagatcattatcattataggaacataggaccagatatagaatgcacagtatttgctgcagaacagtatgaagcagttttccggaaagtttttactaatgctagtgaaggactgaaggagtcctgcatcttttttttttttacatttgcttctgtttaaaaagccatcatgcctctgcttcacaggtgttttgcatctgaggtgtagtgaaacctttgctgttcaccagatgtaaggttttagttccttacaaacagggttgggggtgtagggaagggcttgcaaaaactaatgttgaaattttgaaacagcagtagaatgagcggattttttttttgtgttcattgttactggtttaaaaaaatgttcccctatgtaatttttgtgaacaccttactttgtggtcactgtaacatttgaggggtgagacagggaggaagagtaacaataggccacatgtccctggcatctgttcagagcagtgtgcagaatgtaaggctcttttgtaagaaatgttttacgacttttaagataaatttagataaacctaaaatagtcacagaggatgtaaaataaaagtgaaagactcccttcttacccctcacccctccatcataccttttaaaactaacaactgtgaatcgtttattgtgttaaccctatacgatcattttaaataaaaaataagcctgtg

SEQ ID NO: 239 - DNA, 2511 bp, Homo sapiens
agatgatgcttggattgaacttggtggcttcaagtgtctctgcttgatgtaagtgtgaggctatgtcctagataaatacaacaacagcaggaggtattcctgaaagacacattcaccagtaatggggttatgttaaattaatcataggtagtgttcttagtgtgtgccctctgcattcgtgtaccctcctgacatccttaataagcatctgctattccttaacagctttattgaggtataatttacataccatcacatttactgttttaactttgcaattgaatgaattttagtaaatttacacagttgttcggacatcactacaatctagttttagaacaattccatctctcccaagtgatccctcatgcccatttgcagatcatctgcattcccacccactgctgtgggcaactacaattctatactctattgctagagatttgtcttttctggacatttcgtatcagtggaattttacaatttgtggtcttttgtatctggttgctttcacttagtatggttttgaggtgcatccgtgtagtagcatgcatcaatatgcattcaatatgcatttgctttttctttttttttgctgaatagcattttattgtacggatagaccacattttgtatattcttttaccagtcgatggacatttagatttttttccactttgttgctgttatgaataatgctgccgtgaacacttgtgtacatgtctttgtgtggacatatgttttcatttctcttgggcagacatctaggagtggaattgctggatcatatggtaaatttatgtttttaagaaactactgaactattttccaaagtggctgtaacatttaacatttctaccagcaatgtattgagggttccagtttatttacatccttaccaacatctgttatttctgtcttttttattatagccattctagtgggtatgaagtggtatctcattgtggttttaatttgtatttccccagtgattaatgatgttaagcagttttttatgtgcttattagctatttgtatatcttctttggtgaaatgtcttttgaagattttttgcccatttttgaaaatgtagatttaatttttagagcagctttaggctcacaagagattgaacagaaagtacagaggtcccatatatgaccccgctcctgacaaaggcacagcctcccccagtattgatatctcacaccagccagagtggcccatttgttacaactgatggacctccattgacacatcattaccacccgaagtttataattaacactaagattcactcttagtgcagtacatgttatgggtttgaacacatgtataatgacttgcatctaccacgtagtatcaaataggatagattcactgccctaaaaatcctctgtgccctacttttcatctcttcctccccacaaaccctggcaaccactaatctttgtattatttctataatgttgtcttttccagaatatcatctagttggaatcatatagtatgtgtagccttttcagattggcttctttcacttggtaataagcatttcagtttcctctatgccttttatggcttaatagctcagttctttttaacaccaaataatattccagttgtctggatgtaccacaggttatttttccattcacctgctgaaggtcatcttggttgcttccaagtgttggcaaccgtgaatgaaaatactataaacatctgtgtgcaggtttttgtgtggacctacatttttaactcatttagataaataccaaggagaataactgctggaacatatagtgagagtatgtttcttttcttttttttttttttttaactgccacactgtcttccaagtggctgtgccattttgccttcccagcagcagtgaatgagagggcctgttgctccacatccttgccagcatttgctcttgtcctgtgttctggattttggtcattataataagtatgtagtggtatcttattgttgttttaatttgaaattctctcatgacaagcattttttcatatgcatatttgacatgcttgtatatctttggtggtgtcttttgctcttttttttttttttttttaagacggagtcttgctctatggcccaagctggaagctggagtgcagtggtgtcaccccggctcactgcaagctccgactccggtgttcatgccattcctccagagtagctgggactacaggcacccgccaccatgcccagctattttttgtatttttagtagtcccagcactttgggaggccgaggcgggcggatcatgaggtcaggagtttgagaccggcctggccagcatggtgaaatgctgtctctattgaaaatacaaaaagaaaaaaaattagccaggcatggtggcatgcacctgtagtcccagctactcaggaggctgaggtaggagaattgcttgaacttggcagatggaggttgcagtgagccgagatcatgccagcccgggagatagtgcaagactctatctc

SEQ ID NO: 240 - DNA, 1627 bp, Homo sapiens
ttgtctttggagttgggcctaacctgtccctgctgtcctttctcctctaggttgtgcgttgagacttggacacctgctgagggcactgtgcccctttcctgggtgtggacaacaggtcatagggaaaggggagggctctagcgggaaattcctttgtaaaccagtctgtgttcctgtcattttagatcgaacaccagggggacaagctggagatggcgagagagaaacatcaggcttcccagaaggaaaataaacagctgagtctgaaggtggatgaactggagaggttagaggcacttggtcccatctctgtcctcttcctaggacctgagactttcagccacttagctgttttttgcttagtgtgcggaagtgttgagggactcgaggccctggaaggtactaggcagacctcagaggaaaagctgcttccatttcagtggaaactggaggcgaccagtgcccagaatatcgagttcctacaggtgattgccaagagggaggaggcaatccaccagtcccagctgcggctggaggagaaaacacgggaatgtgggaccctggcaaggcagttggagagtgccattgaagatgcgaggaggcaggtggaacaaaccaaggagcacgcactctccaaggagcgagcagcccagaacaaaatcctggaccttgagacccagctgagcagaaccaaaacggaattgagccagctgcggcggagccgtgatgatgcggaccgccgctaccagagccggctgcaagacctgaaagatcgcctggagcagtccgagagcaccaaccgcagcatgcagaactacgtccagttcctcaaatcatcatacgccaacgtgtttggggatggtccctattccaccttcctgactagctctcccatccgctcccgatctcctcctgcctgaggccacttatcagggcctggagccctgatggaagccataggaactccagagttgccaagccatagctgagaagcctggtggttttcctctcccagtgaaaaaatgggttcagggtcttgtccttagctactagctctagaaaagtcccaaaagcagcagaaggtgaagcaggaagcacttggttttctccttcctgatatagtcacctgttggaagtgttaaaatttcctcgacaggccttaaatttactactacattagggtaccacattttaacttaccatgactttgctccttcctttcctgagaaaatatttccactggattttttccaccagtccccttacagccctcattgttttaggaatctctctcaggtttttttctgacctaaaccagcaggaagtcgtcctgggctgtaagcaccatcacttgctttttttttttttttctgatttcacaagtgtggtgttttcccaaggctcccttcccaagctcagtgcaaacctctcactcccaagtttctttgaggccacttgcccccaagcacttcacaatagaccctcgagggcttgtgtccatttggccttttacaagtgtaatgccaatttcattgatttttgtttcttttggcctgatttgtatctctggaatgcatttattcttgaaatatttgtgtgattttacaaaaagcttttgtaatcagtt

SEQ ID NO: 241 - DNA, 1927 bp, Homo sapiens
attctatatgctaggtacttaaagcatccccattttccaaatgtaggaaacaggcaaaaagaaggtaaatacttggccagattactcctgtaatcccagcactttgggaggccaaggcaggcagatggcttgagctcaggagtttggaaccagcctgggcaacattgtgaaaccccatctctactaaaaatgcacaaaaagaactaatttaagtttcttgtaggattctggttataaaacactggtcaaacacacagggcatggatagggcagggccagggacaaggtcaggccaggaaggggccagggccaaggcagggccagagctggacttggaggtgtcctggtctgatttgccctgccccaacgttggcccagccctgctctggcacgtcctgtcatgccctgtccctggcctgagcattggccctggccctgtcctgcttctggccctgccccggagttgaccaggcactgccatggcccagtcctgcattgccctgccctcctctgccctggtgctaccatggcgctgcttgggccctagctctgcctcgactctggacctgccctgactctgctcagccctggatctaccctgactctgccttggtgttgccctcccatctctatggcctggctctggccatgccttgcacagaccatgctctgccctgcgtgccccagcctgggcccagccctcatcctaccatattcctgaccccagccatacccttgttctcgccatgaccctgccgtggccctctcctggcccttccttgatcctgccctgcccttccatgccctggccttgccctcaccctgcattggccctgcactggtcctgccctgccctggcactgccttggccctggccctgccttcttcctggccttgcctttgccctgccctggcctgaccccaggcctactgagtccatgaaatggccctggacctgccttgccatcctctgtcctggccctatattgtccccaccatgctctggtccagcgcttgccctagccctgttgctagtcctgccactgctatggccctgctctgtttttggccgtgccctgtgctaccctagccctgccctgccttggccttggccctaccatggccttctcctaccctggcctggccctaccctggccttttctaccctggccttgcccttccctggtgttgccctgccctggccttgccctgccctggccttggctttgccttatcctggtcctggttctgccctgaccctggccttggtcctctcatgtccctggctgtgaccctgcccctggtttttctctggccatgaccctgccccagttctgtcctatccctggccctgtctcagttctgtcctagccctggcctttcacagtactttatgcttagtaagggctccatggtgtctgtgagttgaatgttgtgttcatagtatctgccaaaacagaaagaaaaaagtaaaatattttgataagaagttaaagctttgtatataatatgccttgaattgtaagtgcctgttattagttgtattacatatgggtcatggctttgtacacgtaactccaaaccattgatactgttaaaaggatatatgaatatatgaaagaatgtataaacgtaagaatgtatcagtatctaatgacctttccaaattaatttttatttttagctctattagatttttctcagtgtaacaaatgtttattcttatgtaattaagggtgtgtttcctgtacagaatattcataatacctaattgaaaattatatgatacaaaaatataatactatttttaggccaagcatggtggctcatacctgtaatcccaacattttgagaggccaagtttggagaatcatttgagtccaggagttgaccagcctgggcaacatagcgagaccttgtctttatt

SEQ ID NO: 242 - DNA, 2277 bp, Homo sapiens
tagaattctgttcttttctaatttccatcaggtattttagttacatatcctgtcccacttctttaatttacctctagctatcaaatttaatatatgagctttaagtattattagaagaaatatatgcttagaaaaaatgttattcttaattgcactttatacattttaatttactcttctgatctgtctaaacttgttttccaaaaattgttttaactaaaaaactatatcattaagagtttatcaataatagtttatttcatgatctatacctcgctcatttgtaatgaagagttaaactatgtttcatttaccttaatgaaatctattttcatgtagcttcactctacagtgtttacttcataaacacttcatggtatttgaatcggtttatgcattttctattttgttacttttcttattttatttcgttcttgcatataaaattgttggtagttgccatggcaattctaattgatttctttctgctgttttgcaggcttttaaaaagatttgcacaatacatccttcatattgttatttttatctctgtaagtttgtaatggcctctaaaaaagaaagctgtgtaacaagagcatcagatgttactttgctcactgttgaaggcggtgaagaacagaagaaaactaggaagaaaaccaagctgggaagggcaatgaaggaacaggttagagttcaaaagtaaaagtacgttccacacaaaggaaagatttcagagatggagcctcactctgtctaccagactggagtgcagtggcatgatctcggctcgctgcaacctctgcctcccgggttccagcaattctcttgcttcagcctcccaagtagctgggattacaggcgcctgccaccatgcctggcctaatttttgtatttttagtagagacagggtttcgtcatgttgtccaggctggtctcgaactcccgacctcaagtgatccacccgcctcggcctcccaaagtgctgggattacaggcgtgagccaccatgcccagccgaaacacctttattttctaaagaatctttccctgacttttgtctacaagttatggtgaaaagagtcctgaaggcaattggttctgtccttcaaacttgaagcaattatgaatggtgattgacaaatagtagcctacatactggtgctccactggaagaaggcacagagcctgccagtagtgatgggatccgggatgttgcttccccctgggaactgattgtttctaactgcttctggacaacagccattgaatccagggcaagaaagaagggcagagcatggagtcgtgaacatgaaagaggaggttcctgagacttgaaatccacatctggataacatctttgactattattattattatttacttttttttttttttttccagatggagtttcgcttttgttgcccaggctggagtgcaatggtgcggtctctgctaattgcaacctccgcctcctgggttcaagtgattctcctgcctcagcctcttttccaaatgggcgcttattatggtagtcctgcttcttctccactattgtacatggagggcagaccaattttcctttggtttataggcttgcagacccataacaaaccaaacaaacaaacaattttccatttgtatctgatggaaagactgcatatctcccacagtacctacattttaagctggatgcaagaaatgcaagagcctttgaggttatctcacttggaatgttctttggaaagaaacttgggctctgataaatgcttaacaaccagctgagatagggttgtgtagaacacacacacacacacacacacacacgcacacgctatatatttattataaatgttgctgatataaaggatgtgtatctcataacttacaaataataatagtaatatatacagtactctttattgtaaactccttatgaccaattgattcttacagaatgtgttttttgacaaaaaaaaattgcaaataagtgtaattcccacatgaatgatggttgatatgtttgtttttatgagtaagatgaaaatgaagcaatgaagatgtaatgaagagtatgtcagaatttatttattcaatgatgaaagcaacttttttcagatcctagttgtcaaatactgaaataatgtttcctcgatttttggtgctacttaccatatagaggctactgtcataatatacctttagtttaatttacattagtaatattttctttatgattaagtctagacaattaataaacagaaagatcaagccctg

SEQ ID NO: 243 - DNA, 2361 bp, Homo sapiens
aaaagaccccgctctcgaatctggggtgacaggaaggagccggtccaggctccgggggctgggaaagagcgcgtctcaaaggctggctggagtggagccaagggaaaagatcgttagagacagcgcccctgaccaaccacttagagcagcgcaggggtgggagggcggccgcaggctctcctctcgttagtgccccctgtgtttggggccccgtgatctcaacggtcctgccctcggtctccctcttcccccgccccgccctgggccaggtgttcgaatcccgcgggcgtggagcgccggaggacccgccctcgggctcatggcggccccggtccgcctgggccggaagcgcccgctgcctgcctgtcccaacccgctcttcgttcgctggctgaccgagtggcgggacgaggcgacccgcagcaggcaccgcacgcgcttcgtatttcagaaggcgctgcgttccctccgacggtacccactgccgctgcgcagcgggaaggaagctaagatcctacagcacttcggagacgggctctgccggatgctggacgagcggctgcagcggcaccgaacatcgggcggtgaccatgccccggactcaccatctggagagaacagtccagccccgcaggggcgacttgcggaagtccaggactcttccatgccagttcctgcccagcccaaagcgggaggctctggcagctactggccagctcggcactcaggagcccgagtgatactgctggtgctctaccgggagcacctgaatcctaatggtcaccacttcttaaccaaggaggagctgctgcagaggtgtgctcagaagtcccccagggtagcccctgggagtgccccaccctggccagccctccgctccctccttcacaggaacctggtcctcaggacacaccagccagccaggtactcattgaccccagagggcctggagctggcccagaagttggccgagtcagaaggcctgagcttgctgaatgtgggcatcgggcccaaggagccccctggggaggagacagcagtgccaggagcagcttcagcagagcttgccagtgaagcaggggtccagcagcagccactggagctgaggcctggagagtacagggtgctgttgtgtgtggacattggcgagacccgggggggcgggcacaggccggagctgctccgagagctacagcggctgcacgtgacccacacggtgcgcaagctgcacgttggagattttgtgtgggtggctcaggagaccaatcctagagacccagcaaaccctggggagttggtactggatcacattgtggagcgcaagcgactggatgacctttgcagcagcatcatcgacggccgcttccgggagcagaagttccgactgaagcgctgtggtctggagcgccgggtatacctggtggaagagcatggttccgtccacaacctcagccttcctgagagcacactgctgcaggctgtcaccaacactcaggtcattgatggcttttttgtgaagcgcacagcagacattaaggagtcagccgcctacctggccctcttgactcggggcctgcagagactctaccagggccacaccctacgcagccgcccctggggaacccctgggaaccctgaatcaggggccatgacctctccaaaccctctctgctcactcctcaccttcagtgacttcaacgcaggagccatcaagaataaggcccagtcggtgcgagaagtgtttgcccggcagctgatgcaggtgcgcggagtgagtggggagaaggcagcagccctggtggatcgatacagcacccctgccagcctcctggccgcctatgatgcctgtgccacccccaaggaacaagagacactgctgagcaccattaagtgtgggcgtctacagaggaatctggggcctgctctgagcaggaccttatcccagctctactgcagctacggccccttgacctgagcttatgccgtgaaacagcccccagcccccgtctgtcccccaacccaggctagccagccttttaacaacatcttttggggtacaattagaatctaagtgtttgcagccatatgtgtcatgtagaagatgcctagccctggggaccttgtgaaatacgcaggaaccagggataccatctggtccagtggtttttaaacaaagctgcttagcacctggaattccctggtcagggagatggagtcagtggggcattgcagcttggaatctattttatgtcaccagttggtcctcatcaaataaaatttccttaggagtgcagagggctcattgggaaaataaaaataataaaaataaataaaacttcctaaaagaaaagattgaaaacc

SEQ ID NO: 244 - DNA, 2128 bp, Homo sapiens
tggtaactgaacgagatctccacaagaaacccatacagatgagtgcacatttggccatgatcgataccctcatgatggcttatactgtagaaatggtcagtatagaaaaagtaattgcgtgtgctcagcagtattcagctttttttcaagccacagatctgccctatgatattgaggacgctgtcatgtactggataaataaggtaaatgaacatttgaaagacataatggaacaagaacaaaaactgaaagaacatcacacagttgaagctccaggaggtcaaaagtctccttccaaatggttttggaaactggttccagctcgttatcggaaagagcaaacattgcttaagcaactgccttgcattccattggtagaaaatttgttgaaggatgggacagatggctgtgcattagctgcccttattcatttttactgtcctgatgttgtcagattagaggatatttgtttgaaagaaactatgtctttggctgatagcctgtataatctgcagctgattcaagaattttgccaagaatacttgaaccagtgttgccatttcactctggaagatatgctctatgctgcttcatccataaagagtaattatttggtgttcatggcggaactgttctggtggtttgaagtggtgaagccgtcttttgtacagcctcgtgttgttcgtccacaaggagctgaacctgtaaaagatatgccttcaattcctgtcttgaatgctgccaaaagaaatgtcttagatagtagttctgacttcccttcaagtggggaaggagctacatttacacagtctcatcatcatttgccttctaggtattcacgtccccaggctcattcttcagcctcaggaggaattagaaggtcttcatctatgtcttatgttgatggcttcatagggacatggcccaaagagaaaagatcatcagtgcatggcgtatcatttgatatttcttttgataaagaagatagtgtacagagatccactccaaaccgaggaatcactcgttctattagtaatgaaggacttactctgaacaacagtcatgtatctaaacacattaggaaaaatttgtcctttaagccaataaatggagaagaggaagcagagagcattgaagaagaacttaatatagattctcacagtgacctcaaatcttgtgtgccccttaacacaaatgaactaaattctaatgagaatattcattacaagcttccaaatggagctttacaaaatagaatacttcttgacgagtttggcaatcagatcgagacaccaagcattgaagaagcattacaaataattcatgatactgagaaatctcctcatacacctcagccagaccaaattgctaatggcttctttcttcatagtcaagaaatgagtatcttaaattcaaatatcaagttaaatcaatctagtcctgataatgtaactgatacgaaaggtgccttgagtcccataactgacaatactgaagtagacactggaattcacgttccttcagaagatattcctgaaactatggacgaagattcttcgttgagagattatactgtaagcttggactctgacatggatgatgcatctaaatttcttcaggattatgatattcgaactggcaacaccagggaagctttgagtccttgtccaagtactgtaagtaccaagtctcagccaggcagcagtgcttcttctagttctggagttaaaatgaccagctttgctgaacaaaaattcaggaaactgaatcataccgatggaaaaagtagtggaagcagttctcaaaaaactacaccagaaggctctgaacttaatattcctcatgtggttgcttgggcacaaattccagaagaaacagggcttccacagggacgggacactacccagctgttggcctctgaaatggtgcatcttaggatgaaactagaagaaaagaggcgtgctatagaagcccagaaaaagaaaatggaagctgcttttaccaaacagagacagaaaatgggaaggacagcattccttactgtagtgaaaaagaaaggggatgggatatctcctctacgagaggaagcggcgggtgcagaagatgagaaagtatatactgatcgagc

SEQ ID NO: 245 - DNA, 1727 bp, Homo sapiens
acattttggaatccaaaacttttgaacccagcattataaaagaaagatcttaagacatttgtttttgtgtgtgttcagtatattcaattaatatgaaagcagcttggtttccaaacatacggaagaaatttttcatcaaaagaaggactttttagtgggtttcagatttctgcttgttgcctgtcacttgatacaaaatatctgattttctagattctttgaagccaagtggaaaagtagataaaaccgctttctctccccagatgggatggatgtgtgtttgtgggggcttatagaggacgcagccccatcggtgacactgcgccaagtcaatacagcctgggaagatgaggctggaccaatagcagtaagcatgctcactttcccaggaggaaaggctggggcatccccagggaagaggattctggtctccatggtaaactgtggagggaatccacaaagaagaaagctatgggaacacttgaggaagcccacctaaagctatgcagctacctggatcagaattacctgtggtgaacaagcggtgaggaatgcttttgtttactctagggaaatactgccttagtatcagttcagcaatagaaaacctgggtcagccagtccttcccacttgtcttcacaactctcaggtcatccagtttggtttcccaacaaacctcccagcatcagcctcttcatgctcaaaaggagaaagactgaaagggaaactgagtggccagactccggccctgacgcagccttgggaagagatgttgctgtggcccccacgcacaactgggactttaatgactgagaccagcctaaccctggatttgctgtccttgcaccccatcacctccattgtagttgttattatgttgctttgtaatgttctgattattgctggtttgctccactggacagtaagtaccttaatattactcactgcttctcatccatcatttccaatgccaaacacaattaattggatgagtgaatttttaaaaattgtacatgggatacatgtataattttttttaaattatgcttttaaaaaaattatacatgggatacatgcacatggcatacttgtgcaggtttgttgcataggtatacatgtgccatggtggtttgctgcacccatcaacctgtcatctacattaggtatttctcctaatgctacccctaccctagccccccagcccctgacaggccctggtgtgtgatgttctcctccctgtgtccatgtgttctcattgttcaactcccacttatgagtgagaacatgtggtgtttggttttctgttcctatgttagtttagttagctgagaatgatggtttccagcttcatccacatccctgcagaggacatgaactcatccttttttatgactgtatagtattccatggtgtatatgtgccacattttttttgaatttttaagaatatgttaggcaacaccagtcatatcattattctctctaggacttatttgtccatatttaagatgtagcaactggtataaagcctcttccaatggtcatgtgctaggattctagatgtgggagggcaggggatgaggctagggataaacagaaaactacaccattaggtacagtatgcactactcaagtgacaggtgcagtaaaagctcaaaattcacaactttataattcatccatgtaacaaaagctacttgacccccaaaactactgaaataaagatt

SEQ ID NO: 246 - DNA, 2798 bp, Homo sapiens
cttctccaaatgcaccggctcactgtggaaggtgcagatttcgtccctgatcctttctttgtggaattgactgagagtcttttacgattggaatggcatattaaaggaaagtacacgtgccttggttgtttggtagagtgcataggagttgaacatattttggctatagataaaactattccatctcaaatcttagaggtgatgggagaccagtcattggtaccttatgcaagtgacctcttggaaaccatgtttagaaatcataagagtcatttgaaatcccagactgctgagagttcttggattgaccagtggcatgagacttgggtttctcctctcctttttatattgtgtgaaggaaacttggatcaaaaatcttacgtgattgattattacttgccaaaattattaagttacagccctgaaagcttacagtacatggtaaagattcttcagacttctattgatgctaaaactggacaagagcaatctttcccatccttagggtcttgtaatagcaggggggctctgggagctttgatggcatgtctgcgaatagctagagctcatggatatcttcagtctgcaactgatacctgggagaacctcgtgtctgatgcaagaataaagcaaggcttaattcatcagcattgccaagtaaggatagatacattaggcttgctttgtgaaagtaatcggagcacagaaattgtttccatggaagaaatgcagtggattcagttctttattacatacaatcttaacagccagtctccaggagtgcggcaacagatctgttctcttcttaaaaagttgttttgtaggatacaggaaagttctcaggtactttataaattggagcagagtaaatccaaacgtgaaccagagaatgagttaaccaaacagcacccttctgtttctttacagcagtataagaatttcatgtcatccatttgtaacagtctttttgaagcattgtttcctggatcttcctactcgactagattttcagctttaaccattttaggttcaatagctgaagtttttcatgtcccagaaggcagaatttatacagtatatcagctgagtcatgatattgatgttggtcgtttccaaacactaatggaatgttttaccagcacttttgaagacgtgaaaattttagcatttgatcttctgatgaagttatcaaaaacagctgtacattttcagttatcaaatgcttgatggaaaatcttgaggaagaagtatctcaggctgaaaattctctgcttcaggcagcggcagcatttccaatgtatgggcgagtccactgtataacaggagctttgcagaagttatctctaaacagcctgcagttggtgagcgagtggagacctgtggtagagaagctccttttgatgtcctacaggctttccactgtggtgtctccagtcattcagagctcatcccctgaaggcctcatcccaatggacactgattcagagtcagcaagccgcttacagatgattctgaatgagattcagcctcgagatactaatgattattttaaccaagccaaaatattgaaagaacatgatagctttgatatgaaggacttgaatgctagtgtggtgaatattgatacttctacagaaatcaaaggtaaagaagtaaaaacatgtgatgtaactgcgcagatggtgctggtatgttgttggagaagtatgaaggaagttgctttacttttaggcatgttgtgccagcttctgcccatgcagcctgtgccagaatcttctgatggattattgacggtggagcaggtaaaagaaataggagattactttaaacaacaccttttgcagtccaggcacagaggagcatttgaattggcttatactggttttgtgaaactcactgaagtactaaacaggtgcccaaatgtgagtctgcaaaagctgccagaacagtggctatggagtgttttagaggaaattaaatgcagtgatccttcatctaaactctgtgctacaaggcgcagtgctggaattcctttctacatacaggcactgttggcatctgaaccaaagaaaggcagaatggatttgttgaaaataacaatgaaagagttaatctctttggctgggcctacagatgacatacagagtacagtcccccaggttcatgctttaaatatccttagagcattgttcagagatacgcgcctgggagaaaatattattccttatgttgctgatggagctaaggctgcaattctgggttttacatcaccggtctgggcagtgcgaaattcatccacacttctctttagtgccttgatcacaagaatttttggagttaaaagggcaaaggatgaacattccaaaacaaatagaatgacagggagagagtttttctctcgtttcccagaactctatccttttcttctcaaacagttggaaactgtagccaatacagtagacaggtgtggtcactcacctgtctaccactcccgtgaaatggcagctcgtgccttggtcccatttgttatgatagatcacattcctaataccattcgatctctgttgtccacactccccagctgcactgaccagtgtttccggcaaaaccacattcatgggacacttctccaggtttttcatttgttgcaagcctactcagactccaaacacggaacgaattcagacttccagcacgagctgactgacatcactgtttgtaccaaagccaaactctggctggccaagagttttaccacctgtgcatctctaaaaataaaatacttttgcctatttttc

SEQ ID NO: 247 - DNA, 2847 bp, Homo sapiens
attattgcaaacagacaggcagctccgtttcctgttggttctgtttccttcctattaaattactgaactgtgaggactggggagggcgggtaggaagggggatgaagcagggttaagaggattctgttttcagcaagtagtgaattccccagaagcttttcccacttagtccggatgcatccatacgatgtgaagttgggcttaattgcttcgtgttggtggcagagctctgaagatgaggactggctttcctactggagagctggcccgtggaccaggcatctattgctgaggccagatgaaaatgggccagggcctctggccacacgctgccacagccaagagagatggagcaaagccatgcagtgtcaacttaggtttgagaaaggggtcaggtcaaagtgctggaaggactccccatcactgagttccttgccatcaacacaactgcagagcagagcagaagtgaccacacatccagaggccactgtggaggaaacacagcatcaggccctttcaacacttagttaatcctcatgttggccccatggaattattttattttcctactttatacacaggaagtcgaagcttggagagattctgtgaattggtgaaggacacagagcaaagccaggattcagattcagacctgcttgactccaagatcattccagaaatctcccttttcctttggaccctgtgacgtgacagctgggccctttctgctctgatttccatgcctgacaaccatttaaatggaatacaagaatgcagttttcttaggttgaaagaaattcaccctttatcaagaattatttatagttcctctggagtgagagaggaagacgttacccacgcagtgctctgtggaatcatctgagccaccacttctgccttggggacaccatctggggaagtatctagatcctttggctgaacaacgtgttttgaggtctttaatatgtcaccttaaggatgaggcctagagaacatggccttttgttgaacagtttgtaagctctcaaatgtgagtaaatgtgaggagggtcttgagagatatagaaagctcaagaaacctagctagagtctctagactgttgagaaaagtggtgagaagaaattcccattgtgggggatgggagtggtggttcaggaggatttttgagaatggggatagagagcctagaaataaggccacacacccatggccatctgatcttcgacaaagcaagcaatgagtaatggactccttgttcaataaatggtgccgggttgactgattagccatatgcagaagattgaaactggactccttcctcacaccatatacagaaatcaactcaagatggattaaagacttaaatgtaaaacccagaactataaaaactctggaagacaacctaggcaataccaccccggatataggaacgggcaaagatttcatgatgaagacactaaaagcaattgcagcaaaagcaaaaattgacaaatgtgatctgattaaacctaagagcttctgcacagcaaaagaaattatcaacagagtaaacagagtaaacaacctacagaataggagaaaatatttgcagactaagtatccaacaaaggtctcatatccagcatctataaggaacttaaacaaatttataagaaataactaacaattccaacaaaaagtgggcaaagtatatgaacagacactttgctaaagtagacatatatgtggccaacaagcaaatgaaaaaaagctcaatatcatgatcattagagaaatgcaaatcaaagccacaataagatatatcatctcacaccagtcagaatggctattattaaaaagtcaaaaaataaccgatggctggtaaagttgcagagaaaaggaaatacttatacactgttagttggagtttaaattagttcaaccattatggaaagcagtgtggtgattcctcaaagagctaaaaacaggactaccatttgacccagcaaacctattactgggtatatgcccagaggaatagaaatcattctaccataaaaacatgtgcaacaaatgttcattgtagcactattcaaaatagcaaagacatggaatcaacctaaatgtccatcaatgacagattggataaaaaatgtagtacataggtcccatggaatactatgcaaccacaagaaagaacaagatcatgtcttttgcaggaacatgatggagctggaggccattatccttagcaaactaatgcagaaacagaaaactaaatagtgcatgctcttactcataagagggagctaaatgaggagacatcatgaatacaaagaggggaacaacagacactgggacctctttgagggtggagggtaggaggagggagaggagcagaaaaacattaatcttgttgtacagattattttgtcacccaggtactaaatgtggtactattgggtaccctaccactgttttatcaaacaagtttctgtaatagtataaatcctttgttgtcattacaacaatgttcatggcatcttcaccaggagtaaatctcatctcaagaaaccacttttttttgcttatccataagaagcaactcctcatctattcaaatttgatcatgagattgcagcaatctggtcacatcttcaggttcactctaattcaagttctcttgctgtttctaccacatccacagttacttccttcactgaaattttgaacctgtcaaaatttggtaccttactgttgtgtaccaggtttagtacctgggtgacaaaataatctgtacaacagaccccctgtgataccagttaacctaggtaacaaacctgcacatgtactcctgaacctgaaat

SEQ ID NO: 248 - DNA, 2529 bp, Homo sapiens
atgagggcctaggacatgacctaccctaccggagactttataaacactgtacacttaggctgcaataagtttattaaaaatattttctttcttttgcaataaattaaccttaccttactgtacctttttaactctataaacctttttttttttttctggtaccagaccattccaggcagggagagccactgagctcactccatgggctgcccacatggggtctggacccacctgccctcttttgcctggcaggcagcctctgggccatcacaggacacattgtgtggtgatcagtggcccaccgcctgcccttgtggtgggtgcagttcacaggttctgccccaggcctggcaccgtggccttcccagcctggcccaggataggggacatgaatgatccttgcctgtgcttctttggaccatgtgagtttggacactcactgcagaagtccctccaggtcccttttcaactgagttgtgggggacttgcttagtcctcatgcccagggtcaggggaggggtgcagagtctgcaccccaaatcccctagggcctgagggaggtatcccaggtgacctctgtcctctccagtgacatgagtcctcccagatggcctcagccctctcaagtgacatgcttccatggtgactctggctcttgcaggaggtgggctactacagggacatgagctgcctaactgccatcctcctcctgtatctgccagaggaagacaccttctgggcactggatcagctgatggctgaggagaggcactccctgcagggtaggcggacagctacccccagggcctcacacagccaggccatgggacggccaccctgcctgggcgatcctgacttcccggcaaggcaccttccttgctttccagcttgttaggagccttcaggacatccctgctgagggtcccacaggagcctagagctgaacagggaccctttcacttcaaggcagacacctttcatccccaacagcagagggcgctgcagcctccccctggccaccctgtgtgtcccagagccacagccctctagctctgagttcatgcaggtgaccgtcacttcctcaagagtcctgctacctcccagctggccacactcccagctgccctcccagcccacagatgggccaatgaagtcgagatggcagtgtctgcccatcccatgtcccccagcctgaccccatgtccaggagaggccatgtagccccttggcacccaccctgttccctccactggccactgcctgccgcagccctgcctcacagcctcaaaggcaggcctgccctccgggcacctctacccaggatgctgctgtgcagttcctctggctagggcccacctccctagagctgaggccacatggtagggtcacctaatggaagggaggaaggcctcagggtccggggtcccctgccactgcccagctcttccagctgacagctccacatcttgggagtgggctctgatgcatgatgggtcaggggcttctcagttttctacagcccaaatactgcccagctccggaggctcctatcccaccaggagcaggtataacacaaatttttcccaaagatcatgtggtacctgctgagtggacgacaccctcaactctttcccagaggcccagggtcccatggggcagggaaacagggaaagatggagctcctcgaggggctgacaagaggctgagtcccagccagggcctcgcccaagatggggattctccatgggtttggagttgggttttcttatcctgccctggaggaagaggcagaggtactaggatgggggctgagctccagctgagcagggttaagggaagtgtgtccaccaggcatctgtgcatgggggagttgttggggaagcactggccactgcccagtgttctgccccagggcagctcacggggccctgagcacctatggtccaggattgaggtttgttgagttggctcctctggtgtttcgttgatggggtaaggaggcaaatggagattccaggccagggaccttcatgtcccacagtgcccagctaccccaggaggacctggatcaccccaagcccacataaagcacagggaagtttctgcatggcacagaagccaggccctccccaaaagggggcatcacatggcaggggccaggactcaggcccactgctattttcacattattaattttataatgtgatatggtttggctgtgttgccacccaaatctcatcttgaactgtaatttccataatcctcatgtgtcctgggagggacccggtgggaggtggctgggtcatggcggcagtttcccccatgctgttctcatgatagtgagttctcatgtgatttgatggtttcatgagcatctggcatttcccttgcttgaggtgatgaatgcctcatttaccctgatgtgattatcacacattgcatgcctgtgtcaaactatctcatgtaccccataaatatatacagctactatgtactcatagaaattaaaaataaaaataaatttaaaat

SEQ ID NO: 249 - DNA, 2337 bp, Homo sapiens
agcttcggatgcatcagacacaaacgctggataaagctgctcattcacataaagcaccacctgctgccgctacctggaatatccacactggataactcgaagcttggtggaaacagaggttggaaaaagcagaaaataaaacaaagggatggaagatgggtgctctgaattccatttccttagaaaccaacaagagctccttcagtatgtcgtggacaccttcagttgagcacagctcaggcaccgcaaggacactccgctcatgtaagttggccttagtaggtttttcttccatgagtgaatttctattcagagcaagtaaaacacagcctgtgacactgtttgtcccgaatgtcaacagcgctctctgtgatcagcccgttgtacgaggtgttggaatacatgaacaacgcaaacggaatatctcgtctctcatttctgtctttaatcattggctgcctccactccagttacacctgggccgtgctctgatctgcaggtttaactccaggggaaacttcacctgtttgatgacagccgtcaagtgaaccagatgttacctctagtaagaaaggatgggcaggtagagtgtgatgtctggggtgctcctgactcagggcggcctccctggctcccctcacccagttggacctgggtgcccttgtcctactcttctatagcatccttggcttttccttcatggtgcccatcacacattccagcgagacacggatttgtgggattatttgcaccgggtgaagttggcctgttccactagtttcctgactccaggagctcagagcttttgtcattctttcttcactctgtgcatgtaacacacaagagacgtttcctgaatgaagggcccctgatgctgtggcacaaataacaaaacattgggaagtagtacgtcttgccagccctactgctggccctgaatgactggaaccagtgcttcaattttaaacatttgattgacaagttattttcagcagtttgccctcaaaagatgaccttgtgtcgtttacttctaacctgatctgggcttagcgtatctactcattccttaggtcagccacagcctcataagcagctacgttcaatcagtcgtcacagccctgggcacagacttctcagcaagagtaattttctcacttatgctaacaatttgacttcttcaaacgcgtactctttttttttttttttttttttttttgagacggtgtctcattatgttgcccgggctggacttgaactcctgggctcaagcaatcctcctgcctcagcctccagactagctgggacatagatgcatgtcaccgtgcccagctcaaaagcgtacttttacctacactgatgatatcaagacatgatagaacaaaaagcatatttcctgagtgattttttaaaaatttcaaccgcctgtacacagactgtaacaccagcagtcgtgaggaagtgcttgggacttgccggttctcagacttgcctcttgccagggaggagaccccatctaataacaaatgtctttccctaatgaagtccagaaccagatctttcatggacctagattttacctgcagagatgtggaacagccacagttggaaaaccatgagtgcttgatgttaaatgaaggcaacactcctcaattctgagattgtttatattgttttgggaatgtaatcgttggagaaaacatttctcagcctggtcacaaaccgtccctcccacaacaacaacaatggagtataagaagtacagttttacagagtattttgggggctttcttctcatgacaagagtctttcttatggtacaaatagttgtgtcctttctcacagcataaaatatacacataaaatagtaaaacgggagagacagtactgacagtggatgaagccaggctgacgtgactgagaggcaagtttcaacatcaggaaaaaaaacaaagaccacacttactcctcaggagatacatgggtgatctttcaagagaccatcagaaagaggctgcttgggtcccgtccgaggagagacagaagactgagccgtggtgtactctattatctgacgcaacagccttttctgcaggatattaaaggactttataaatattaattatctcattcatcctcatcactttgtgagagccgaagacattatagatggccagtcacccatttcactaagtatctaaagccaccttccacacgtaatcattaacatttcaaaatactttcacctctttattattcagagatgttgagtttatgaaggactcggtcctttttggttctttctgccccgcattaataaacacctttgaattactaaac

SEQ ID NO: 250 - DNA, 2092 bp, Homo sapiens
ctggagagagggaagaagcaacgctcagcatttcgctgattttcaagtgcacaccgagcagcgcttcaggcagctttgggtcagaacacgcctgattcggacttcaggcgaaggcagaggccagcacgggtcaccgattcagagccgggggcggggccgaccacacacgctgtgagacccagaggccgaggagccgcgggttagaaaatgtgaccttggcgaccccaacgcccccgcctccctcgctgctgctccacctgcacgcggagcgcgccgggccgccagcggaggcgatggccagccctgcgcccttagtggcctccatcagccaccaaatggtggctctgcagaccttgcagctgctgcagcaggagtggggctggggggacggtccagtcgcccccgggaacccgcgggacccagaccacgtgtccaccgctccagcccgtcgctcaggcccgccgcgggcccggccggggcccgggcgcgaggagcggggcgggggcgtggggaccaggagtcggcggaccgcggcgcgggtgaactccccagaggaggaggtagtgcgaggcgctgaggggggcgccgagttgctgcccttcccccgggaccgcgggccctgcaccctggcccagatggcgatgcgcagcgcgctggcccgcgtggtggactcgacttcggagctggtcagcgtggagcagacgctgctggggcccctccagcaggagcggtcctttcccattcacctgaagcttcaactcctggctaatgagtgaagaaggtcactgtaggagtgtgaggaccatcaggagcttcatatttcaataaccagtgccaaattctgaatgccagatgggatgagatgggatgttaaaccacttcttattaccacgttgttggcctccattgccttcgtattggtctccaattgcatggtctctgtggatctctgacttcttattacctccgattggaacgcgccacaaatcatcctgctttctttatcctctctcacctccaagtaatcctgtcatcttgctccaattagagccgcttccattaagaagatcgtgacaaattccctacccctgtttgctcttcaggaaaattatcccctggaaaagtggatgttatagtcgcttttcagaatgtattgtctgaatttcttgtcttccaacattctcctaagccagttacctttgcactgaagtagaattcaaaaggagatagaggttctgaatttcttcctttgaccagatggaagtcgttacatcagaatgctgatgactgcaaaatcttggacatattgttttcacaattaggaaatggcaaacacaaagttcttcagtgcaaagccagcatgcgagttcagcttccatttgctgctataaattttgttcttgttgctgccagtaaacaccaactgttcaagtgaaatagtaaatccaaatgtgcctgttggatgagagtaaaaaaattatatgctgcataaatgctgatgcaaaaggatttttcaacacactaaaccagggtagggaaaggaaccgagaaagaaagttgaactgaatgcagctctcactaacaacttcttggtaaaagcactaaaaaagctcttgatagaatgttgattcaacatactgtttaaacctcaaggaaaaaaacaaacgcagaattgggatattggccttaggatatctgcttaaagtcctactttgagctctcatcagggttaccaaagaaggcgtacatagattgttacaaatcaaagcaaagaaaaatcccaaagttccctcaaaactgatgtgggcacttggcccagaagttgtttgctaatgatcagtctaacagctgaaagtcaaagtcagtggctagtaccatctgcaataggatttaggaagttttgatctcacaaatttactgtaaggctaatcaatgaatgtttgtactcaggtctccctacagttaaatttaatgtgtaactggaattacgattcaaagagatagtttcataaatggtccctgaaatttaattttggattacctaagtttacaatggatttctcttctcctttccccaatatttttcttacgc

SEQ ID NO: 251 - DNA, 2275 bp, Homo sapiens
tattattctcattccatttttgctccttcctttcctactcaagatatttgaggcatgagcaatctgtgactctaattaagggggtgacagccccaaccaggccaccatgcaggcttataatccactcatacacccagctttctccataatggctttattcttttcctccaaggttcaaaatcaccatgacttctcccccacaaaaaaaaaaaaaaaaagaaaaagaaaactgactctgaatcataaatcctggctcccaaatattggccataattgggtaggtgagatgtatcttgtatgtctgggtggaagaggctcctttctccctggtgattcattttcagaacacacggccatccttccaatggctttgagtttcacgtcaccaccggaaagacctgccagtttcttcctgtttgtgtgcctgtccactgccatcatgctactcccaggactatggcttctgggcactcactcacccttcaacatggcttgttcactccagttctccctttccaaatgttctcaatcccctgggctgtgcgccaagggggattcagcccttgcccaccggctatggtctgaatgtttgtgtcttccccagattaatatgttgaaatttaatcacaaatgtgatggtgtaataaggtggggactttgggactttattaggtcatggagggggagcctcataaaaaaggctgccttgccccctccatcgtgtaaatcaccatctgtgaaccaggaaatgggccctcaccagacaccgaatctgccggttccttgatctcggacttcccagtctccagaactgtgggaaacacatttctgttgtttatgagccacccagtttaaggtattttgttatagcagcccagatggactaggccaccaccatagtcagggaagagctggctgatttgtgcgtgtctgcgctgtgtcccaatgaaagcacaataatcaatgaacattgattctgcaatcgatgtttgaaggtcaaaggagttgggaaagggggtctcctgaagccaaggaaaagcattgtactccccaaaactgtgccagccaggttaactttttgcgagatgctacagattgagatgctttagttttacttctggctctttaagccctactcaagctctaattttgatatctcgttctagacgccttagtttgggcccctcccaggctcccttctgtttttgttctttttttctaacatcatccttggcttttcttctcctttaggtttgatctcctgtctcttgggttgagaaaccatcccctctgactcctggccccctgtgacccctccaaagccccctgtacaggtctttggccacacagagattcaacagtctaataatctaaaattgtaaatgccacaatttgtgtgcgtgtttactgtgtctcagttttgagttctttttgaaatcttttagttattccagaagggataggataaagagaagaaatcagttatactcccagtggccaggcatggtagggcagaaagagtgttgacactcactacccctgcagggggagagggcagaggacccaggttaactacccagagatgagatggatcctggtctaactcaggccctgggatacctgcaccaattgctctcagcaggtcgagacatcacagaagaagagaagacatgtcaactctctacaatagtgtcttagccctggagatactattggagagtgacaacagacagcaaacagggttctattcatagtggccatggtttccccaagcagagaacatatccaaccaaagggacttcagcaaagcttttcctaatctgtgctctgaaatggctaagtagaagagagctatctagagtgtatgaggatgtctttaaagtcaaccttgcaataactattgcatgcagactgtaattgtgggctaaaagtgaaggctgttttgttaggtgagacccttccagagcacctcctgcatatgtacacacattctctctctctctgtctcacacacacacacacacacacctccccccacaacacacacacacacacacacacacacaacctccccccacaacacacacgcacacacacacacacacacacctccccccacaacccacacacacaaaaccaaccccatcccagggaacccaacagtcatagatctcatctggagtccaactcctaatccaggtgtcatgatcatcacgtgagagatagcagaatctccaccaattttggaaagaactactcaagtgttttctaaaag

SEQ ID NO: 252 - DNA, 2295 bp, Homo sapiens
atagctgttcccagcagttagaggaaatggcagccctgggacctggggggatccaagggcagtccacgtctccatgggaagatggcagcagctctgtggctcttcacagtgaagtgacgacctgttgttaaatgtttaacagaagccaaacttggcttttaggggacagctctcctgccagccagccagcttgccaaaggaatctttcctgtgcacagagagcacactgggcttggagacattctctgcacagtgggatttggtgagaatcttaagagtttctgttcaaggtcagtttgtctctctcagaccgtggcaccaaggaacctgctgctaccctacttgatggggctgaacaggagatatattccacgcttcacaattgccacctttcgggagcggcttcaccagttacctccaactcccgccagacccaattcagagctgccatcaggtcagacctttgcctgctcttggcaacacgtccccctgtcctgctcctctgcaacctgcccctctttttcttcatgtgctgtgaaggcaccatgtggatgggtgttcaacttctggattggggatgcacagagcctgagggacacactttgcaaacctgcaccttgcacttttgggttctggcctgcaaggtctcctttattcttttggaccaaggctgtccctgggagagggcagccgccggcctgtcagagcaaatcagccccaggcggtttctgcggctctggtatttgagctttgttttccctctctcccgggaagaactcattgaaatagtttctctgggaaagacaaagcgtctcgcccagatgctgaaggatcacttggtaactgcctgtcttggtttcccgttgtgcccatgaaggcgccatcagctctaaagctgacctgtggttccgtctccaaacagctaacccagacgtcacccccttgcagccagccgcacagcctgagttggagttctggcctctcctagcagtgagtgacagtgttggaggggccttggacaccttgggtaattgctaactaaatatgagcagtaggggaaggtcttctggtccacggcagagccaacggggcacttcctcttctcttttctagtcagggtagaaagctagaaagaatcctaaaaatcactatccaagtccccattgtgtggggacagaggcctggcctgaagcctaggctggagggttcagtcggaagcagaagccgggagactgcatgagagggttccttccagcttcaccaagcccgtgctgcgcgggatgaagaaagtcaagcctgtcttccagtggggccctgaggtgggggagctggaggatagggtggcagcttttttatcagctgtccccaaaagaggcccttctcccagtcgccacggaccaaagctcctcctgggagctccagcctgtctgttcaatgtttgccttgcgccttttcctggtgaggccacccccggcaccatctcaggcctcagaaggacgacctcactgaaacagcccttaggttgggaaagaagcaagccctccgcgccccgtccaagtctctcaactgggcacgagcacacacagacgcccaggccctgtccctgcgccagaatggccgctcgcgtttccaggcacgatgcccctttccatgagtgcacagagccctgggctgagctgggggccgagctccacgctctctgagcagctctgagcggcacgccaaagaaggtctttcagatgggctctgggatgtggaaccatggcgtccagccctagcgtcgactccacactagaggcaccctgactttcgcccccttcttacctgagtatcagcttacttccatctggggactgaatatggggcagattccagaaaaaggaggttggggcaccaaaaccaacaccaactctgccaacggagccagcacagctatttgtctccaaccacaggccgcaagggaagttcacgggctcggcacccccaggtcccggatgtaaggatattgcccgttagacaaaggaaaggccccaagtccacaactcatgtttgtgagcttaaccttgtcctataaagcactttggaacaggcccaggttctcccaccatgtacagctgccattgacctggacagtcccgcaaggtccttcagtggaaacccagaagggagagtcactgcatgtgaaccctaagggttctggaggtcaaagttgctgtgggtgacaggcaaccaagactaagggcaaacttgaaacataaatgagttaaaacccacaaaaataagacagttttaaat

SEQ ID NO: 253 - DNA, 2483 bp, Homo sapiens
agactcgctcctcccggcagggcgcacctaggcgggtccatcgccagccggggagaggggtttgggcagggagggaacaggtgcgcggcgggacccgccctatctcaacaggtgaatcgctccaagtgggtctcggttgcatggatctcggtgcgcttggtttggccggaggagatgggggccggaagggacctgtggtccgcaggcgccctcccagcgggccagtcacttggttcgggccctgggggacggagcgcacctgggtcagcccacttccggggagggaggcagaggaacccctccccgccgctcacccctaagcccagccctcggctcccacccttgtgtacctgggccgaaccattcaccggagcgcgcagcgggtggagtgtggctcggaggaccgcagcgggtcaagcacctttctcccccatatctgaaagcatgccctttgtccacgtcgtttacgctcattaaaacttccagaatgcaacaggacggacttggagtagggacaaggaacggaagtgggaaggggaggagcgtgcacccctcctggccttggtgcgcgccgcgccccctaaggtactttggaagggacgcgcgggccagacgcgcccagacggccgcgatggcgctgttggccggcgggctctccagagggctgggctcccacccggccgccgcaggccgggacgcggtcgtcttcgtgtggcttctgcttagcacctggtgcacagctcctgccagggccatccaggtgaccgtgtccaacccctaccacgtggtgatcctcttccagcctgtgaccctgccctgtacctaccagatgacctcgacccccacgcaacccatcgtcatctggaagtacaagtctttctgccgggaccgcatcgccgatgccttctccccggccagcgtcgacaaccagctcaatgcccagctggcagccgggaacccaggctacaacccctacgttgagtgccaggacagcgtgcgcaccgtcagggtcgtggccaccaagcagggcaacgctgtgaccctgggagattactaccagggccggaggattaccatcaccggaaatgctgacctgacctttgaccagacggcgtggggggacagtggtgtgtattactgctccgtggtctcagcccaggacctccaggggaacaatgaggcctacgcagagctcatcgtccttgactggctcttcgtggttgtggtatgcctggctgccttcctcatcttcctcctcctgggcatctgctggtgccagtgctgcccgcacacttgctgctgctacgtcaggtgcccctgctgcccagacaagtgctgctgccccgaggccctgtatgccgccggcaaagcagccacctcaggtgttcccagcatttatgcccccagcacctatgcccacctgtctcccgccaagaccccacccccaccagctatgattcccatgggccctgcctacaacgggtaccctggaggataccctggagacgttgacaggaatagctcagctggtggccaaggctcctatgtacccctgcttcgggacacggacagcagtgtggcctctgtccgcagtggctacaggattcaggccagccagcaggacgactccatgcgggtcctgtactacatggagaaggagctggccaacttcgacccttctcgacctggcccccccagtggccgtgtggagcgggccatgagtgaagtcacctccctccacgaggacgactggcgatctcggccttcccggggccctgccctcaccccgatccgggatgaggagtggggtggccactccccccggagtcccaggggatgggaccaggagcccgccagggagcaggcaggcgggggctggcgggccaggcggccccgggcccgctccgtggacgccctggacgacctcaccccgccgagcaccgccgagtcagggagcaggtctcccacgagtaatggtgggaggagaagccgggcctacatgcccccgcggagccgcagccgggacgacctctatgaccaagacgactcgagggacttcccacgctcccgggacccccactacgacgacttcaggtctcgggagcgccctcctgccgaccccaggtcccaccaccaccgtacccgggaccctcgggacaacggctccaggtccggggacctcccctatgatgggcggctactggaggaggctgtgaggaagaaggggtcggaggagaggaggagaccccacaaggaggaggaggaagaggcctactacccgcccgcgccgcccccgtactcggagaccgactcgcaggcgtcccgagagcgcaggctcaagaagaacttggccctgagtcgggaaagtttagtcgtctgatctgacgttttctacgtagcttttgtatttttttttttaatttgaaggaacactgatgaagccctgccatacccctcccgagtctaataaaacgtataatcac

SEQ ID NO: 254 - DNA, 2138 bp, Homo sapiens
ttcaaagctaattggaagccgcactgttttacaagtgaagagttatgcaagacagtattttaaaaataaggtcaaatgcggtctggataaagaaacaccaaatcagaagaccggccataatcttcaagttaaaaatgaagataaagggacaaaggcatggacaccatcatgtttaaggggacgtgctgatcccaacttgaatgctgtaaaaattgaaaagttatctgatgatgaagaagtagacatcacagatgaggtggacgggttgtcttctcaaacaccccagaagaattctagcagtgatctcttgttagactttcctaatagtaaaatgcatgaaaccaatcaaggagaattcattgcttctgacagccaggaagctctcttttctaagtcttccaggggctgtcttcaaaatgaaaagcaagatgaaacactttcaagctcagaaattacactgtggactgagaaacagagcaatggtgacaaaaaatcaattgaattaaatgaccagaaatttaatgaattgattaaaaactgcaacaagcatgatggaaggggaataatagttgatgccaggcagttgccttctccagagccttgtgaaattcagaaaaatttgaatgataatgaaatgctttttcattcttgccaaatggtagaggaaagccatgaggaagaagagcttaagccaccagaacaggaaatagaaatagatagaaatatcattcaagaagaagaaaaacaagcaattcctgagttttttgaggggcgccaagctaaaacaccagaacgctatttgaaaattagaaattatattttggatcaatgggagatatgcaaaccgaaatacttaaataagacctcagtacgtcctggcctgaagaactgtggagatgttaattgtattggacggattcatacatacctcgaattgataggagcaatcaattttggatgtgaacaggctgtgtataataggccacaaacagttgacaaagtacgaatcagagacagaaaagatgcagtagaagcataccaacttgcccagcgtctgcagtctatgcgtacaaggagacgtagggtccgagacccatggggaaactggtgtgatgcaaaggacttagaaggacaaacgtttgagcatctctctgctgaggagttggcaaaaagaagagaagaggaaaaagacagacctgttaaatctttaaaagtgccaagaccaacaaaaagctcgtttgatcccttccaactgataccttgtaatttttttagtgaagaaaagcaggagccatttcaggtgaaagtggcttcagaagcacttttaataatggatttgcatgctcatgtttctatggcagaagtgattggtctgttaggaggaagatactcagaagttgataaagtagttgaagtctgtgcagcagaaccatgtaacagtctgagtacaggactacagtgtgagatggatcctgtatcacaaacacaggcctcagaaaccttggctgttagaggcttcagtgttattggatggtatcattctcatcctgcttttgatcctaatccttccttacgagatattgacacacaagctaaataccagagttacttctccagaggaggtgcaaagttcattgggatgattgttagtccctataatcgaaataatcccttaccatattctcagattacctgcctggttataagtgaggaaattagcccagatggctcttatcgcttaccttacaaatttgaagtacagcagatgttagaagaacctcagtggggattagtatttgaaaagacaagatggataatagaaaaatacaggctctcccatagcagcgtccccatggataaaatctttcgccgggattctgacctgacttgtttgcagaaacttttggagtgtatgaggaagactctgagcaaagtgaccaattgctttatggctgaagaattcttgactgaaatagaaaatttgttcctttccaattataaaagcaaccaagagaatggagtaaccgaagagaactgtacaaaggaattgttaatgtgattattttaaagttaagacattttaatcttgacacagtagatcttactttcaaagttataaacttgaagtgattgtagtt

SEQ ID NO: 255 - DNA, 2354 bp, Homo sapiens
agcgagcgctgcgtcctcgagtccctgcgcccgtgcgtccgtctgcgacccgaggcctccgctgcgcgtggattctgctgcgaaccggagaccatggccaaaccagcacagggtgccaagtaccggggctccatccatgacttcccaggctttgaccccaaccaggatgccgaggctctgtacactgccatgaagggctttggcagtgacaaggaggccatattggacataatcacctcacggagcaacaggcagaggcaggaggtctgccagagctacaagtccctctacggcaaggacctcattgctgatttaaagtatgaattgacgggcaagtttgaacggttgattgtgggcctgatgaggccacctgcctattgtgatgccaaagaaattaaagatgccatctcgggcattggcacagatgagaagactctgaccaggatcatggtatcccgcagtgagattgacctgctcaacatccggagggaattcattgagaaatatgacaagtctccccaccaagccattgagggtgacacctccggagacttcctgaaggccttgctggctctctgtggtggtgaggactagggccacagctttggcgggcacttctgccaagaaatggttatcagcaccagccgccatggccaagcctgattgttccacttccagaagatgcttgtggtcctgctccagggaaccagggaggaggatgacgtagtgagcgaggacctggtacaacaggatgtccaggacctatacgaggcaggggaattgaaatggggaacagatgaagcccagttcatttacatcttgggaaatcgcagcaagcagcatcttcggttggtgttcgatgagtatctgaagaccacagggaagccgattgaagccagcatccgaggggagctgtctggggactttgagaagctaatgctggccgtagtgaagcgtatccggagcaccccggaatattttgctgaaaggctcttcaaggctatgaagggcctggggactcgggacaacaccctgatccgcatcatggtctcccgtagtgagttggacatgctcgacattcgggagatcttccggaccaagtatgagaagtccctctacagcatgatcaagaatgacacctctggcgagtacaagaagactctgctgaagctgtctgggggagatgatgatgctgctggccagttcttcccggaggcagcgcaggtggcctatcagatgtgggaacttagtgcagtggcccgagtagagctgaagggaactgtgcgcccagccaatgacttcaaccctgacgcagatgccaaagcgctgcggaaagccatgaagggactcgggactgacgaagacacaatcatcgatatcatcacgcaccgcagcaatgtccagcggcagcagatccggcagaccttcaagtctcactttggccgggacttaatgactgacctgaagtctgagatctctggagacctggcaaggctgattctggggctcatgatgccaccggcccattacgatgccaagcagttgaagaaggccatggagggagccggcacagatgaaaaggctcttattgaaatcctggccactcggaccaatgctgaaatccgggccatcaatgaggcctataaggaggactatcacaagtccctggaggatgctctgagctcagacacatctggccacttcaggaggatcctcatttctctggccacggggcatcgtgaggagggaggagaaaacctggaccaggcacgggaagatgcccaggtggctgctgagatcttggaaatagcagacacacccagtggagacaaaacttccttggagacacgtttcatgacgatcctgtgtacccggagctatccgcacctccggagagtcttccaggagttcatcaagatgaccaactatgacgtggagcacaccatcaagaaggagatgtctggggatgtcagggatgcatttgtggccattgttcaaagtgtcaagaacaagcctctcttctttgccgacaaactttacaaatccatgaagggtgctggcacagatgagaagactctgaccaggatcatggtatcccgcagtgagattgacctgctcaacatccggaggggttgggttgggctcttatcttcagtggagcttaggaaacgctcccactcccacgggccatcgagggcccagcacggctgagcggctgaaaaaccgtagccatagatcctgtccacctccactcccctctgaccctcaggctttcccagcttcctccccttgctacagcctctgccctggtttgggctatgtcagatccaaaaacatcctgaacctctgtctgt

SEQ ID NO: 256 - DNA, 2307 bp, Homo sapiens
ctttttatacatttgcaactaattcaccaaaaacaaatgaacaggccaggaacaaaacaaagcaaaacttctatcagccaaatatggtccccgggctgtaagtcagtatccttcagcgggaatgcacatgtgctgtctgtgtctgggtgggtttgtgttcaggttcttgggtggggtaactcctcttgcagcacagagagtgtccctcttctcgcctctccctcccggttcccctcctgtggttctagtccaggtccccacacttctgtttacataaaggcatttggctttgacctagtcatggctctccagtctgccccttcctcttggcccttttagccacgccatccccaacctgctggcttccttgctggacccccatcctccactttgccccctcccatctcatcagtcctcctttcttctgaagccgaggcacttcctgctccagctcctcagctctgcatggctctcgggctccttggcctggctttcagagtcctctgtgagccggccccagctggcctctgaggcagtctgttcccctttccagaatgccctcatcaccttccattgctgggaagtatccaattcatcttctgagatctggctcaaatgccaccaactccagaaacttcccttcctctttgttcccacaacaacttctgcatttctaccccctcccccacccctccgtcatccttccctcatacaacaaggtccatggattgcactggccagggtcttgcatgcactattttatgaaatcctcacaacaaccttatgagggaggcgttttattcattaccattttatagataagaagaagaccgaatctggagaggtcacatcacttgcccaagcccaagtggtgaagctgggatttgagcctgatattcacactatctacattccctccagtataataggaactcatcgctaactttgagcacttagtgttctgagtacttcgtataggttatctcaatcctactccagctttgcgaactagagggtagtagtagtattattttataggtggggaaactgaggccagacaggattagtgaattgcccacagccataccccacccggtggtagagtgggatctgggcttggatcacactgttctgtcatcgtcttattccctgtcttcccctctgtctggcagacacccccaagtgggaattgtgcctgactcaccttcatgtgcttagggactggtatgatgtcctccacaacagggagaggttgctacattcaactgactttcttttttctcttccagctgccaaggggccaagggatgagctggggccctccttcccaatggcatctccccctggtctggaactgaagacactgagcaatggtccccaagccccaaggagatcagctcccctgggcccagtggccccaaccagggagggtgtggagaatgcctgcttctcctcagaggagcatgagacccatttccagaaccctgggaacacgagactgggcagctcacccagtccccctgggggtgtctcctcactgccccgatcccagcgggatgatctgtcccttcattcagaggaggggccagccctggagcccgtgagccgcccggtggattatggctttgtttccgccctcgttttcctggtgagtgggattcttctggtggtgacagcatacgccatcccccgtgaggctcgagtcaatccggacacagtgacagcgcgggagatggaacgactggagatgtactacgcccgcctaggctcccacctggacaggtgcatcatcgcaggcctcgggctgctcacggtgggcggcatgctcttgtcggtgctgctcatggtctccctgtgcaagggcgagctgtaccgccggaggaccttcgtccccggcaagggctccaggaagacctacggctccattaacctgcgcatgagacagctcaatggggatgggggccaggccctggtggagaatgaagttgtccaggtctcagagactagccacaccctccagaggtcttaagaactagcccaccttatctggctgctttagctccagtgctacaaggtccaccccctgctcccgcccacctgacccctgccaaggccctggggttttaaactgagctcacatagggccttgtggaagaagtactgggtgctggagggagagctcggggcccagcccatgccccacacgggcaagcagcccactgatctgttttgtagctgaggttttgcatacggttttgtttggaggatggcttctgctgctaaaaatacaaaagtttggaaaccgct

SEQ ID NO: 257 - DNA, 3201 bp, Homo sapiens
gctatgctctaccggggtggggacggtggcggggatcctgtctcacagaggaggatgctaccttgaaggccaggaagggcggcttgtacgggctacagaacgaggagggtaccatggggaagtggtggtggtacctgatctgggaccctaaggaggtcagatgtgtacggggggtcccgcctgtggtcattgggagtgtgtgtgtgtgtgtgtgggggggggtgtgcacctctctctcacgaggctcctgctgcttcctcatatccctagttggggtccctagtactcagtcctctgaacctgaagacaaagagacggaggaaagtaccaggagcacccccactccagcctcccatgcacacttgtgcacacgcatgcaccctgtactagggcagaggcacacaagcggggatgggcctgcaggtaaagcccctttcagaggtacccacatggggacaagcacataaccaggtaggcacacgaaggggcccgtatgttcatacctcctaaggacaaggctccccgaaaggcacatgtaccctaatctccttgtccacatgtactgtgtgctatttcctagctcgcctaactatccatacttctagatccagggaccgatgcctattactgtacccttcttttccactcttttcctctctttcctggctggcctctaggtcaggcctgaggaattgagggggtaagtcaggatcccagcaggaggttgtgtgtgtgtgtgtgcgtgtgtgtggtgggggatgggttcctaaagctagacagcacagaggaggggtgggaaaacagaggccactacaagaaattaaactcaacactcaattaggatgtggctgctgggggccagcaccatggtaggcacctaggatgcaaagagaatgaagcatgggccctcaggagtacccagtgtagtggggagccagacatgtaaacaactcctgggccaaccctgggacagaatgtgccaggagctttaacagacaggctccaggagagtaccaaaaataattttctcttgataaattgctgggcttcaaacgttgtcctcgctaccccagtcccacatcccctatgcctgtcctctcctcagccacatgcctctgcccttctggatacctcctcctggactgcctgccgctcagggaccccagccccctccctcccatcctaggacaaagggaaggatgtcagggtgcaggagggagactcacaggggaaccagggtccagaacatggggaatgagactgggcctggggttctctggaggcccttatccaaaggacgtgttaggctaattgtgagggttagggaggtggatgggtcagaggggagtagctcctctagaacctaggactgaaaaaaatctggaagtgagggccccacttgttaagtggggaagtgatgtcagtgggtccctcccccttttctagaggacctggaaggggtctgggctggggaccttccttcgctgatgcctgtctgtctgtcctcccctgtcttccctgtccacatcttctgtttcattgccatttttgtgtttgtcttcggatgctctctgggtaccatcctatccatctgtgtttgctgcctgggcctctatctctggctctgatccttctctgcctcttggggtgtctctctctgcactctcctgtactggcattccggtcccctttcctgtcctctggcttgctctgtgtcacttctgtttctacctctggcccctggctcccatcttggtctcaccttttctctccatatccctgtttctctctgcctgttatctctggtgctggcctctgcccctccatccccgtatccatctctgtgctgggtcctgcctgctctcacttcccactcatcttggcccctctccctgcaccaccaacatcgcctctggctccccttcccttcttcctagcggggagtgcgaggggcccaaattgtggggataccatggcccatggcttctaaagggtttagctttactttcaggtagagatggctgagtgaggagggagaagaggctagagagagggaggcttgggcaggggaaacagctgcccaccaggttttcctggacagcagtgcccacctgcctactagcactgaacctgcctggaccctgagtctgtgctccttgggggcctggcgtttggagcacccttctttcctctgaatggacatctgtgaggtacaggtggtgagctgcagcctcaggctccatttcttagccagctggcacctggatgtcatgctttgtgtggggacagcctggccacctcagggctccaaggaaggaggaacgtggctcctcctccctcaggcctgttcctgagacagagcctggtctcacaagaggggaagggggacctctattattatttttgcctgtattgaccatttctgcctaggtcgtctcagacagcctcatctcccacacatgcacagacttagagagaaaccaattctttggtctattttcttggtagctttactgattgccagggaaaatgaaaaccagaaaattaattaatctctaaaattaaactttacactgaatgttcttgtttctctaattagaacttctgctagcagctgtggctatacacacacacacacacacacacacacaccctcacacctacacgtttgcactccggaactgtcagagggtgtcaggcacagacagactctaggttgcctagacaggcacacacatgcagtcactcccaagccccctttggtgctctgctcagcgcctgcttagcggaaggagtccctggagagcaggcactcctggactggggttgtagcccatgacctgccctttggggacacagttctggaggctctgggccaatgaatcagcccaaggaggatgggcaatggcgctcagcctgaatcagtcagctaggtctcttgtggccctgggggctgatgtgattcctgtaggtgtggccccagggtggacagctacagagtgatgggggactcatgtagggcacctggaaggctccatgtgtcctggggacaagggcttgtggggtgggctgggcctggctggggagaagacaggtctctgtcaattgggtgcatcacactgtggcctttttgtcgtggatttaagcgcaaagattgtacaaatcaaactggtggataataaagtcgtggatgactcactg

SEQ ID NO: 258 - DNA, 2189 bp, Homo sapiens
aattgcattttattagagttgtgtgttattgatagaggttaagagagggccaggtaagcttgatggtgtatgtattgattgtcttaacctccctgagctctagatttaacttttagtctttttttattggacagctattggacagcttcacattttctaggaaactcaaattctatatgatgtctgaatcttctccaaattagaaggacaaaatctgtaatggtcaatatgtatcaattaaactcttcagaatatgtgaggtgataataattaccatttattgagttccataggccaggaactaaatgctatttttgttgttgtttttttgagatggagtatcactcttatcacccaggctggagtgcagtggcatgttctcggctcactgcaacctccgcctcccgggttcaggcgattctcctgccttagcctcccaagtggctgggattgcaggcgtgcgccaccatgcctggctaatttttgtatttttggtagagacagggtttcaccgtgttggccgggctggtcttgaactcctgacctcaggtgatccacctgcctcagcctcccggggtgctggggttacaggtgtgagccactgtgctcagcccctaaatgctttacagtacagagatgctatattagattgtctacttttgggaggaagggcaggagaaggggagatcctcttatgaggaaacactccaagattacatccctgttatctttcctccaaatagtttctgataagttatttgtttaaaaattatgttttaattagaatttgatggctttttaaaaacttttactgacacccaacatgtttgtttttgtaggagctgactaaggctttggaacagaaaccagatgatacacaatattattgtcaaagagcttattgtcacattcttcttgggaattactgtggtagtttttcttataaagtatattgtccctttttaataagttacttatacattttacccatggccaattaatcaaataaaataaaggttgtctttgaggatttttaaattggtctttcatacaaggtaaagtagctcaagtgtgacagacatgttgaacaacacctatttaaattttatggatgtctctttttcctcagtgggtggataatgtatatagatttcattcgtagttattgggtaggctgataaagaattagtatcatatttactatttgacagagtattaaaatgaaatgctcttctttgtatttttttttttataaaaaagaatgtggccaggcatggtggctcactcctgtggtcccagcactttgggaggccgaggcaggaggatcatatgaacccgggagttcgagtccagcctggacaacagagcaagaccctatctatactaaaaaaaaaatgtatttctgtattgtgtaactttaaaaattattctgatgaagaatctggatagggaaaaactgaagacttttttttttagacgaatttttgctcttgttgcctaggctggagtgcagtggcatgatctcagctcactgcactctctgccttccgggttcaagcgattctcctgcctcggcctcccaggtagctgggactacaagcacatgccaccatgcccggctaattctgtatttttagcagagacggggtttcaccatgttggccaggctggtctcaaactcctgaccacaggtgatctgcccaccttggcctcccagagtgctgggattacaggtgtgagccactgcacctggccaaattacatagatgatgctaatgagaaaaggagatgaattttgtgacacagttgtattcattgactgaagagctttaggaaggaagctaaatgttcagccaaaaggaaggtacaagagtaacatttatttgaattctgtcttggattagcttttccaaatttaaaaccatctggcatttctaccaacttgaatacttagaaatctaaaactgatccatattctgtttgtatttgctagaatctgtaaataactgatgaaaaacccatctttttctttctttctttttttttttttgagacggagtcttgctctgtcacccagagtggaggttgcagtgagccgagatcgcaccgctgtaccacagcctgagcaacgaaagaagactctgtctaaaaaaagtaaaaaataaaataaaacacacctggagctttct

SEQ ID NO: 259 - DNA, 2050 bp, Homo sapiens
agacgggcagggcggcgccagcaggccctggtgggcttgggaggaggcaggagactggagacagcctcggctagagcggacacaggcacctggcaagctttccttgaccaaatcaaggttgtccttgtcctattaagcctcttccccttgccttgaagggacctcacctggtgccctgacctcagcctcctccccaaaccccgctggggagtgacctgcttctaggcctccatccacaaagctacggacttgcagcccacgggaccccagcccagggcctgctgccctcaccatggtgaaaatgctgccggcccaggaggcagccaagatctaccataccaactatgtgcggaactcgcgagccgtgggcgtgatgtggggtaccctcaccatctgcttctccgtactggtcatggccctcttcatccagccctactggatcggcgacagcgtcaacacaccgcaggcaggctacttcggccttttctcctactgcgtgggtaacgtgctgtcctccgagctcatctgcaagggcggccccctagacttctcctccatcccctctagagccttcaagactgccatgttctttgtggccttgggcatgttcctcatcattggctccatcatctgcttcagcctgttcttcatctgcaacacggccacagtctataagatctgtgcatggatgcagctggctgcggccacaggcctaatgattggctgcctggtctaccctgatggttgggactcaagtgaggtgcggcgcatgtgtggggagcagacgggcaagtacacgctgggccactgcaccatccgctgggccttcatgctggccatcctcagcattggcgacgccctcatcctctccttcctggccttcgtgttgggctaccggcaggacaagctcctccctgacgactacaaggcagatggaaccgaggaggtgtgaagcagctgaagggtcggtcatctatttcccagacacaggaaaactagggaatcaaattcttcagagataagaacttgttcttccaagtttccttgttcctggctactataggcctgaagcctgaagccttttattataacactaaaactggacagtctcctgagacaagacctcctactgtactctttctggggaagcagaactgcagtgacccacttcaaagatattcagaggctgagcggtgcagggagtgctcagttgctggggatgggatccaagtccatttcttagttccacacagcagcaaatcgcttcaccttcttgaagcctctcctctgtaaagcgagagggctaaatgggtccatctctaggggccttccctcccaggtctgtgtctgatagcatacacacacacatatatatacacacacacacacacacacacacacacacacatacatacacacacacatatatatacacacacacacacacacacacacacacactctctctctctctcaaacacacacaaatgcccaaccagctctaagagggcactgaagaggtggctggacatgtgctgggtcatttttagggtgaggtgtagggggtcttttgcttctcccttctcatattttgttttcttattgctgctcagaggggggtaaggaatggaggggccatcagaacttgaatcctttaacatccaccaggaagttttatgaagagtgggtgataggatctaaaatctctgcagacttttttcctcccgggagccaaatatcacatttccttatggtgcccacactgactcaaccagaactggctaccagcttcagaaatgtgttacttatgttcaagtaatttgttataggaatagatgacatttttttttttcaaaaactttggatttggcatatagtcatctatagggggattggttccaggatcccctgcagatgccaaaatacatggatgcccaagtcctcagctaaaaatagcgtagtatttgcatataacctatgcacatcctcctgtatactttaaatcatctctagattacttataatacctaatacaatgtaaatgctatgt

SEQ ID NO: 260 - DNA, 3318 bp, Homo sapiens
ggctttctggtatggcgcggcctttgtctcttgctgccgctggagctccagatctcttgttcactgctctgtgttctctgctcatagaggcccagcctctgaggccctttgacctgcaggtattgggagatccacagccaagagccaggaccccctagaagtctagaaatgaactgatcacctgtctggagcaaggaaaaaaacctctgaccgtgaagagacatgagatgattgccaaacccccagttatttgttctcattttgcccaagaactttggctagagcagaacataaaagattcttttcaaaaagtgatactgagaagatataaaaaatgtggacatggcaatttacagttaaaaaaaggatgtgaaagtgtggatgagtgtaaggtgcaaaaaaaaggttataatgggcttaaccaatgcttgacaactacccattgcaaaatatttcaatgtgataaatatgtgaaagtctttcatcaattttcaaattcaaacagacagaagacgtactgtaaaaaaacctttgaaacatatagaatgtggcaaatcttttaaccagtcctcaacccttactacacataagaaaattcatactggagagaaaccctacaaatgtgaagaatgtggcaaagactttaactggtactcaacctttactacagataagataactcatactggagagaaaccctaaaaatgtgaagaatgtggcaaagcctttaagtactcctgtacccttactacacataagataattcatactggagagaaatcccacaaatgtgaggagtgtggcaaagcctttaactggtcctcacagcttgctattcataagataactcatactggagagcaaccctacaaacgtaaagaatgcagcaaagcttttaaccatcccacaaccccttcttcacataagaaaactcatactggagagaaaccatgcaagtgtgataaatgtggcaaagcctttattttttcctcaacccttagtaaacatgagaagattcatactggagagaaaccctacaaatgtgaagaatgtggcaaagccttcagatggtcctcacacctaactacacataagataactcatactggagagaaaccctacaaatgtgaagaatgtggcaatggctttaagtattcctctacgcttactgaacataagataatccatactggagagaaatcctacaaatgtgaagagtgtggcaaagcctttaactggccctcacagcttgctattcataagataactcatactggagagcaaccctacaaatataaagaatgtggcaaagcttttaaacatcctgcaaccctttcttcacataacaaaactcatactggagagaaaccatacaagtgtgataaatgtggcaaagcctttatttcatcctcaacccttagtaaacatgagaagattcatactggagagaaaccctacaaatgtgaagaatatggcaaagctttcacccattcctcacaccttactaggcataagaaaattcatgctggagagaaaccatacaagtgtgataaatgtggcacagcctttattttatcctcaacccttagtgaacatgagaagattcatactggagagaaactctacaaatgtgaagaatgtggcaaagccttcaaccatttttcacaccttactatacataagacaattcatactggagagaaatgctataaatggtataaaaacctttacatggtcctcaagcccccataaacataggagaactcatactggagagaaaccttacaaatgtgaagaatgtggcaaagcctttactgcatcctcaactctaagtgaatataagacaattcatactggagagaaaccttacaaatgtgaagaatgtggcaaagcttttaactggtcctcagacttcaataaacataagagaattcatagtggacagaaaccaatactgtaacaaagctttatttatttatttatctatttatttatttatttttgagatggagtttcactcttgttgtccaggctggagtgcaacggcgcaatcttggctcaccttcacctccatctcccaggttcaagcgattctcctgccacagccttcctgtgtagctaagattacaggcatgcaccaccacacctggctaattttgtatttttagtacagatggggtttctccatgttggttaggctggtcttcagctgccaacctcaagtgatccacccatctcagcctcccaaattgccaggattacaggcacaagccactgcaccaggctgacaaacctctttgtaaggaagttctcaacacttattacacataattcatactggacagaaaccctacaggtgtgaagaatttggcaaagcctataacaagttctcaattttttttttctttttttgagatgcagtttcactattgtgacccaggctggagtgcaatggcatgatcttggctcactgcaaccttcgtctcctgggtagctgggattacaggtacccacaatgacacccagctaatttttgtagttttagtagagatggggttttgccatatttgccaggctcgtctcaaactcctgacttcagttgatccacccactttggcctcctaaagtgctgggattacaggcatgagcctccattcctagccataagttctcaattcttaagagacatggcaataattcatgctgaagaggaactctacaaacctgaaagatgtgacagtgctgttcccaacacctccaacgtttctatacataaaaaaattatactagtgtgaaactgtagaaaagtataaaatgtgacaaagcctttatttggttgccacacttgataaatataaaaataaaaaattgtttaaaattatttgtatatagctttaaaaggagatttttggaagcattgtaattacattaaaagtatacttgttttcttgaaaaaaagtttttcaaaagtgaataatgatgtcatacagctttcaaattactttatgctgttattttattcctattcacatgtgaaaacatatgagcaatttttgctgcatcagagataccagagattctttttttattggacattatttataaccttttctataaaagtaaggacactaaaatgtaagatgcgtgatgaaaagataagtggagaggctcattgtagttaacctatattaagtaatgtataagctaggtgttcagactattttctacattatggtggaattgttaattatagttaaaagtatattaaaataagtatattattaattgtacttttatgtaataaaatgcagtatattt

SEQ ID NO: 261 - DNA, 4543 bp, Homo sapiens
atgtctaattaaaatgtgtaacggactatttctgtgttggattgtttaaaaagtgattgcttcatagtgtactaagatcatctctttaagcagaagggagaaaacagctttctagttactttcacatattaggtttgctacataaaagcaagtctgaagactacacctgtgacattgcagagaccaaactgcagtgtgtgcagccatgagtggcagctgcttcctcctcgaggtgtcttgttccagcatgaggacagcccgtgcgatgttgggaggagccagggtgtttgggggggcagctgccctagacactggctggctgtgatggggggcagcctgctgtgtagacactggctggctgtgatggggggcagcctgctgtgtagacactggctggctgtgatgggggcagcctgctgtgtagacgctggctgtgatgggggcagcctgctgtgtagacgctggctggctgtgatgggggcagcctgctgtgtagacgctggctagctgtgatgggggcagcctgctgtgtagacgctggctggctgtgatgggggcagcctgctgtgtagaaagtgctgggcttgctccgtctgccttgacttgtgtgagtaactgcgctgggttttataggttgaggctgaaaaggctcctctttctatgctgggtttgacgaaacagttgctgtatttctctattaatttaggattctgtttgcaagcagcagagatggatttgtgctagcctagaaagttaaagagggatttaaggctgtctcgtgaaacttcaggtcaagaatggagaacacaggttagatgtcagagaagaaccagaaagacaaataagggactctcaggggcctcggagtacttgtcactctgtgtcatatctctgcatagccgcgccaatccccaaaccagcttctctggccacacggtgggacagggcggttcccacagctcctgagcctgccccctgcctggcctgctccagcgggcggccgagttagggaagcgctgggctccaccataccgcggtgttctaaaggagtgggaacaatgaagatcagggttgcagagcctgtggcctttgctagcttcatgggaaatcttgaaaagagaaaacgaagggcttcagtaagccacccatggacagcaggcatgcggtggaaggcggagggcttctgtggcagcttcgcaggtctctcatctgctgcagaccccctgacaggctgagggtcttgctgtcgggtagcgggaccagatgagcctgaatgtggctctgcggctcacaggacaagtgtaccttgagagctgctgccgccgcctggatgtttgctgggtgagctccagattcacgggagccctttgtgccagcatggccgccccaaccccatggggaaagcagatctccctcacctgggaatctggcagagacctcaggcagtgccccatctttcatgacctgcctggtccaggtagaggagtcaagtcctgctccaggagcaggtgcagggcctggcctgggtgccgagagtggggtgaggagggaggagtaacgaagaaaggcagatgggcagaaagtgccacattggggcactcaagtggctctgtttaatattccagcagggacactgagaccgagcccatccctgctgggagagcttctcgaagctggttggtggctgacaggcagggagtggggtgctggggcctcctcgggaggtaggggtgctggggccctgctcttgacagcactgtgccatagctccgaggtggctgctccccatgggccagggctggtggtgccagaaaatgggatctgggctgaggggctctgggctggcagaggtggggcggggggtgactggcaggcatcaagatggggggggacaagcacggtgcccccacccatggggccgtgtggggctgatggatagtgggactccagcatgcagcagatgatggagccttgctcaactcagaagaggaagagcaggagagcgctggtggatgagagcaaccctgatgttccagggcccttggccacgtccaccacacagaggggccacgtccacacagaggggccacgtccaccacacagaggggccacgtccaccacacaggggccactgggcctgcgtatatctccttggcctgcgagggtatcatcatttcctgacctgtggaacaagtcattaagccaggaaggacttgagttggagcccctaaaacggcccccactccttgccaggatggtggacaggaagcagtgccatgttctgaaggagctgcaccagcccatgctgctgtggaagacccaagggaggcaaagacggtggctccagatggcggcccccattgggaccctgctcacatcacccactggccctggaaagccggggtgggcctgggcaggtgaaccctgaggctccgccaggagcagccccagctacagccaccatggatgtttgctgggttggatcagcactctcacctgctgaatggttttgcctgattcccactagcttgccttgtgtgggaggccgtgttttctgcggtagagaagtgctctccataaaaacccagcaggcgtgctcctgggccctgcagacgccggatgtgtggccacagacgccatgcgacccaggactggagtcacaagattgggcgaggacaaagacccagcgaatggtgaacggccatgcaggatggggccgatcagttcagtaggagcaagtgcgagacctgcacaggacgggcgagggaggcgttggtccccagcctctgctggccttatcagaatgggctgttcttgggaagcccctgggtgtctgtggagctggagatgttgggagcttgtgccctcagcaccgcccactgacaccagtgggctcctgtgtgccctgcccaatcccaggcctcaggacacccagcaccctgggcccttctccactgccacaggccttaaggttggtcatcatgccgcccagcggctgagtcttacaataaaaattcagacacaaagcagtggcagccactctgtgctttagagttagaagtaagtcattaaaaatgttggcccagcaccttccctgcctgtttccaaaagctggccgcaatatcaaattcatgtccctggacaaggctccagtaaggcactgcctgcagtgtgcagagagcacttaggtggttgcagagcaggcagagacgaatgtggggagtggaggtcaccatatctgcccactcggcaggaggccgtccattcctgagacgcccccgggaggcaggctcctgtacggcactcatgctgggtacccaacccctacaacccaggcaaacccctaccctgggcagagaagggcctggacacaccaggggcagaaggagaaaggggatggagacaaacctgggtgggggtgacctgggggcagctggggtggggtgacacggggaccattggggtggggacacactccgggagggggagacacggggcagcaggggtgggggcacacctggagtggggtgacatgggggcccctggggtggggacacactcggggagggggtgacacagggaccactggggtggggacacactccgggagggggtgatacggggcagcggtgtagggaaaagagagatcagactgtcactgtgtctatgtagaaagggaagacatgagactccgttttgaaaaagacctgtactttaaataattgctttgctgagatgatgttaatgtgtagctttgccccagccactttgccccaacctggagctcacaaaaacatgtgttgtatgaaatcaaggtttaagggatctagggctgtgcaggacgtgccttgttaacaaaatgtttacaagcagtatgcttggtaaaagtcatcgctattctctagtctcaataaaccagaggcacaatgcactgcggaaagccgcagggacctctgcccttgaaagccgggtattgtccacggtttctccccatgtgatagtctgaaatatggcctcgtggaatgagaaagacctgaccgtcccccagcccgacacccgtaaagggtctgtgctgacatgggttagtaaaagacgaaagcctcttgcagttgagagagagaagtccactgtctcctgctcgccgctgggaactgaatgtcgcggtgtaaaacccgattgtacatttgttcaactctgagacaggagaaaagccgccttgtggcaggaggcgagacatgtttgcagtaatgctgccttgttattctttactccgctgagatgtttgggtggagagaaacataaatctggcctacgtgcacgtccaggcatagtaccttcccttgaacttaattacgacatagattcttttgctcacacgtttttgctgacctcctccttattatcaccctgctctcctactacattcctttttgctgaaataatgaaaataataataaaaactgagggaactcagaggccggtgccagtgcaggtccttggtatgctgagcgccggtcccctgggcccactattgtttctctat

SEQ ID NO: 262 - DNA, 3779 bp, Homo sapiens
tgacctttcgatgctgtgtgggatcccaaaagtgtccggctttgatgggctgatcagcccctcgcctgtccagggctatttatggggaggggcccagtcaggcagggagcactgagcagatgggagctgtggccaagcccaccttctgggaagccctaggagaggcccctgcctcagtctgcccctggtgtgctggggcagggggaagacaaggaatgcccgcaggtggggtggtggggagactcttaggaggaaaggctcctccaggcctagtcacgcttcctactgaggccaggagctgccaggaccggtacgggatcagggctgtgggaggagggcctttggcaccggcccctgtgctaggaagtctgccaggcccgagttggagccaccccctgcaggggagggggcggctctgcctcagcaggccccagggcccccgaagtcacagaagctttttcgggtccagcaaggggtgtgtgtcctctcagtcaaaccccttgacgtttcccaccccctcacggggagggcaccaggcctgaagctggcaggagctagggccatgctatatttggtgggtcctggacgctgacccggccagcgctattctgggcagggagggaaaggggcagagcaggtggtccgccgaggcctggtccccaaccacagcaggacccagccgagcaaggcaaaagacgcaggactgggggatgcgcgcacaggctggggattgggagcagcctggggccggcgcgggcctgggcgtgggaaggcggagcatgccaccctctcgtggccgtgcgggggcgggagtggggagggtggggtggggagggcggagacccagcccctcccccgcagcgggatgcgcacagtgagtgggtccctccatcaccttccacctggggatgcacccactgggagggcagggtggaagccccagctgggtgtgtggactcccagggaccccaccccaggcctgggaagcaggggtcagcccaacacgcaccaatccatccccgatgcaggtagcccagggagcacctgcccctgctgtgaatggggcattcgggggcgtgagaccttttggtgccagcggtcacgctgcacctgaggcccccacctgaccagtgctcccagctctggtgtcctgagaaacccttcaagccatcccgcatgggcaggatggtgacatatccatgtggtaggattgtcccggccccaaagtatggccctggtcaggggagcccctgctggaaattgcatctccagagctttgatgcaggacccctgggggatcagggaatgagggtctccaccccaggggtctccttgcagtgagtctatatgcaggcctgcgttctgctcctggggctggttctgagtgcccagcttcagtctcctgagaacatgaggatgggagggggcagagtcttgctgagggcacacccagttcccgctggaggaggacagtgccagtcttctgcaaagggaccttgggtgggaacgggcccggagcgggaggaacgtgactccccagagggaagatgggcatcatactgggcccagagctgggaaggagttgctgccagcacagggtgggcctggactcccctcgcccctacccccagtggttgtggctgtagccctaagcctggagagcaggaccggcccggggtgtctgggaggctgccaggtgcctcccagagctcccaagggcccccacctgcaagtgccagcctcagggcagtgcccaaatgaggccctctcagctgcagccagcgatgccttgggatgctcaccgggagggaggcggctttgggctcctaagtccttgggagaggctgggagcagtcactgcgcggcttgcgcaagcccattgtcgggttgggtggcttcctcagccagggctgggagggactccaggatcaggtcctccctgtctcgagtctcagtggggtgatggggaggagacctggccacccatggctcaggggcagctgagaacaaggacctgctggagctggaagtgctgtggtgttgaggggtggggtgggcagcttctcacacctgcctcctgcctccttctgtccacctttccaccaccctgacctgtcccagccccacacatggttctgcctggctggcctgcccttggcacctggcgtagagcacacagaaggcactcagctaatgctgggcaggcccactcatggggagtgcgtggctgtgcagcaccagggaaccggcacagcagcgccggcagaaatcacagcagtaaacctgtccgggttgtatgcatcaaggtggcgatggacgtgggtccccccactgcactgtggccctgagcactgtatagcagcccggcaatgggagccattatcttgcccctttgacagaggaggacacagaggcacagggaggtgaagtagctgccccacactagtgcctcctcgctcactcaccaccccctgcaccacagtgcagccgcttctcccaccagctggggttccttggacccccaagcctgggaagggggaggtgagtttacaaaatggaaagcttaaaaggagaaaagtggaaccagaggtttgagaagccctgagtggtagagtaaggcctccagcgctgcctctgggtgcagggcagagtggcagaggagagggggagaggcactgggcaccatgggggcccagttcccacttcggggatctctctcgcagaaccgagggtccccttcatgggggtagatgcccagggctagctgttgccactgtctgtgtggacctgagtcctggacatgcccgagtgactcaggagtggctgcttgggcgggctctgtcaccctaggatgttatacattctgggaactggacaggagtggctgcttgggcgggctctggcaccctgggatgttatacattctgggaactggacaggagtggctgcttgggtgggctctggcaccctgggatgttatacattctgggaactgcaatcagccactagagaagtcggagctacaggaagtgaccctggggtgggacctggggacatggccaggtcagcatggggacacccggctccagcaggagctctggtctgtcctggggtctttgggggcagggctgcggccctgggcaggcttcctccaggcggaggtcctggggaagtgggggagccaggccagctgccgcctcccccactatgtagcatctgattcgtcatctctcatgaaggcgatttggttcataactctgaaactctgaaaaaggtcaaaagaagcagagaggccctcggtggatatgccagcttttctgccggtgctttctcccactactctgggtggtctgctctcctcttcaaacctcagctcgcagggagggcctgaatctgccagcccctcaggatctccttccctctgggccctccccacccttaaggagcctcccagacagaagggtggacagagccacctgggcagcccgagagacacacgggggtcctccctgtggacagccctgccagcttccgcccagccctgagcttcatttgcatcttgaggagtaaggggtggtgaaatgggaatgctggtctggctcagctggtcgtgggcataagtgcccgctgaatggatggcatctctccctcctgtcttatgttctggggtccaggtgcttcccagggccatgcccctgctgctaatgcttgccctaacccttaccctaaccagcgtccagcgtcgtctcaccgagccgtaaataaatcaacagattcgc

SEQ ID NO: 263 - DNA, 3276 bp, Homo sapiens
gaataacgctggccccgacccagccaggcaggcgggaaggcggctccgtgtgtagagagtagaaaatgagcctgcctgtgttcattctaggagaggagggagtgaatggtgtgtaatatccctgcgtactgagtagggaccagggggctgctttaatattctgctgaatgtcgcgtttcttttaacccttgctggagagattttcagcccacagagtcaggctccttcctgtcaggccactggcaaagtttccaggctgcagcaagggaagccaccgcaccgggggtaagtggctccggaaggcctgggctctgacacaatggcacccgcgggcagcttccggcaagcagacagggacctctggctagccaagaagaggggcagggaggaaactgaccacgtcctcatgcctgctgtgtttccatacgtttgctctccaaactacttcgcttgcatgcacaggaacccaatgccgagagcacgctccccaaagtgggcacccatctcctctgagacccggccactgaacctctgggggcgcaaagagccgcgggccggaccgagcctcggacctgcatgacgccaccccaatgctgcaagtccagtctggaattgcccttgcaaatgcgctcaccctggctttcctgcccggtttgggggtatatatccccttgaatttccaatttcaactgctcccacacgtgtctctcaataagtcaaacccaggcatccctgcgccagggtgttgacggcactccacacggctccagtcttctcctgcacgttccaaaaagcaaacccctccttgctcccctccctacaaagcccagcagtccctgagggcagcaggagactgagggcagacaaaaagccaccttcggaaaagcaagcgagagctttctaggcattaatcgccgcacccccacgccgccaccagaacaaacgtgggatgcggtggtcttcgccaaaagggaagggaatcttagccgcgcctcagggcccggaatgcccctccagcttcacttccagaagggcagagctttccggaatggcggggggcaccaaaccatcgtgtttgggggagtttccactgggcaaccggtcacagtttcgcgaggaacgagtaacaagcggagcgagctcccagatgggaacgctgcgcggtcgccaagagctgctcctccccggcttggagtcccccagaggagttccatccggagcaggacaccggaaagtggggctgctagccggactgcggcagcgcatcacccctagagttggttttctcccgacaactccaactccgctctcccgcggagctgtgttcccaggaggctgccgcggccgctgctaggctgcgaagaacagaggcgggggaaggggcgggaggcggggagctgggccgggatttcccacagggattcgcgagcgctaccgagcgcccaggctccccgctgcgccgggcacggtgtctttggagcgcgctttcccagccaccaagccggaggcaccgccaagtctgcgctggcagagagtgacgctgcccgacgactcccggccgccgagtatcctctccggggtggtggagaggctgggagactttaggtaggaccgaccactcaccccagcccactcctgttccaaggctcaagaggcgaaaagggtttccacctctccccgactgaccctggaaacgtgcagtcccgcaggcgcccggaccaccagactggtccccaagggtacggccaatgaactccacccctctccttcggcggccacttgcgggataccacggcagagcttctccggcccccgcgcgcagtgcttgcacgccaagcagagtccactagcccgtggactgcgagctggagaaaaggaggtggcgcgcggctgctcagaagcgtatccgtgcctgggagcagacgggcgccagtactccaggagccggatggccagaggcacccctttctccccaacgcccagctctggctctgccccagagctaaggagcatgcaccgcaatgcagcgggctccgagctctccgagcgggggctgcgggagaccgaggctaccagggagtgccggggcgaggaagccgggggactcgcgagccagtttcgggcgctaagagccagccgggggcgctctggtgggtgccgcccaagccccgcgctcggcagcggccgaggctcccaaacctccttgccctcgggtcccgggatgcctgcaccgcaaagcagccagaggaaccccgcgaaccgcggagcacagcagtcccgaggcggccggcaccagcagccaacttgctccgtggagggtacgttaccttccatcgcagccactgcggatgccaggaggagcagtagtagataatccagggccatcgccggccgacggcccgcaggccgagaccaagccgaggcagcagcgccgggagggcgccgcgtcccagggcgccgctgcgctctccgcgggtggcttctcggtatcctttcgcgctctcgcccggaccggacttcccggagcgctgcgtgggcgtgggcaggagtgtgtgcgcgtggggcggtgcgggcgcgcgtgggtgtgggtgtgcatgtgtgtgtgtgtgtttatgggagaggtgggtgtgtgcgtgcgtgtgtgagagagagagggcgagggagaacgagcctgggagagcgcgcgagagcgagtgcgtcctggtgtcacattgctagctacagcggagcctacgggaggacggagccggccagactgacgcgggagggagcgggatcccccaccatcagctctctccccacccctaacacctcctgtccaatcaaggaatcaaacctgcaaaattcccccggccaatcaggcgcgagcacctccttacactggcattgttagtttaagaaaaacttttgcttgcaaggctgtgcgggagggctcggaaggcgctaggaggggtccgggctccccctcgtggtgctctcggagaaccgcagcggcccgcccaactcaccctgtccccacatagggtgcccagcgaaggagctggggaggcctcgtgcccttacatcccacccaggactggatccgctttaaatgatcaaacgagccttcgttcatcttctctgtgacaagagcaccctgcctaccctgtttagagcaactccaggggcgcacccgtgcctctcctccagagctcttcactctctagcatgggttggtatttactaatcgattttgtttatcgtggggtctctccctcattaaaatggggtcaccat

SEQ ID NO: 264 - DNA, 3076 bp, Homo sapiens
gaggccgagagggggcagcaggcgatggcggcggcggtagctgcggcgggtcggttaggctggttgttcgccgcgctctgcctgggcaacgccgcgggggaggccgcgccgggcccgcgagtgctgggcttctgcctggaggaggatggagcggcgggcgcgggttgggtacgcggaggggcggcgcgggacacgccggacgccaccttcctcctgcgcctcttcggcccgggcttcgccaacagctcttggtcctgggtggccccggagggggcgggctgccgggaggaggcggcctcccccgcgggcgagtggcgcgcgctgctgcgcttgcgcctgcgggccgaggccgtgcgcccgcactcggcgctgctggcggtgcgcgtggagccgggtggcggggcggctgaggaggcggcgccgccctgggctctgggcctgggggcggccgggctgctggcgctggcagcgctggcgcgaggcctgcagctgagcgcgctggcgctggcgcctgccgaggtgcaggtgctgcgcgagagcggctcggaggcggagcgtgcggcggcgcggcgtttggagcccgcgcggcgctgggccggctgcgccttgggcgcgctgctgctgctggccagcctggcgcaggcggcgctggcggtgctgctgtaccgcgcggccggccagcgtgcggtgcccgccgtgttgggcagcgcggggctcgtgttcctggtgggagaggtggtgccggccgccgtgagcgggcgctggacgctggcgctggcgccgcgagcgctcggcctcagccgcctggccgtcctgctcactctgcccgtcgcgctgcccgtggggcagctgctggagctggcggcgcggcccgggcggctgcgggagcgggtgctggagctggcgcgcggcggcggcgacccctacagcgatctcagcaagggcgtgctgcgctgccggaccgtggaggacgtgctcacgcccctcgaagactgcttcatgctggacgccagcaccgtgctggacttcggcgtcctggccagcatcatgcagagcggccacacgcgcatcccggtgtacgaggaggagcgctccaacatcgtggacatgctctacctcaaggacttggccttcgtggatcccgaagactgcacgccgctcagcaccatcactcgtttctacaaccatccgctccacttcgtcttcaacgacaccaagctggacgctgtcctggaggaattcaagcgagggaagtcccacctggccatcgtgcagaaggtgaacaacgagggtgaaggcgaccccttctacgaggtcctgggcctggtcaccctggaggacgtgatcgaggagatcatcaggtccgagatcctggacgagtctgaagactaccgagacaccgtggtgaagaggaagcctgcttctctgatggcccctctgaagcggaaggaggagttctccttgttcaaggtgtctgatgatgaatataaagtaacaatctcgcctcagctgctcttggccacccagcgcttcctgtcccgagaagtggatgtattcagcccgctgcgcatctctgagaaggtcctgctgcacctgttgaagcatcccagtgtcaaccaggaagtgaggtttgacgagagcaaccggctggccacacaccactacctgtaccagcgcagccagccggtggattacttcattctcatcctgcagggcagggttgaagtggagatcgggaaagagggtctgaagtttgagaatggggccttcacgtactatggagtgtcggccctaactgtgccatcctcggttcaccagtccccggtgtcctcgctccagcccatccgccatgacctgcagcccgacccaggtgacggcacgcattcatctgcgtattgtcccgactacaccgtgagggcgctctctgatctgcagctcatcaaggttacgcgactgcagtacctcaatgcactcctggctacccgagcccagaacctgccacagtcccctgagaacaccgacctgcaggttattccaggcagccagaccaggctccttggtgagaagaccaccacagcggcagggtccagccacagcaggcccggcgtcccggtggaaggcagccctgggcggaacccaggcgtttaacggctcactaggcagccccagatctggggaacagatgagcacgtggggagctggagtgagctgagcagaagttttgtgcccgcctgcccccatcccctccaggccacgttttagatggcccttgtagttgcgggtcctgggtgtcctcagaactagacatcaatgcctggatccttcagccggccctgccctcctttaggagacaggagtcaccagggcacagccctccaggcccgcctcaggaaggaatgaaaggaatgccatcatctctagttcccagggcccagccttccccttctcccccggggcagggacagtgcggcatattcagattcagacctctttgggctgagccaccttgtgagtgcagttactgcctttgtgtggccgtgacctctatttgtttgcttttaatttgccaacctatcgctgctggcagcactttttgagcaagccgagagcacccattttggctgggggttcagatcgatggccttgtccatgttgtcctttctggcttccctgatggtgtcatgtttcagcgcatgcgccccagcctttcccatgtgccaaaccagaagctccactgcccgtaggctgtccctgtagccctgctccctccctggaggctgctcttctgattctgagagctggcctagtggtgctgagggcccctttctgcttctctgcccacctgctgagttgccactcgcagtgttgtcagttcccgtgttctgagaagaggtcatgcctgggaggaagggatcgtcatgctgcatcgaatcctctctccgccgtgtggcccccaggagagtagctgcctgttgcacctgctccacacctccccacagcctccctgcaggtgctgtgtggccgtgatgtgcagagagcagtgagggagggttcatgaaccaggtggatcctcttt

SEQ ID NO: 265 - DNA, 3559 bp, Homo sapiens
aagaaaaaaaagaaaaaagaaaagaaaaaaggaaaataaagaaaagcaagcaaacaagcaaagcgaagtgagagagagaggaaggtaggaaggaaggaaggaaggaaggaaggaaggaaggaaggaaggaagggcagggagaaatgtgcagagtgaatttgctgcaggcaggaccccggctgttcggtgcagagccaggctcgcccaggatgaggaccctgccagggctgtggcccgtgcctcctcccctcctgctgccacaatgggcacaggcaggatgccagcttctcttatgcaaacctctctccagcctctgcttcagcctggctgtgcagggtggggatggtggatactgggaagccaggtgcccagaggagccccagaagctgtgccatcatcagcacccacctggccgaagcccgctggtgaccccaattcaaaggcaggccaggtgcgctgtcctgccctggttccgggctgcgggctgctctggccccaccgcctgcccacactgccactcgcaggcctgggttggggaggcagagtgtttgggaccctcactctccttcttcaatcttctgagttgactaaaatcaaaacaagagtgggtttctctgctgagggtggggagcaccctatccagacccagggttcaccagacggacatgacttgttacccaggactgtcacagggctctgcacttggccttcaaacgtgggcaagccacgaggcctccaggcctctctggggctgcagatccgtcctcaacagcgctggccagtgtctctgacgctgggtaaaatgggtcttcccctcctggaagagatgctgccccctggtggtggatctactctgggagagaaaatactcccagctggcctgatacccaggcacaggcttctcctaaacacaggtctccccacctgtcaggatgtccaaacggagttggtgggctggatccagaaagcccccaagagagatgctgaaactctcaggtgggtaaaaagagtagacctctgacgtcccagggtacagcccttgctgccatcctgggggcaccctcctaagtgccaggggcaagccatggtcaggggaagcagaaagcggtgacaccccggccactgcacctgtgggcaggtgggtcagggagggtccaggcactcaggatgaacagaactcacctgccaaggcttgggctgaggaggagctggaatcccggagacacactgcccccgcccctcaccacccctgtcactcagacagcacacctcagaggcagaacagaaaacccagagcctcacccaggcaaggctcacgtcccattccccgccatggcactgacccggtcctcccagctctgaggagcctcagatctcctgggtggcaggggtgcagctgcatagcggcgaaattccaagccctggttctgcgtttgccttgtgctgaagttcagaatgcctctgacgctcacgcacaccaaatggacaaggaggtcccctcagcagccccgtgggcggtgctgagcttgaaagtgggaggttctgaaggcattggaggcctgacttctggacttcagagagcgtgaagctgcctagatcgcaagctcattgtgaactgtttgcttgttccctccaggctctgactccagccaaagcatgaatggccttgaagtggctcccccaggtctgatcaccaacttctccctggccacggcagagcaatgtggccaggagacgccactggagaacatgctgttcgcctccttctaccttctggattttatcccggctttagttggcaataccctggctctgtggcttttcatccgagaccacaagtccgggaccccggccaacgtgttcctgatgcatctggccgtggccgacttgtcgtgcgtgctggtcctgcccacccgcctggtctaccacttctctgggaaccactggccatttggggaaatcgcatgccgtctcaccggcttcctcttctacctcaacatgtacgccagcatctacttcctcacctgcatcagcgccgaccgtttcctggccattgtgcacccggtcaagtccctcaagctccgcaggcccctctacgcacacctggcctgtgccttcctgtgggtggtggtggctgtggccatggccccgctgctggtgagcccacagaccgtgcagaccaaccacacggtggtctgcctgcagctgtaccgggagaaggcctcccaccatgccctggtgtccctggcagtggccttcaccttcccgttcatcaccacggtcacctgctacctgctgatcatccgcagcctgcggcagggcctgcgtgcggagaagcgcctcaagaccaaggcagtgcgcatgatcgccatagtgctggccatcttcctggtctgcttcgtgccctaccacgtcaaccgctccgtctacgtgctgcactaccgcagccatggggcctcctgcgccacccagcgcatcctggccctggcaaaccgcatcacctcctgcctcacccgcctcaacggggcactcgaccccatcatgtatttcttcgtggctgagaagttccgccacgccctgtgcaacttgctctgtggcaaaaggctcaagggcccgccccccagcttcgaagggaaaaccaacgagagctcgctgagtgccaagtcagagctgtgagcggggggcgccgtccaggccgagcgcagactgtttaggactcagcagacccagcaagaggcatctgccctttccccagccacctccccggcaagcaacctgaaatctcagcagatgcccaccatttctctagatcgcctagtctcaacccataaaaaggaagaactgacaaaggggatccatcggccacccctctgcaggggcttgtgatggctacaatggctcctagacactcaacgacttcatctgtggcagggagagaggaggccggaagaacaacccctgaacaatggaggcctttctttcccgctaggctcccagcctccttcccgctacagaatcgctcatcggcgaggctcagcagaaagaccctgaaggcaggctgcaaatgacccagaagagggacctgggagtcctggtggggacggggagggagtctcaatactcctttgcagtgcaaggtactctgagtcccctctgtagtgcctctgccagacacacactgcctgagttgaagagacacaggccacacatttcaggctggttgccagcggacgtcagcactcacggcctgcagggactcagcacagctctggattctggatctctcctgctgtaaccccacgcacaagcctgcaacccccagagctctttgacaggctcccaggcctcccagtcctggacaagcatgtgcagtcacgggagctcagctcaggccagggctgggctgtgcacctgcctcccactgacccagacccacttcctccagagaggcctctctccgcctgagctatttcccttgctagtgtgcagatatttccctaacatgtccttttttgtatttgtttgtacggaccataaatataactgtagctttaagact

SEQ ID NO: 266 - DNA, 3328 bp, Homo sapiens
aaactagacatgtactaaggaacaaaacaaaaactggctgggggtggtagcccacgcttgtggtcccggcacttcgggaggctggggcgggtggattgtttgaggccaggaggtagaagttgcggtgggctgagattgccccactgcactccagcctgggggacagagtgagaccctgtctcaaaaattaaaatactacttaggctacattgtgggggggtggtaagtctatggattttgatttcctttttgctgttttctatttttggtaacttgtttatgtaacttcattttttaaaaaattgctacattcaaaatttcccccaaaaaagaaacttcatatacaagttagttcatatacaagttagaaaatgaaattttaaaataccccataagacacatcaaagaataattctttaaaaatggtaccagaaccctacagagaatgtaaggtaccaaaggatgttaaagacctaaatagatcacattcatgggtgcaaagaagtgatactgtaaaaagaaagaaactcaaaagatacctaaaggcaggtgaaaagacatttacaacagataaagggcatataaagaacaacaggaagaaacgagggaaatcttacggctcagccactgtcagggctggggggttctcggtgcaccctggaagcagctcccaccaccggggccacagagaaacccacacaagccccagacacgtggacaagaatactcagagcagcctggctctccacaacttctgaccaagaaccaccggaggcccagcagagcagaacggagcagtctgctgtgccgaggtgggtttctgcagcggacattattcggctatgaaaatgaacttgtggcagcccctctgcatgggcaaccctcatgccaagtgagcaacgtgagacttcagcaaacaccaagatccacgtacaaagctcaaaacaggcaaaactgagcatgtccaggacacgcacaggtggcaaagccataaagcaaaacgaggacatggtcacaggctgggatgtggctaacctcccaggtgacacctggggatggtaaggggctggccaggttccatttcacatgggtgcagcctaaactgcatacagctccttatagttacccacatgtccacaggcctcacgcacttttcttctgtgtcacattccacaacaaaagaacaccacacacaggattctggggaatcccacaggctggaagagccaggagcgtggcctcacctggggttgatctccagcgtgggctgcaggagctgtgcgcgctcctcctgggtcttggccagctgctgcatgcgcaggaagtggcgggcagcccccatctccagcacggtgaccatggcagggtgggtgtccagtcggagggtcacctgtgagcaaagcccggggttgagggtgatagaggttcccaatgtgagagggctggcaggatcttaccaggggtgaaggtcacccagaccacgaggtagcaggcggggtctcaaggactcccctggaccagcgctgctccctccccattacccactaacttgtgggccctgagctgatgccccacgcaaagatactgtgcccgaggggctccaccaccctggtgccccgctgctgcctccaggagctgcccgaatccatcgtcctctgctccatgccagcccaccctgcatgaggccccttcctccaagtgaccatgcatgggacgctcatttctcactctgagctagacaggttggtggggggagtcttagctctctgaagcccacccaaaacccccgactaagcacccaagtgagcatgtgagctcctgagggctggggtagcatgtcccttgtttggaacccccacgtcctcagccattgcagctcccactcaggatgctggtttttcagttctcagttcacacctgctctggagcagggctgggagaaagacacggccttcctgcctcagcggcactcccgagcaacacgtgccgagcagggacccacagggtctccacctgacaccaagggcttctgctgctgctggaaggacacccaacgggccaggtactgggagccaccagctggccagcctgttagggacactgcggccaagtggtggtccatccccgggaaagcctcaccttcacgttggtgacacgcgaccccagcacatttctcatccaggccatgagctcctccgtctccttctctgataggcactcggcggctgcggaagagcaggcgacagggagctcaggcctgcatcccaactccccggcttccatgggggccacgcagcatgcttccagctcccacctcctctcccaccaggatggagacacaagctagcaagatgcttttcatctaaaagtaaaacctcaaaggatgcttcaggttgcctgaggcccatacaacttggttagggctttaaaaaaatacacagcctctcaagaagctgggccagctccagaagccaccgtggcaggagcactggacagacccctgatatctaaaccaggaggcaccttcctccagtcaccagggtgctcccacaaggctcttctcgggggtggctgagcccaggtcaactgacgaaaacccaaaggaagccctcgctgcggggcaggagaggcgtgcggggagtggaaaccagccccacgcctagagagcaggggatgccgacctggggacctgtcctcaaacttctcctccttgtagtgatccacgactatgtccgtctccacagagatcagcttcttcttgtcaaactcacgaaggtgcagcagggtgagctcatcaaactgctcaaagcagaagagaacctgcaggtggccaagagcagctccatcagaccccgggggcctccagccaccacagaagaaaggatgagggcggcaggagggctgggggagccaagcgggccacactggggaacaccggggcagttggggttcctaggcctgcatgacagttactacgacacctgggtctaaggaaggctctgactgccttcaaggcagaagcactccacgcataaagaaatccacatgtggctgagtgcagtggctcacgcctgtaatcccagcactttgggaggccaaagcaggcagatcatgaggtcaggagttcgagaccaacatggtgaaatgccgtctctattaaaaatacaaaaatttgctgggtgtggtggtgtgcacctgtagtcccagctactcaggaggctgaggcaggagaatgacctgaacccaggaggcggaagttgcagtgagccgagatcgcaccactgcactctagcctgggcgagagagcaagactccatctcaaaaaaac

SEQ ID NO: 267 - DNA, 3881 bp, Homo sapiens
agtctgtagcttatttctgtgtgtgtgagggtgtgtgtgtgtgtctctctctctctttctctctctctcaccatttccaggctcaaatcactgtggaggaacaagcaacaaagtcttgtcaggaccttatctcagggtaacgattagttaaaaatgaaaggctaaaatattgattttctttagaagaataattgactgtttgatatagagaacacccagtttcttcctgaggaaagctgaacagggctacattagcagcccgcgtctctctgacagcagcaggggctgggtttaagcagcggctgctttgcctggggagcacccgtaaatggactttggtctcaatgctttgactctttgccgtggttttggatgttggaataccggcggtgatctgtcttttataaactcacctgatttaaaggaaagatgagtgaagaaccaaaggagaaaaatgcaaaacctgctcataggaaaaggaaaggaaaaaagtctgatgccaatgcaagttacttaagagcagctcgagctggacaccttgaaaaggccctcggctacatctcagtagtggacaccctgaagatagtgaccgaagagaccatgaccacaactactgtcacagagaagcacaaaatgaatgttccagaaacgatgaatgaagttcttgatatgtctgatgatgaagttcgtaaagccaatgcccctgaaatgctcagtgatggcgaatatatctcagatgttgaagaaggtgaagatgcaatgaccggggacacagacaaatatcttgggccacaggaccttaaggaattgggtgatgattccctgcctgcagagggttacatgggctttagtctcggagcgcgttctgccagcctccgctccttcagttcggataggtcttacaccttgaacagaagctcctatgcacgggacagcatgatgattgaagaactccttgtgccatccaaagagcagcatctaacattcacaagggaatttgattcagattctcttagacattacagctgggctgcagacaccttagacaatgtcaatcttgtttcaagccccattcattctgggtttctggttagctttatggtggacgcgagagggggctccatgagaggaagccgtcatcacgggatgagaatcatcattcctccacgcaagtgtacggcccccactcgaatcacctgccgtttggtaaagagacataaactggccaacccaccccccatggtggaaggagagggattagccagtaggctggtagaaatgggtcctgcaggggcacaatttttaggccctgtcatagtggaaatccctcactttgggtccatgagaggaaaagagagagaactcattgttcttcgaagtgaaaatggtgaaacttggaaggagcatcagtttgacagcaaaaatgaagatttaaccgagttacttaatggcatggatgaagaacttgatagcccagaagagttagggaaaaagcgtatctgcaggattatcacgaaagatttcccccagtattttgcagtggtttcccggattaagcaggaaagcaaccagattggtcctgaaggtggaattctgagcagcaccacagtgccccttgttcaagcatctttcccagagggtgccctaactaaaagaattcgagtgggcctccaggcccagcctgttccagatgaaattgtgaaaaagatccttggaaacaaagcaacttttagcccaattgtcactgtggaaccaagaagacggaaattccataaaccaatcacaatgaccattccggtgcccccgccctcaggagaaggtgtatccaatggatacaaaggggacactacacccaatctgcgtcttctctgtagcattacagggggcacttcgcctgctcagtgggaagacatcacaggaacaactcctttgacgtttataaaagattgtgtctcctttacaaccaatgtttcagccagattttggcttgcagactgccatcaagttttagaaactgtggggttagccacgcaactgtacagagaattgatatgtgttccatatatggccaagtttgttgtttttgccaaaatgaatgatcccgtagaatcttccttgcgatgtttctgcatgacagatgacaaagtggacaaaactttagagcaacaagagaattttgaggaagtcgcaagaagcaaagatattgaggttctggaaggaaaacctatttatgttgattgttatggaaatttggccccacttaccaaaggaggacagcaacttgtttttaacttttattctttcaaagaaaatagactgccattttccatcaagattagagacaccagccaagagccctgtggtcgtctgtcttctctgaaagaaccaaagacaacaaaaggactgcctcaaacagcggtttgcaacttaaatatcactctgccagcacataaaaagattgagaaaacagatagacgacagagcttcgcatccttagctttacgtaagcgctacagctacttgactgagcctggaatgagtccacagagtccatgtgaacggacagatatcaggatggcaatagtagccgatcacctgggacttagttggacagaactggcaagggaactgaatttttcagtggatgaaatcaatcaaatacgtgtggaaaatccaaattccttaatttctcagagcttcatgttattaaaaaaatgggttaccagagacggaaaaaatgccacaactgatgccttaacttcggtcttgacaaaaattaatcgaatagatatagtgacactgctagaaggaccaatatttgattatggaaatatttcaggcaccagaagttttgcagatgagaacaatgttttccatgaccctgttgatggttatccttcccttcaagtggaactggaaacccccacagggttgcactacacaccacctacccctttccagcaagatgattattttagtgatatctctagcatagaatctccccttagaacccctagtagactgagtgatgggctagtgccttcccaggggaacatagagcattccgcagatggacctccagtcgtaactgcagaagacgcttccttagaagacagcaaactggaagactcagtgcctttaacagaaatgcctgaagcagtggatgtagatgagagccagttggagaatgtatgtctgagttggcagaatgagacatcaagtggaaacctagagtcctgcgctcaagctcgaagagtaactggtgggttactagatcgactggatgacagccctgaccagtgtagagattccattacctcatatctcaaaggagaagctggcaaatttgaagcaaatggaagccatacagaaatcactccagaagcaaagacaaaatcttactttccagaatcccaaaatgatgtaggaaaacagagtaccaaggaaactctgaaaccaaaaatacatggatctggtcatgttgaagaaccagcatcaccactagcagcatatcagaaatctctagaagaaaccagcaagcttataatagaagagactaaaccctgtgtgcctgtcagtatgaaaaagatgagtaggacttctccagcagatggcaagccaaggcttagcctccatgaagaagaggggtccagtgggtctgagcaaaagggagaaggttttaaggtgaaaacgaagaaagaaatccggcatgtggaaaagaagagccactcgtaacagcgaacggtcagtcaaggatcataagtttttactgccagtattgagaaattcgtggaagaaatgtcagcaggaagtaaaaattcaccgagaagtgtgtgtgtgttcgctgcttccacacattaatggcatgattttttttatgc

SEQ ID NO: 268 - DNA, 3468 bp, Homo sapiens
agcgcgttggggctgcgtctctgcgcactggctggctctgggctgggaagtttcaagttccaggcggtctgcattcccttctcccccttcacacacttaaccctaccttgtctggtcaagagagatccagacaaaatcaaccttctgcgtcaacagccgcgtccggctgcctcagaggcacagagtctgttcctggcttcacctggctttcgccataaactggaacgagcggccaagaccctggatgctgctgcggctttgcaaggtgaggactcggcgcccagcaccttcctgtgcaagaagtcagggagttcaagacgagatcaaggctgatccaggccttgcgcggctcctgctcacaggatcctggggaccgtttcaagaagagcctcaggacacggagaatgctcagtctctctcctggctgtccccgccaggcaagagggcccgggggtggagggaatccaggggacacggtcctcaccccactgtcagcgccggcagaccccaacactcatcccccagccccaggcacacaacccgccctgccgcccctcgccaggccctgccgggtgtccaccctctgaggcggcaggtgggggaggagacatgctggggaggggcccaggcctgggcggcgcggcccttcctttcactcccctgccaggcagtgcctgcgcccaccctcacccccaccaccccccccgaccccccgcgggctgggaggaaatgtaatgagtgcagggcggtgtctttggtgctgctggggtggagtcaagggccagatcccattgtgaatttgacagaaaaggaaacgggctccgagcgcaggtgaggctcagccagggctccgcggctctcacccaagagctgagctccaaccttcctggcccggctccgtttcccgagctgtggaaaatgcctgtccacccggcatggctgggtagtgcctgcctcccccacgccagccacgggccggctccccagtcctctgtgggagggttgctggtctctgttaaaagccccccgggtgacgtgcatgccgccagggcctgtgcccccgggagacactctggggaggggccaccacaaggaaacctcagtccaagctgtccagcggaggctgggcatggctgtgccagcacaggaaggcaggtaggggtctccggggcaggcagctctccctctggcccagccccctgtgtgaagtgctcagcctgggtaggaacgtgcttcccactcagcctcctccaagccgctggaggtcccgctggttccccaaatggcttctgtcctgagccgtgggctcctgaccacgcacctaccttgcacggtctgaacaagagtctgtgccagggaccccgctcaggaggggcacagaggaagccaagggcccacacaggtgagggggtctcagttctgggcctcacccagcccaggctcagcagcagcctcagaatttcctggcatctgcttgcctgtgttgcaacccaagtggggtgtgcatgccgcctgacagagaagacactcggggaggattatgtaagcgctttcctccccagcacagggccgtcttgggcacattgcgaccagaccatgtgcaaaagcactcgggagagtggcaggagctgacccaccagagagggattaaccccttccgggatgctggcggcttgtcctggggaacgtggggctggtcaggattgcaggacacggaggggcggagtgtgaatgtggaggcaccggtgctgcgtgattttccacaagttgtctaacctctctgtgccgtcgttgcctgactcggctgtttccaatgcagctgattttaacagcacctgtttcatgaggccacagccaggattctgggaggcaaagcacagaaagccctcaatgcggtttgaggctccaggcaaggctcagctgacagtagctgaaaacagcaatttcagccgcagagttgcccgtcctgtgcaccacagaacgaacaagggtttccagctttgctcagatttgtggggaccactgggtttggactttaggaaaagctcatttgcctttgggcagaagtgaccggagctggggtcacctgaggtctgggcaggaacctctcgctggctgacgcaggacctggggaggggccatctgtgtggggcagctctggactcagacccgtggatacctgtgaaacctgtcaggctgagccaccgtccagcaagtgaagagaccgcaactgggccactgtggagtcacttggccaccacccccgggttctcacagccctcatgtgtgtcccaaccgcgagcaggcggccgacagtgcaccctgacaaggcacgcgtgtaccatcggggacacctgctactttaaagtgaccggatggtgcccaggaccacaagaaccagcctcgtggcagggtgcccagcctccttccccctccactgttaacttttttgccaagattccaaaaacgaagctgcagctgaaaataatttctttttcttctatagcccaaatgaccgatggtgtagagattttcccatcatagaactgcagtctccatttctagtaggcccaggaggtgacatgtctgaggttggggtgccttggggccagtgcccagaggagaacccacattggcgtcctagtaatgtgaaccctcataagagcttcaggacagcagaggcagtggagatgccggcaggcagggagagccggcccggccagcccctcgggaatgagcttcagtcctattctagctcaaaatgataaacctcatctcaggcggctgcttgtgactccaagagaccaccaggccccagtgatagccagcacagtacctggcacataaatcccacccatcagcctggtgtggctgggagacccgcccgggtgctctctgtctctccctccctctttcactgctccctgaaggcagcatctgaagaggctgaggctgtcctgtcgctgccccgacctctgcggagaagcccgcggctgtcctgtcgctgccccgacctctggggagaggcccgcagttctgatcacggacctcagacggggaagcgcacaggaggcctcgggtggccgggctgtgctgcttctccctggacgggcagagctggcacataggaggtgcttcgcaggtgactaaggaggcaaagacccgaagcctgggggactgcagtgtccggtggatcccagctgtggccatcaggcccatgggtggaagagccaagggaggggctcagctgggcaataggatgcgagtgggcgggggacactgctgggaactcccttcactgcatggccaagaatgtgtgtaagcagacagggcgggagagctgtgtgtcgcctcgggcagtcactcagcctctccgcccgttttcctggtctgtaaaatgggccgaaacgcccgccctgctctgctctttgggcagtttccataaatgcttggcccagcctccccggc

SEQ ID NO: 269 - DNA, 5214 bp, Homo sapiens
catggaaagaatataagcttatatgcagacatgttaccttacttgctgaatacagacatactaccttacttatggaatttctttcagttcctcaaactgaaatatgcctcaaagaacattttaaaagttcaaaatattctcagatctgtcctttcatctggtatcagcaataaccctatgagcacagggcaggggaacaggcattatccactctctccctcaaaagttctccacaatatgcccatttttctactatacataggcttatatcccaaacaagttacaattattcattcaacaaagatttttttaagctcctattatgcgttaggcaatgttttaaggcattagttttctccctctatgctttctcaaagtgtttctcctatttaacttttttaaaaaaataagggtgaaatattacacaatttactcaaaagtcatcctaaaactaaggcattttctacgtgccttttcctcagaattttccatttctgtatttattcacagtcatggaaatatcagttatccatcagctcaaattataacctctatgagagcaatccccaaatttccctctctaaatctaacttccttcctaaacgccaggcttaaattaacaaagctctcccaagaatcttcaccttaaggtgaatatatcaacatcttaaaaaattagcaaatatctccacaaacacacagacactctcacacttctcttcctctttattaataacaccagcatccttcctagtgtccagacctggaatttcaaaagcaactttgattccttcttgtggtgttattttatttatgtatgtggttgtgtttatatatctatatttttaaaaataggttttcgtccacagttcctggcttataactcccatagccctttgtgttagtctgtcttgagactgggtaattggtagagaaaggtggtttattgcggctcatggttctgcgggactgtggaggaagcatggtgctggaatctgctttcagtgaggcctcgggaagcttttactcatggcggaaggcaaagggagagctagcacatcacatgaccagagagagcaagagaaggggggaggagccaggctcctttaaaccagtagtccccaacctccggcaccagggactgactgatttagtggaagacaatttttccacagacaaggggtcagggaagatgatttcaggatgaaactgtttcagctcggatcatcagccattggattctcataaggagcacacaacctatatccctcacgtgaggagttcacaatagggtttgcgctcctgtgaaaatctaatgctgctgctgatctaagctctgctgatcagaaggtggagctcagacagtaatgctcgcttgcctgtggctcacacctcctgctgtgtggcccagctcctaacaggccatagacaggtaccggtccatggagtaggggttgaggacccctgctttaaacaaccagctctcacttgaactcattaccacaggggagggcagcaaaccattcatgagggatccacctttatgatccaaacacccaccggaccccacttccaacaatggaggtctcattaaatacgagatttggaggggacacacattcaagctatatcacccttgttatagtcttttattacaatgtttggtgtgttaggcctcaggaaacaatatccctgaccttctcctgccctcctttcatctgcaccaaggcaggactctaattttcctccacttttctgactgtgggtcataatgccctcatttcagagagggtcctatggggggtcttcccattggggaaagtgctgatgtcatgaaaattccataaaaaaccaaaaggactggcctcacagctgaacatgtgaaggtgggcaagaaggtgagcaagaactcatccacttgctgggagagtggcataccctaactccacggaaacagaggctcctacatttgggacccttccagaccttgccctatggcatccagaccttgccatatggctgtttacttgtatcctttaacatatccttcataataaaccagtaaacgtgtttctctgagttctgtgagtaactctagcaaattaatccaacccaaagagggggttgtggaaaccccaactcgaagccatctggtagaagttccagagatgcagacttacaaccagtgggaaggagggcccagaccccaagactgagccctcagccgttgggaatctgacactatctctaggtagtgacagaaatgaattgaaagccaattagctggtgttcactgtagaactgattgcttatttggcagggagaaatactgtgcatttggacacagaagtcctctgtgttgattgttgtggtgtaagagcagaggaaagacaatttgggagtatttcctaaacacttcttatcttcctagacataaaactactgccaacttgtatactgcacctccagtatcattgaaattattctcgttttccattccttcattcattactaccctctccatatcatactgttccaacccttcctacaactagggaaagatttatctccctaataggctctttcttcctaaaccacaggctcaatcatttcactctaatagctcagaagtgtacaaattgctattcaataacaaataaagcacaaactattcaccatggcattcaaaagccaccatgaaaggctccagcctcccttctagccaaatcagactatgtgtaactctacaaatactaccttgttttcaccttgtcttttcacaatgcagtcatcattcaatttttgcttgccaaaacactatgttgagttacagggaaaagtatacttgcataaagccatttttaatcccctttaactgaatacattacctccctctgatatggttgctctgtatccctacccaaatctcatgttgaactgttactcccagtgttgggggagggacctggtggtaggtgattgaatcatgaaggcaaatttccccttgctgttctcgtgatagtaaattcccgcaagatctgatggtttaaaggtgtgtggcgcttccccactttactctctctgtctcctgtcaccatgtgaagatgttcttgcttcccctttgccttctgccatgattgtaagtcttctgaggcctctccagccgtgactcctgtacagcctgcagaactgtgagtcaattaaaccttttcttcataaattacccagtctcaggtagttctttgtagcagtatgagaacaaggtaatacagaaaactggtaccagagaagtgtggcactgctataaagatacctcaaaatgcagaagcaactttggaactgggtaataggcagaggctggaacagtttggagagatcagaagaagacagaagatgtgggaaagtttcagacttcctagagacttgctcaataattgtaaccaaaatgctgacagtgatatggacagtgaaaatccaggctgatgtggtctcagatggagatgaggaacttattgggaaccagagtaacggtcactcttgctatgatttagcagagactggcagcattgtgcccctgccctagagatgtatggaactttgaacttgagagatgatttagggtacctggcagaagaaatttctaagcagcaaagcattcaagatgtgacctggtatttttctaaaagtatatgctcatatgtatgaagagacggtgtgaaattggaacttatgtttaaaagggaagcagaacataaaagtttggaaattttgcagcctcaccatgctatagaaaagacaaacccattttggggggagaaattcaagccagtggtagaaatttacataaataacaagaagccaaatgctaatagccaagacaatggggaaaatgtctcccagggcatgtcagagatcttcatggctgcccctccagtacaggcctggaggtctaagagggaaaaatggtttcatgggccagtcccagagccctgctgctaactgcatccttgggacttggtgccccgcatcccagccactccagctccagctgtggctgtggctaaaaggggccaatgtacaactcgggccatggcttcagagggtgcaagccacaagccttggtggattccacatggtgttgggtctgtgggtgcacaaaaggcaagagaagaggtttgggagcctccaccttgatttcagaggatgtatggaaatgcctggatgtccaggcaggactccgctacagggccagagtcctcatggagaccctctactagggcagtgcagagggggaaatgtgggactggaaccctcacagagagtctccactagggcactgcctaatggagctgtgggaagagggccatcatcctccagaccccacaagggtggatccactgacagcttgcactgtgtgcctgcaaaagttgcaggcactcaatgccagcccattaaagcagctgtgggggctgtatcctgcagagccatggggcagagctgccaaaggccttaggaggccaccccttgcatcagcgtgccctggatgtgagacatggaatcaaaggatatgggagcttgaagatttcatgacttccctgttgggtttcagacttgcatggggcctgtagcccatttgttttggctatttctcccatttgcaacaggaacatttacccattccctgtactctcattgtaccttggaagaaactaacttgttttttattttacaggctcataggtggaatggacttgccttgtctcagataagactttggacttttcagttaatgctggaaggagttaagactttgggggactgttgggaaggcatgattgtgtcttgacatgtgagaataatatgagatttgggagaggctggggagaatgatatggtttggctctgtacccccatccaaatctcatgttgaattgtaattcccagtgttgggaggggacctggtaggaggtgattggatcatgggagcaaatttccccttgctgctctcgtgatagtgagttctcacaagatctgatggtttaaaagtgtgtggcacattccccttcacatgctgtttctcctgtcactatgtgaagatgtgcttgcttcccctttgccttctaccatgactgtaagattcctgaggcctcccccgccatgcttcctgtacagcctgcagaactgagtcaattaaacattgcttctttataaact

SEQ ID NO: 270 - DNA, 3470 bp, Homo sapiens
agatgcttgctgttccagactcggccctcccagggtcccctcgccacccgcagttccaatccaatacttttgttttttgccttttcagcctcctcgaggtggagtgccgcttaaccgggagcatccccactcctggctttctgagtgtgtcacaagccaccgagccgtggtcctcactccccgctcctccacctgccccacctcgcttccttacggattccgtcctgaaagcccccacccccggccatcccctccacacagtcctgaccatgactccactttgcttctgccctgggcactgtctgcgtctccccaaggctggtcccaccagggacacccccttgcgtggctgccaccgatcttgcctctgacgtgcctcccttctctcgcaggtacgccatcccaccagagcacggcaagcgcctggagcggctggccatcggcttcttccccgggagctcgcagggctgcgacgccttcctgcggcataagatgaccctcatctcgcccatcatcctgaagaagtacgggatccccttcagccggatcacgcaggaggccggggaattcatgatcacatttccctacggctaccacgccggcttcaatcacgggttcaactgcgcagaatctaccaacttcgccaccctgcggtggattgactacggcaaagtggccactcagtgcacgtgccggaaggacatggtcaagatctccatggacgtgttcgtgcgcatcctgcagcccgagcgctacgagctgtggaagcagggcaaggacctcacggtgctggaccacacgcggcccacggcgctcaccagccccgagctgagctcctggagtgcgtcccgggcctcgctgaaggccaagctcctccgcaggtctcaccggaaacggagccagcccaagaagccgaagcccgaagaccccaagttccctggggagggtacggctggggcagcgctcctagaggaggctgggggcagcgtgaaggaggaggctgggccggaggttgaccccgaggaggaggaggaggagccgcagccactgccacacggccgggaggccgagggcgcagaagaggacgggaggggcaagctgcggccaaccaaggccaagagcgagcggaagaagaagagcttcggcctgctgcccccacagctgccgcccccgcctgctcacttcccctcagaggaggcgctgtggctgccatccccactggagcccccggtgctgggcccaggccctgcagccatggaggagagccccctgccggcaccccttaatgtcgtgccccctgaggtgcccagtgaggagctagaggccaagcctcggcccatcatccccatgctgtacgtggtgccgcggccgggcaaggcagccttcaaccaggagcacgtgtcctgccagcaggcctttgagcactttgcccagaagggtccgacctggaaggaaccagtttcccccatggagctgacggggccagaggacggtgcagccagcagtggggcaggtcgcatggagaccaaagcccgggccggagaggggcaggcaccgtccacattttccaaattgaagatggagatcaagaagagccggcgccatcccttgggccggccgcccacccggtccccactgtcggtggtgaagcaggaggcctcaagtgacgaggaggcatcccctttctccggggaggaagatgtgagtgacccggacgccttgaggccgctgctgtctctgcagtggaagaacagggcggccagcttccaggccgagaggaagttcaacgcagcggctgcgcgcacggagccctactgcgccatctgcacgctcttctacccctactgccaggccctacagactgagaaggaggcacccatagcctccctcggagagggctgcccggccacattaccctccaaaagccgtcagaagacccgaccgctcatccctgagatgtgcttcacctctggcggtgagaacacggagccgctgcctgccaactcctacatcggcgacgacgggaccagccccctgatcgcctgcggcaagtgctgcctgcaggtccatgccagttgctatggcatccgtcccgagctggtcaatgaaggctggacgtgttcccggtgcgcggcccacgcctggactgcggagtgctgcctgtgcaacctgcgaggaggtgcgctgcagatgaccaccgataggaggtggatccacgtgatctgtgccatcgcagtccccgaggcgcgcttcctgaacgtgattgagcgccaccctgtggacatcagcgccatccccgagcagcggtggaagctgaaatgcgtgtactgccggaagcggatgaagaaggtgtcaggtgcctgtatccagtgctcctacgagcactgctccacgtccttccacgtgacctgcgcccacgccgcaggcgtgctcatggagccggacgactggccctatgtggtctccatcacctgcctcaagcacaagtcggggggtcacgctgtccaactcctgagggccgtgtccctaggccaggtggtcatcaccaagaaccgcaacgggctgtactaccgctgtcgcgtcatcggtgccgcctcgcagacctgctacgaagtgaacttcgacgatggctcctacagcgacaacctgtaccctgagagcatcacgagtagggactgtgtccagctgggacccccttccgagggggagctggtggagctccggtggactgacggcaacctctacaaggccaagttcatctcctccgtcaccagccacatctaccaggtggagtttgaggacgggtcccagctgacggtgaagcgtggggacatcttcaccctggaggaggagctgcccaagagggtccgctctcggctgtcactgagcacgggggcaccgcaggagcccgccttctcgggggaggaggccaaggccgccaagcgcccgcgtgtgggcaccccgcttgccacggaggactccgggcggagccaggactacgtggccttcgtggagagcctcctgcaggtgcagggccggcccggagcccccttctaggacagctggccgctcaggcgaccctcagcccggcggggaggccatggcatgccccgggcgttcgcttgctgtgaattcctgtcctcgtgtccccgacccccgagaggccacctccaagccgcgggtgccccctagggcgacaggagccagcgggacgccgcacgcggccccagactcagggagcagggccaggcgggctcgggggccggccaggggagcaccccactcaactactcagaattttaaaccatgtaagctctcttcttctcgaaaaggtgctactgcaatgccctactgagcaacctttgagattgtcacttctgtacataaaccacctttgtgaggctctttctataaatacatattgtttaaaaaaaagcaagaaaaaaaggaaaacaaaggaaaatatcccc

SEQ ID NO: 271 - DNA, 3532 bp, Homo sapiens
agccctgcgcttccccaggtgaaccgggcaggagcctgttgggaaggcagcgacccacatctgtgtgcacctttgtggatttcaggttccggacgcaggcgaccaagccagagccagcgctgtcatacgcagagcacctgccgagccatgtgacgtgctgctctctgccagccctgatcgccttcctttccagcaggacttgcgcttcacactggaccttgaggccccatggagatctgccattttgggcaggttctgctcacagtgccagtaacttcacctaggagaagagcgacaacttcaaggccgcatgacccatctgattgtcatcacacaggttcccgcaggagaatttccatggcgtttctcactctttgtttgcaaagaatttctttttttatcgttttctttttctttttctattttcttttttcttttttttttgagacagagtctctctctgttgcccaggctggagtgcagtggcatgacctcggctcactgcaacctcggcctcctgggttcaagcaattctcctgcctcagcctcccgagtagctgggattacgggcacacaccacaacgctcagctaatttttgtatttttagaaaagacagggttttaccatgttggccaggctggtctcgatcttctgagctcgtgatccacctgcctcggcctccaaagtgctgggattacaggcgtgagccaccacacccagcctaagaatttcttagaattaatatctgcacttggccccacatcctctgagtgataacttagaactgtcactttaattgttgagagaggatattcagagaatagtgggtgattttacaagcaaggatatgtttggggagcatgttcccagtgcattctcagggtctcgtgcattcttttagacattgaagacatcctgatctccagtggaagcagagccccagtcatacacttatccaccagggacgagttccaagacccccagggaatgcctgaaagctcggatagtgcttacctctatggatgttgtgcacaaatttatttttccccctttacaacttcatagattgaaggttcgttcttaccaaagatcttagcaaccttagcttatcatttcttttatttcctgattaagtggagaactttcaccttttcactaaaaaaaaaaaaaagtgctttacggctgcctttgccacgtgcacatgttcttttgggaccatccttaagtcaaataagggtgacctggatgcaagcactgtgatacagagaaagtccagctcaccaccaagatggctactgagccgctggtgggcgcggagtgtcgtgtctgcagcgtgaacatgccgggcagaggaataatgcatgtcagggataaggtggagaaggactgtgccaggcttcatcactctactcagaatggcacacagtttagaatttataaatgatttatttctggagtgatccactgcatattttcagacggtggttgatcgtggataactgaaagcaaaacctgactgaaaggggctgctgtgttcatgtcagcaatgctgatgccctcgaggccagaagagtaaccaccaatctggtacctgagcacctggctgtaagtccaccctccatttctggccagggccgaggaattctctcttcttctctttattttcctcttgatttgagaaggtcaactctgagcatgctctaaacacaaatcagcatctctacacttcttcggcaccaggtgttgctactgtctttctgattagaaaaaaagaaatatccaggaattctggaagacggtgattgatttgcagctatgctgcgatggagctaagaatcattagcacaacccgtgctggtgttcgacaagacgcccaatcaattcatccgatgacaggtgcgctgtgcctgcgaagcgcgaagccgcggagtgaggtgctgaccaggctccaccaggagcaaggaacaagactccccaggggctcctggtccacagaaggcagggacgcccacaaacctaccatgagtaaatagttccaatgtgaagaagactgaaaatgccacagaagtgtgagccgagtgttttgaaattctttctgctgaagggattgagacgaactcttccataaaggagcatgaccgagccatgagttataatatatacatgcatatagaaagaggatgtgaatacagttgcagaagggcgtcaaagccgaaaacacacagggaatgacttgaggaagctgaggaccaagagcagtgctagccatgccagtgaccgtggtcgctgagaagctggatgatggatgtttgagtgaccgtcaggaggatcagcatggtaccaggaggatcagcatgggaccaggaggatcaacatgggaccaggaggatcagcatgggaccaggaaacagcaggcgagtgaatgtgaactccactctcaacagggagatgacgtgggtctcggaaacctacagatctgagtgcttgctgtcaggtcatggcagggctgtgaccgcactgtggagggaacatctgtgtttttgtcctcctggaacctagtgcccctttcctggaggcagcatcctatttgacctgtgtggttccaaccccacctctctcctgtagcagtggcatgggacccggggctgggccattcgcagcattgccacaggcagcaatggtgattgatctaggagttgatcattgatcctaactgggtgctcaggccaaggggattgattcttggtattttttaatctcttttttccactggaattatagctaatatgatgaagcctagatatactgcgtatctggcttttagacagggaaaacctgcctagaaatgaaaatgaagtcaccacctgtgaaagcagaaacaagagcttgagagagactgagtcctggtgagaatttctgaaccccttgatccagcgatgcctgaagccagaactacttgtaaacttttcagtcatgcaatcctgtcacttctgtttgttcttaagtgcattttgtatggtttctgccgctgaccacggaaacgtccttcactaacagggaagcagagttaccccatttgagagcctcagaaggaagatggcattcatgcaaaggaagcatgcgtttgctctcacttcccgagagaaagcctgaaaatgaagccaatctcattttctttcagagatgagtctcttgatcagagaatgcctcagttccctgtatctgaattttagcaagcgagagaatgcatttaggacaagcaacagcgatggctccagtgtgttcttggctgctctgtttctaaatgaaggttcacctggaggcagcctttgctgcagagacacccagatctcaccttgttcttgttcttttcaatcattttagcaaaggctcagcctactgatctgatttagagatgagctatgaaagcagatatttagataatattttcccaactgcctggagcattaggttagaactagtgagataaaaatataatgaaaataatagaaagctttgaccctcagattt

SEQ ID NO: 272 - DNA, 4785 bp, Homo sapiens
agatggcgcactcggctgccgccgtgccgctgggcgcgctggagcagggctgccccatccgcgtggagcacgaccgccggcgccgccagttcactgtccggctcaacggatgtcatgaccgggccgtcctgctctatgagtacgtgggcaagcggatcgtggacctgcagcacaccgaggtcccagatgcctaccgtgggcgtggcatcgccaagcaccttgccaaggccgccctggacttcgtggtggaggaggacctgaaggcccatctcacctgctggtacatccagaagtacgtcaaggagaaccccctgccgcagtacctggagcgcctgcagccgtaaccctggcctgcaggcgggagcgctccctgccggactcttccacgtggcctttgcctggccccacgtgctctcaggaacctggtcccactgggaacagactcagagttatttttgtaaggacactcatctgtgccccacgtccagatccctggaggcagctgaccaatgatgggcggtgacccggtaaccgaggcggcaaggaggccaggtagtcccggcacctctcactctgcagagaccagcggcttcgtgggaggcctgtgggtcacacgtaggggctagagccagcctgcatcctgcccaccgggctccacttggagatcagcaggagggccagtgtgggacccctgctgccacctctcctgggcctgtgtcctttctggaaattaagaaggtgtgctccagagccaagaggagcaataagaaacctcgtgtgccagcttctgagggtggcagtgccagaccccacctgccagcggtgctgcccctttctcagacccccatgcccagtgcaggcagggccctggaaagggtcagctctccctgacagagaccagcagagtgaaggactgagcactggccaggctcaaccgtatgtgcggttcacacatgtgaacacacaggatgcagtctacaggcgggctggtggtgggtgccgggggtgttttcctctccttggtacccccattttttttttggcctctcgtgtaggttctgcaggaaaccaaggccccatccccatgggctgctatcccctatacccctgtctgccaggaggagatccaagggggcctgagcagctgcaggcccgccccttgctggccttggccacctgcctgagccttctccgaggagatgccttggggctggggtgggagtgaagctgactattctccaaaaaccaccctcagcatccaagaggaagaaacatcagccacaggggtttctgtgctgctgccagacatcagtgtcctcttttgtggctggctacagccggatacactttgctgcccatctggccctgggctcctccccaacccagccttcctgggtgcagcctgggagacacactagcatgctttggtgggaccagcctttccagggcatgctggcttcccctggggctgactcaggtcccgccctcttgtgtcagtgctaacaaggatcagattcgtccctgcccttctgtagagctggagggtgacctggagccaggggccctttagggctgagacatttgttagtcggagtgatgcatccctacccggcttcggggggagtcaggctgggctctgggcagtacagggagaggttcaccaggacccccatgccttcctcccccggtgcaggggcagtggtcaccatgctgactcctccctttgactccatgcacgggcgctggctggcctgtggttgcatttcccactcacctccttgctatccccagtcttggcaccgagaccccccacattccttctccagcaacagcagcccaggggccttcctgcctggacgcaggaccacggagacctgcatgtgcagggaggcctggcagcctgccgatgggggtccccgagccccggagtctcctcgaaacccctgctgtgggtcacagcatggaccagcaggggtcaccatcctgagtacccccgacatccctgccccttgacctgtggcagatgctcctgccctggcctccaggaagtcagctcttttgcaaagggcttgtgtgagaggtcggagaaagccctgggcctccagggagatgcagctggcaggaggtgggctgagctgctccggggctaggggtggcccattgctggcagaatttaaggaaagagcaggttgtaggcacagaggatgggcagccaggcctgggccttccccttactgtcccagggcagcagagctagggtcctcttttaccctccctaaggtcacccccttcccatctacacgtccctccccaagttcaagcacatagtcaatcatgaccactcaggagctcagtgagctggggccatgtccctgtggcctccagcccatccgcaggagggtcccttgcagtgacagcacaaagagtcccccacaggaagcccctgagggccagcatggaccttgagagccaggagggaatgggcctggtgccactctgttcccactcccacctaagattcctacccctgtgttctagcaggtgactcttgatctggccagcccacaacaaatacttgaactaggcagcatggggtggtggaggcctgcagaggccctgggcccaggaactgagactagggctttctcatgaggcctgatcaagctcccgcaggtatgacctggcctcctcgcctcgggctgccttaaagcaccgctaacccacgccaaggggctaggcagggcttcgcggggcctggcccagggtctccagcagagcaataacatcttcccaggttgggttgccacagacaccctgccctggagcccccagcccatcccatctggtgctaccctgtctgcctggcagcctagcctcacccctcctgtccggtcatctgggggtccttggtaaggatgcagccacatggggccggtttatgcacctgggcgagaacctgactggggcaggggatgctcaggggcctgcaggtctcccacagagctgcttttctgcccgcctcaccctgtgggtttgtatttcttgccgggtcaaaataggcagtgactcgtgccttccctcctcagggccggcggcagggtgtggacccagctggccgctggaccgtccccttcctcattctccaagctcatcaacaggtctcagaggaacatttccataaaaggtgtggcctggcatgcagtgctgtctgcacgctgtcgcttcccccacagcaacctgccggtcagccttaactggtgtggaggtcgaggtggggagggggaggcgggcttccctccctggtgtctggcctctttttgctcagccctcagcacagccttcagcgtggagagcgagaccctgcgtgtcactggggcttggctgaggtctccctgcaggataacagtgacttcaggaacccagaccccagtctgggcggctctaccttcccggctggcccagcccccacaccacagttccctgccacctccaggcacaaaagcctctgaggccacagcccagctatgaagctgagtggctttgtgcggtctcctagggaaggggcagtgatgccatgcatgagatccgctgtgccataagaagttgcttcctttagaatttctggtccaatgcagggaggtgaggcccagcctcatgataacacatgcccatcaagggaaagctgtggctaatgcttccaaaacaagtgaaaatcttgcaccaggcccagggccatatctcattccgccccagctactgagggaggggacagactgctggaggacaatttctcctagttaccactaggggttacatggctactcagaatgaaagataaattgccaggcctgttgcaatcttttttttgagatgggagtcttgctctgtcgcccaggctggagtgcagaggtgcgatctcagctcactgcaacctccacctcccgggtcaagcaattctcctgcctcagcttcccgagtagctggaattacaggtgcccaccaccatgcctggctaatttttgtatttttagtagagacggggtttcaccatgttggccaggctggtcttgaacacctgacctcaaatgatccgcccacctcggcctcccaaagtgttgggattacaggcgtgagccacctcaccaggccccgttgcaatcttactccacttcgttttcacagcagtcccgggacatgcccattattaggcctatttgatagatgatactgaggctcagagtcgggggtcacaagccaaagccacaccgctagaagggctcaggacccagcccagctcccgtcctcttggtggcatcaagcttgtgtgatatgaggtcttatgtctgctcatgacagccttaaaagcaataaacagatacaacttccagcaacttcccactcagctgcaaggctgcggggggtcctgcctcgagccataaggtgagcagctagccagtgccgggccagtgtggagaaggctgaattgcctgtgaagctggggttgcaggcaggaatattcatggagcccctgaccatgtactcacactgctcttcctcagttcagggttcttggatttgctcaagtccacccaaatatccctttacgattctcagggtcccactccttccagatccaatgccctaaactttacataagagttccggcaaggctgtgacttcaacttgtgttgtaactgcaacctgcagaatcaaatttagggttatgttttcagttgtatcagtcttacggctacaagatattaaagagattcttttctggttatc

SEQ ID NO: 273 - DNA, 5310 bp, Homo sapiens
tagataagcagtcacctttattattgttaaacgtcacccagaaaacccttaactcttagacagcggctctcattaagcaaaaggggaggcacatgaagctccaggcagggccgggagggaaccgtgaagccaaaggctctgggagcccccaggcacctgcgtttgcattttcatcctggaggagaccaggcctctggggctgctccccggggtgcagagaggaggggtctttcttggtgtgtaacatactcattgattcagtcacctgacctttgactccatgtattttgttgagtctggatgtgtggtgtgctctgcccagcagctgggatccacatgagcacagacatggtccccccgcgtccttggtgagtgcagaacctctgccgtgagcctcgattctgggaggttctgggaggttctgtggacaacaggcaattcagggcacagcccctgctcttaaggatagccggtcttaggagaagcttttaatatgtgaagtgagcagggagtaactgagctgctaagtaagcagctttatgtcagatgaagtggtaggcaggatccactcctcaacgtaaattctgagttaagaaaaaaattctccaaatattcaagtctcagggccatcatgctgtacattgccgcagttctgggatgtggccacaagagggcggagatgaggctccccggggagcagtgtctgaacccagcactgcagtcaggacggccccgccccacctggccagcacgtcacctgcctctgaatcgcctgggatgcacgcccagacccctatctgcgctccgccacagcctcactgagtcagaatgtccaagggcgaactaggtgttgctagttgtgatgattttgcagacaccgtgctcacctgggaaacacggattcatcccatctggaaaactaattactccactaccagcttaaggactgttagacacaccgggagagctgagtgctggctcagagttgatgggagggcccagatgagtgaggggccccatttagcaaatattgtccttgcaatatatgcaaggcttacaaccagtcactcaaagatgcttgcaaggccagagcttaccaagaccaccctgaggaacaggaagctgcatttagatctgcacatttgctgtgtgcaaatataaccagtgtactatacacatgtgtttcctgaaataagttcagtattttccctgaacttttttgtaagaagcttttaaaaattaatttctgtagagttcaagggaagcttctatgtatcaaagcaaatttcaaatcatatggttgtaattaaattttactgcataaaaagttcataactggcctactatggccgtatggctgaattagttgacttggagcagttccaatagattaataaatcagctcccccagaaatgagggggtctagaggcaggcagatggagaggacagggacttcatagcatttaacatcattttaccatctttccttcctgttctttttggtgctgttggaaatcagtagtgagaggaaaacactcaaatctggaagtctagcgctgtcggtaggaactgggtagaaaaaactatgcatgtccccccatcactcggaaactacatcagaacatcataggagcatcctgtttccatgtgcattagtttccacgaacatacatgtgaatgttttcccacccgtagtgttgctgtggagttgtgagatgtcaaagtggaggcaagagtatctgccttttgcagtaggctctgttcttttcctgtcctgagagaggaggtcagtctaaccctcaccttgtgagttcagccttatactgacctgagcccagggtggatcagatgctgagatcatgtgactccaagttgcaagacacgtaatagagagaagcgtgactgttgcatccatgcaggctctaatcctggctccttcgggctggctgagctttggctcctgggctataaagagaggatgataggaacacctactccaggaggtgctgtgagcacaaaagagaaaacggggaaaaacgggtttcctgcatggtcagtgctcaacaaattgtagtttcaatgataaaaagtaaaaccaatacacccaccattttcaatgtcaaaagggggcatcaagaaagttaagattgtacctcggtaggttaccttgccagaggctgcagggaacttactccatttcagcacagaagcactttgtttcataggacagtggttctaccactttccaggaagtccaaaggctgatctcttggaaatgcagcaaaaggtgaggtgagtgccaacttctgggctactccagagggcagctccaatgccagagatgttcaagttaagccaggatcaaacaggaaaaacccacgctcccgagggagaggctggccctcgaggggcagggccctgcacctgtcagtccccaggccggcaggaggcctccacggtatgtgagaaagctgcctgtcttgggagggaaatctcactagatggttcctgaagcggcttcgcaggctagcatttcataaacgttttcacttgtgaaaacaaaaatcccttgagtgagttgtgtaagcacaacatagaggcttgtttataatgctacgtatgtacttggaaaaccccccaagaagtcagaactgtcaccttggtctgttagctgcgttacttggaaggattcttggcgtctgcgctctggttatttgtgttactgggcagtgtggaagacgtagaattagatgaggacagtgttggttcgttgctgatcggccacggtaaagagcatatttcttttctttcttgctttctgggggcttttcgccaaaattgatcatttcataaaagaggggaaacccaaggagagagactgaactttgaataaaaatttgaatgcaaaaaaagtgcagttctgctttgtcgatctaagtgacattctgagtgaccaacgcattcctctttctagagggatggccacgcctggctacctccacactgtgggccacagcacacctgtgcaccatctcaattagctgccaactctcttttaaacatcgaaattatttgtcccccaaacgtgtaaatgcatggttttaagaccccttcaagtcaaagtttgcagacaaagctctctgtgcatttgatttgtctggtgtggcagatgagatggcacataggagggacgtccccagggatggacacgtggctttgctctttgctggcgcgtgtagcaaggggtgtgctagggtcccgccgaaaaagaagttgctcctgttgtcgctggcagttcccctcggctgccctggcacctctagctgacgagaaaaagtgctcattcaaagcaaagcaatggagcggctgcactttcacccacagaagtgcagcgttgttttgcagagcagtggttatgccaggcaccactccctggggcctgggaatccgattccagttctctctcacagaactggaaattcaattagcatttgctgagggaggtcgggagaaatggaatgaaaagaccagctctccggggtgccatttctattagcagatgagagagacacccaatggctcagcatccacccgggaccacagaagaggggatgctggtgtgggaggaccctgcggcactctcgtcctaactcctctctcttccttttcagggaggaagagatagtcgctctggatcacccatggctagacgctgaaaacccacctggttccggaatcctgtcctcagcttcttaatataactgccttaaaactttaatcccacttgcccctgttacctaattagagcagatgacccctcccctaatgcctgcggagttgtgcacgtagtagggtcaggccacggcagcctaccggcaatttccggccaacagttaaatgagaacatgaaaacagaaaacggttaaaactgtccctttctgtgtgaagatcacgttccttcccccgcaatgtgcccccagacgcacgtgggtcttcagggggccaggtgcacagacgtccctccacgttcacccctccacccttggactttcttttcgccgtggctgcggcacccttgcgcttttgctggtcactgccatggaggcacacagctgcagagacagagaggacgtgggcggcagagaggactgttgacatccaagcttcctttgtttttttttcctgtccttctctcacctcctaaagtagacttcatttttcctaacaggattagacagtcaaggagtggcttactacatgtgggagcttttggtatgtgacatgcgggctgggcagctgttagagtccaacgtggggcagcacagagagggggccacctccccaggccgtggctgcccacacaccccaattagctgaattcgcgtgtggcagagggaggaaaaggaggcaaacgtgggctgggcaatggcctcacataggaaacagggtcttcctggagatttggtgatggagatgtcaagcaggtggcctctggacgtcaccgttgccctgcatggtggccccagagcagcctctatgaacaacctcgtttccaaaccacagcccacagccggagagtccaggaagacttgcgcactcagagcagaagggtaggagtcctctagacagcctcgcagccgcgccagacgcccatagacactggctgtgaccgggcgtgctggcagcggcagtgcacagtggccagcactaaccctccctgagaagataaccggctcattcacttcctcccagaagacgcgtggtagcgagtaggcacaggcgtgcacctgctcccgaattactcaccgagacacacgggctgagcagacggccccgtggatggagacaaagagctcttctgaccatatccttcttaacacccgctggcatctcctttcgcgcctccctccctaacctactgacccaccttttgattttagcgcacctgtgattgataggccttccaaagagtcccacgctggcatcaccctccccgaggacggagatgaggagtagtcagcgtgatgccaaaacgcgtcttcttaatccaattctaattctgaatgtttcgtgtgggcttaataccatgtctattaatatatagcctcgatgatgagagagttacaaagaacaaaactccagacacaaacctccaaatttttcagcagaagcactctgcgtcgctgagctgaggtcggctctgcgatccatacgtggccgcacccacacagcacgtgctgtgacgatggctgaacggaaagtgtacactgttcctgaatattgaaataaaacaataaacttttaatggt

SEQ ID NO: 274 - DNA, 4108 bp, Homo sapiens
ctgatgcgtgtgagaggatgccacctgccagacactctgtccccaggctggatgtggcaggggtggggggagagttgaggtgccatggtgaggactcaggtgcccactggtggtcatgcctggggagcacatagagggccacccacaggaaggagacgatccagcgcccactgggttggcagctagcagtgatcacgaggctcagggtgtgtctcctggcccccacctgtcagctgggaaggtgcacctggggcagcttccactgcactcatcacctgccccgctctgcgtggggccggccacacctgccaaagagcaacgcccgcatttgccacaggcccatttggctcccacctcaagcccagcagccaccggggcaggcaggtggtgggcattcttgtttaggcaaggagcctgtggcccaggacgatggcttgacttgcactggtgcctggtcggtcggtcggtcggttggaaccatgccccagttttcccacagacccggggctgaagggttccagtccctgtgctacgcagggatgagacacagactcttgactctctgcaagcagcagcaggggtggggtccactctaagaacttgaacactggcccttgctggcgggagggaatgcttggtacagtccccgaatccctcttgtaacaggtgtagagaaagcctagataactaactagactgaagcagctgctggtgggctggcccctccaagctcaggtggacacagcggttattcctgctgctgggaggagcagttggcctccgcgcgggtgttgctgggaggctgcatgttggcaggaggctttgctgcatctacatgctgagccccactcagccatccgcccctccctgccctgcatccatcaatcactcatagcgattggctccctggcccccgggccgcacacgcacacggacctgtggatggtgctgagccctgccatcgggcgccccctccactgggcggagctgccgtcttgacgcggtggcagctgccctatgaggatggagtgccggaagccttcgctgcatgtcgttgttatttctgaggacgatgatgagaactcctgggcagtgaattctgggacgaacagtcttcatccggataaggatgttcaggtggctcagggtgcagggttttgagttccccaggggagctgtgctgcttttttagctgcagaggacttggtcaggagttctcagtcacgattggggacccttaggtcctgtgcgcatcactaactctgcccttttccctttgcagagggtctcaacgcagactacgtgaagggagagaacctggaagccgtggtatgtgaggaaccccaagtgaaatactccacgttgcacacgcagtctgcagagccgccgccgccgcccgaaccagcccggatctgagggccctgtccagctgcaggcatgcacaatggtgccaccgcttgtcacccggctccccccaccccttcatttggacccgcagctgctgtgctgctctgtgccatcggctccttgttggtctgagtttcccggatgagctctgggtgtttgtgagtttggtttctctgccctgccccaagcgtgctgagacttggtgccgaaattcaagagccagctctgatagaaagccagcaccagcctcgggagctgctgagccaccaactcccaaagccagcctgcctccagctttactgagcacaggatgcgggggccaagatgatgctgaggcctgatgacatttatgcttaggggacaagagtttgaactcaagggactgtgacccctgcacactggagtggctcattgtggcaggtttctgccaatagacagcccctgacagtggcctcaaggagctgcaggtggggggctcagcctgcacccacttggagcccctgcaaggagcgaaccggtcagcaccaagtaacaccacacacacgcagcacccaggatgatggtttcacttcagtcttccccatcccaggttttatgttgctgggcttccggagagccggtccaagcggaggctttcagtgatttaagtacaaacatgcatctcgtgatagtcctgccttgagagcttaggaatcttccggataagtatgaagcaattcgtaggcctgtttcccatctgattccatagggggctgggtgtggccttcgggttgacatgagaaaggtctttagcaatcatttctgcaccggagatgagttttatcctgtgttggggagaggtgctcaccctccaccctgtgtccctgttttggtagcaagagtgaccgatgtcaagaacgagcatcaaagccagaatcctgcttgtttgcttaaaaatgtaattgggggcggcgggggaggagaggggaaagagacattcgcttggtttagtgaaacgcaggtgactttgtagctctgtggtcagcctacttgtctgctctgagggagagtgcgtggggagccatgctcaccgtggcaaacacaggaaccccatgactcgcccctcacctggcgtggagctgcctggtttgggctggagcagagctggtttcctggaatgttcctttggcccacatatggttctgtcccggtgagctctgttgtcagaggctcacgggacagaaccacatgctagggtctagggcccctgtctactgatagtcagtttgctgtgtcagaaagcacttctggaagcagatatgagtcaccagacaggcaggatcttacaaaactcacgggcctctttggtctgcatgatggccccatgcgtttcataggctgtccactgagcgggattgtctgctgagtgggatgagccaattccagtttcttaaggaaaccactggaatctgcagcccccacatgcatctgtctaacgcatgcctcgtgttcgttttgcaaacatgcctgtggtggagggtggtcagttgtagccctgtgcgtctcaaggctgccttgtgaggccattcccagtgcgtgcccttgagctccttaccaccccttttcctgctcggccctttaatccctgacagacctggactgtgtggctgaagggggacctgcagcactgcagaaatgcctctgcgtggtgccatgaaggaaagaaaccttggcctggtctcgagaagcttcccatgcttcaggaagttagtaagggtggggtggcttgcaggattggcctgtttccagggcctcccacactcattggccagattgtgaactttgtcaggcttgtccctccctgataccaagtatgtcgagaaccgatggccccaccctctggctggtgctgggccggaggtggctatggaggattttggcatgcgtggcctgtcgccacctggacagcgtgacctcaggggttgtccactttacctttatggtgaggcctgtcggatggctaagtccttgaaaccctagagctgtgacgtagaatatgtgctgtctgtgagaccgtgttcccaggagcactgactgcagttgagagagacccattttgctctcccttaccgccccccgccccgggtgctttctgcacaaagcctagagcctggcactcaagcccaccggtggcagctcctagtgactggacatgcctggaagacccctcagccttctgtttgcagaacgttcatttcaggagcttctccttcccacagacatcttacacttgctcgacactgccacctgcagaagcctggcgggctctggtcaccatgtgtctatctgaaggttgcactggccagcatgggcctgtcccaagcgagaggggagacacagtggactgaaaggactggttgaaagtggccaatctctatcagcttaatttggcagagaaaatttgtaacaactctgagcacatgctgggtgaagtcacagctcaaggaaagataaagctgggcggaaggaggtgtgcgtggcttctggggtgggacccagaggggaggctctgggacaggggctggggttcagtgccagggccctgaggaagaaatggggactgatctcaaaattccagaattccctgtacatctgttcacgtgcttgtgtccaggtgtgacttgtaaactgtctagtgtttgcattaaataaaatggcaccg

SEQ ID NO: 275 - DNA, 3874 bp, Homo sapiens
ttactgtagatgtgagcgaggtccctcccgtcactgtagatgccagctaggtccctccctttactgtagatgccagcgtgacccttcccttcactatagatgccagcgaggtccctcccttcactgtagatgccagcgaggtccttctctctgctcagacatctttgactccctcttatgcacatcccactgatgactctcagcacatcccatcaccttcacctttgaggtttatccaggatctgacaagtcccagcatcccagctgctgccccctggcctggcctcctgctccccaaccccaggcatcttccccttctccacatgcggttggcgcaagccaggggggaatcagagcccccctacagactcgaaggtgggcttgtttctgtgacctgcaagcccccttcccacctgacttccatcctctctcttcccctcgcttgctgtgctgtggccatgctggggtcctgcttgcacttcccacggatgattctcagcacatcccatcagtttcacttttgaagctgccctcctgggctgctcccaccataggctgcgtcatgcattccctcttctcagatggccgtgccttgcgcctcactcctgcgtctcctccagggctcatctcagatgtcccctccttgccagggctctccctggccacctggccacacgctcactcgcactgctgtttcttagtgtttctcagtgtgtgtagcttatttcttgttgtctgtggtccccaccatagactgtgtggttatgtttgtcttcattcagagcaccatgcccagagtccacgaggccctggcacagaggcagccaccaggatgtggttgtttaacaaatagatgggagtgtgtctcttcgatggcttcttgtccgtggcagttctggggtcccccccaccgccatttttttgctcccttgtctgcttccataagactaatcagtctgcaggaaacagaaagcaggctgtagtgcctcgtcccccaggagtcctcaccccatgggcagcttagagggaagcagcagacagagccccgccccaggctcccgtcggctcctggccatcctgggcttatgtggcctttgtctccaccctcacagcctccagatggcttctgtgcctcccagcaggaaggaagacaaggacagagtgcaaagggcagaggccagctgccttgaccttatgaagctcaccctggcatgtgttcccagggccttgcccagttcactctccctggctcattagagtggccggggagaacagtggctgcctcagccagcagggaccctggctgagagccctgtgactggccacgtggccaccctgatccacctcatgaggaagaagggaggggatggtactggggagggagccgcggtgtgtgttctactcactaggcctcgttgccacctctgcacaggcgcttggagcccttgtagaagctggtgctgctgggacaacagagggatagaatcctctttggccagatgccaaatgctgtttgttggtctccttgtaaaaacacccagaaatcatgggggctttccatgtgtgagctgcacctcttactctctgcagcacccaggtgtctcccgggcaccatgctgctccctctgggcacccctcatgcccccccacggaatggggacctggctgagcatgactgggccatgggagcagcctgaccctgggctcccaggcctggccatggtggctgcaggctcgcctcggctccatgggccttcctaatctggttagcgggatgaaggtatcgggtagggtctgtgtggggtggagaggaggagccaggccctggatccagaaccctcttctgcccttgccagctcagcagcccacagaggggtcttcccgctcacagccacagagggttatcagggttatagagaagagtcacctacccagtgcctgtcagggcatcaggtacatcccgggtgctgccacctcacacctgcaatgtccacacggtgaaccgggttgaacagaatgcagcctcgagaggctggagaaaatacaccaagcactgacacagatgaccctgggatgtgggactataggcaatcttcaattttttcttcatacttttcttggtttctaaatcttattcagtgagcacgtgttcctttttttaattagagaaaacttgacagtagcccctttttgtgtttcacagaggagctaacattccttctgtacctgtagttcatgcgggagatgacaggggctggcacatgacagtggagcagaaatttggcctgttttctgctgagataaaggaagcagaccccctggctgcctcggaagcaagtcaacccaaaccctgtccccccgaagtgacccctcactacatctggatcgacttcctggtgcagcggtttgagatcgccaagtactgcagctctgaccaagtggagatcttctccagcctgctgcagcgctccatgtccctgaacatcggcagggccaaggggagcatgaaccggcacgtggcggccatcgggccccgcttcaagctgctgaccctggggctgtccctcctgcatgccgatgtggttccaaatgcaaccatccgcaatgtgcttcgcgagaagatctactccactgcctttgactacttcagctgtcccccaaagtttcctactcaaggagagaagcggctgcgtgaagacataagcatcatgattaaattttggaccgccatgttctcagataagaagtacctgaccgccagccagcttgttcccccagctgacatcggcgacctcctggagcagttagtagaggagaacacaggctccttgtcgggcccagcgaaggacttttaccagcgggagtttgatttctttaacaagatcaccaacgtgtcggctatcatcaagccctaccctaaaggcgacgagagaaagaaggcttgtctgtcggccctgtctgaagtgacggtgcagccaggctgctccctgcccagcaaccccgaagccattgtgctggacgtcgactacaagtctgggaccccgatgcagagtgctgcaaaagccccatatctggccaagttcaaggtgaagcgatgtggagttagtgaacttgaaaaagaaggtctgcggtgccgctcagactctgaggatgagtgcagcacgcaggaggccgacggccagaagatctcctggcaggcagccatcttcaaactgggagacgactgccggcaggacatgctggccctgcagatcatcgacctcttcaagaacatcttccagctggtcggcctggacctctttgtttttccctaccgcgtggtggccactgcccctgggtgcggggtgatcgagtgcatccccgactgcacctcccgggaccagctgggccgccagacagacttcggcatgtacgactacttcacacgccagtacggggatgagtccactctggccttccagcaggtagccagggtggccacaggccggggaaagtcgtgtgtgctccaccccaccccagccacccatacccagcctctacccacaccctgctctcctcagtcatcctttgttaagggttaaaaccagggcacctgggctgggcacggtggctcacgcctgtaatcctagcactttgggaggccgaggcgggcagatcacgaggtcaagagatcaaaaccatcctggccaaaatggtgaaccctgtctctactaaaaatacaaaaattagctgggcatagtggcacgcgcctgcagtcccagctactcaggaagctgaggcaggagaatcgcttgaacccaggaggcagaggttgctgtgagccgagattgcaccactgcactccagcctgggcaacagagtgagactccatctg

SEQ ID NO: 276 - DNA, 3786 bp, Homo sapiens
acaatttggttaaaatgttcaaattgccagctctgactcttgccctggagaggagggcagcggcctgctgttgactccctgatggctggagcagtggaagccactaagaatggctaaagatcacccaagctacgggcaagggcaatctcgtgggtccgcagcccaaggcagagagagacatggagtttaccacctccccggcagctcctgccactgcccagcgtcttgatgaaacagtatggaaacacggctgtcatttatccaggtgtctgcctagcaggtacaggaatgtgggcttggggactggagcccccaccttaaaaagaggtgaggcaatggaaaggaccagaggggccctgattcagcaatttacagtgccttggagctcgccagcagcacctcatttgcatctggattccagccctggcatctgcctcgccccgctctgctcacaaagtaaccccactgtctttccacaaagccaggcactccttagcctaacggcagatcctagccctgagtgcccagaaattctatgtaaagaatgagaaccaaaccaggctcccactaatttagaattcaaacaaccccaaagctaaaataaccccaatttttttctatattgcatagtcatcagtgagctttataattttgtcctagaaacccccccagagtccctaagtgcctttggcctatcaaagtaagactcatttatgttcagtctagtttgtgttaaatgtgttttgtgctatcctgattcctttaaaaatggtaattcattcatgagaaatacgataactattaaccagactgccccattcctgaaccattttgcataattgaacatgtattctatcagcctcttcctttcccccagggatagagaccgacctttctttacataacccctgggcacttgcccaagccagcaggagaattcaggtttggtccttttttttttttttttttttaatctcaggtcaaccaatcgagtggcggggtgaagtcgtccaaagtctttgaggtctaagagtcccagattcaagtttacatactggctgtgtggccttggggaagatcctttcatctctttggactggcttcctcgtaatatttcatagggttattgtgaagagtaagatagcctatctcacatgcctaggccgtgtcttacacataggagtactcagtgaccaaatcttgccctctgcatctctcactgccaccttgggaaaagctaagaaggtggttcttgccgcagaacgctgactcctcctattttggtttggggatagaactttaaaagggctagtaaacaaaggtcccttttcagcttaagtcagaattataggcagcagggaacatggaactcctgcttgcccaagttggaactctaggatctggaggcagggctgcagctccagggaccacgccgagtgtggggcatcagtaggagaggagccacactgggctgtgttttctccaatggtgttgaaacgagagtgcacttgaactgacggaggcagtggaggcaggaggagtacgggaaaggtggccccaaggctttgggagaaagaaaagagaaggtgaatggagctgtgagatgaggtcccctcttccctgttcagtgctgtgatcctgctccatcagggggaagaggcctcttcacatctgggatagctggaggcctccagagccagaggcctgatgaagactctgagttatgttattgtaccaagaaaggggcttttccccttgggccatcctaaaacaggtcttcccagcctctccttcctgagcctccatttcttgttagtagatgatggcatggtcaaagctgaaaattctcacaggcctcagggagccatcattaggggaaagggttcagatctgggagtatttgacagggaaagcgcctcctcctcagaaggaatctttttaggaatcactcgcctaagagagcccctaccctagacaagttgtactcaccagacctccagtctccaagccaatgtggttcacggactgcctgcttcagagccttctggggaaggactgaaaatgcagaattactgggttgtacccaaaagccagcgattcaaggtttctaagaggaagggcccaggaacctgcatcagattcttatgcacgcttgagtccgagactcactgctctcagcatccctttcctcggagctttaaaagcttccagagtctccttcctcttagcattttgagtatcttctaagtaagccaaggaaggtttttacttaacaatgtttggcttttggggagtgctctgacgcagctttgtgggcctccagaaccaaaggcgtgcgtgcttaatggtaggagtgtcatttgtccctaaccttattcctcggtccctgcagccccaccagctactggaagtcccttgcccctgatcggtcagatgatgagcacgaccctctcgacaacacctccagaccgcgatactcccacagttatctgagtgacagcgacacagaggccaagctgacggagactaacgcatagcccaggggagtggttggcagccctctcaccccagggcctgtggctgcctgggcacctctcccaggaagtggtggggcaccggtctcccccacccgactgctgatctgcatgggaaacaccctgaccttcttctgtcaggggcactttccaggctatgggtgtctgatgtctccacgtggaagaggtgggggaaagaggagtttctgaagagaactttttgctcctctgtctcaaaatgccagactcttggcttctaccctgtgtcaccgtgggcagtggcaggtggcctggcactgcatggagccagcacgttgacctccctctcagctccctgctcagggacggtggacaggttgcctactgggacactctaggttgctgggtccatggggaggattgggggaggagaagcagtgccttccctctcgtgtggggtgggggctctctcttcttggtgcctgctgtctttctactttttaatttaaatacccaacctctccatcacagctgcatccctgagagtgggagggggctgtagtggtagctggggctcccaagaacgactcgggaatgtcatctccatcttcacccttcagagagcagtcctttctctgtgcagctggagacgctggtgaggagagccgggtccaggttcttaagaatgaggtgcggaggggctctccggtgctgctgggctgggttgagcaagcctacgcagacaagtgtgtgtgtggaccatccgcacctccagcccccaccccaccctctttgtctcagcgtgttatgtgcaatgacctatttaaggtaaacccattccaactacagcagttcagggctgatccaagcactgcctccctcctgctctgtccaggtggtctggaccataaactcaacttgagagggaaggcttggggttgaggacttgtgatcagaaaaactgaagatggaagttttggccggtgctcattagacatgagtcctcactctgtgtcctgagcccgtgtcattcttccaacctccctgcccccacacacttatcccagacacaacaccatgtggtctggaggtcccagcccccaccctaaaaaggttatccctgagaactccaccagacttgggagcccaagtgcagtgcctggtgctgctcccatctgccgccccccttctctcctgcaattggtttgtactcactgggctgtgctctcccctgtttacccgatgtatggaaataaaggcccttttcctcctg

SEQ ID NO: 277 - DNA, 3210 bp, Homo sapiens
aaaggcggagctcccctggatggcgtcaggtttgcgggcacagagcacagcccaccaggcctgaaggtccgctcaggggccatagtggttgagttctctgtggaactgggatggggtgaacagccagttcccgtcctttggccgcctggccaactgccagacttaaccgctgccgcccaggcatctgtctctagcgttgccactacttgggtagaagtgggggtcggggtggggcgtggagcatcaccggttgccaggccagcactgtctttgcaacacattcagatggcggcgggcagctcgggcgccagcatgggctggcggggctcccctggacggccctcaggtcgctcacagcatcgtcccaggacttcctcggcctgtgccaggtgggcaaggtacgggggtagcttccaaggcttctatcccaactctacctatttctacctattttctcttgagttattttgcctttatctcagttttatttgcaaaaatagtatacgcaaaatacatcgagtgaatgcacatcaggcatatagaagatctggcagaaacatgttttctcctgcccatttccagtcagtatttgaacacagaggcttccacggttttgattctttccacaaaaggttagttttgtctgttttcaccatttatgtaagtgaaactataaattatataatttttatgttcactcactaaacatgcttgtgacacatcattttgctcctattgattattcattattttgtaatattcaattttatgactataccacaggtttgaggcctttgcttgttttgtttttaatccattccactattgatagacacaaaagcagtttctgatttgaggctatcatgaataaacctgctacgaacaaatcagatatacatatttttttctgtaataatattttcacctttcttgagtttaagtacataagagtggattttctgggttataaaataagtatatatttggcattgtatgaaatggggagacattttcctaagtggttatgccatcttaaactacaatgaaaatgagagaatcagttccactttctaaccaatacttgacgctgtcagttgttttagtattatccattcttatgggatataactgctgagtagctgtctgccttctcccataacacagaaaattgagggcccagaggacagttttattttcatatttgacatcttctattattttttatagaaggatgatttcagtagtaaaattttctttcaattttctaggttgtctctgaatcttactggggttccttgtcctaaaccacattcaggaatgctgtccctcattgggaccacaacacccagataatttttttttttttgtagaaagaggagccttgctatgttgcccaagctggcctcaaactcccaccctcaagagatctgcccatctcgacaaccagagtaactggttctacaggaaaataccactatcccatgataattatattttattaatttttatttgcatagacaggaggtcttgctatgttgcccagggtggtctcagactcctggacttgaacaattctcccatctgtgccatctgtgcctcccaaagtgctcccaaggtgctgacgccacaggcataagccactgcacctggcccgacttaagatgtctttaatctagcatcccatacttcatataatcaggaaaagcagtagtgttttttttttttaattacttagtatctcaacaagaatcaaccatctctcaccattgtcaggaccctggtcagaaccactatcatctcctacctggatgttgccacagcttggcctccgtgcttctacccaaatcttcccacaatctttctcaactcagccaccatgggatgcttttaaatcaatagacagttcgtgtcacctctctgctcagaacccttccgcatctcccatctcagacacagcataaaagccaaagccccagcaatagcctcccagggcttgcacaatctgtactgatctgagtcccacaactccctggcctcctcccctaccttctctccccctctctgctcgacaatcctctttcctgagcttcagacacaccacggagttccctcttagcatctttattctgttgtttctgcctataatgctcttccctcagtaccttggccagctccttcccctccttcaagtctttgctcaattttcacttaggaggccaaccctgaccactctatttaatattgctatgtgtccccattcctgccatgctcactcatttctttttactttttttttaagatataatctcgctgtgtcactcaggctggggcaccatggcacgatcacaacacactgagacctggaactcctaggtcaagaaatcgtcctgcctcagcgcctctagtggctgggactacaggtgcatgccactacacccgctattttttttttcccatgtagacagggtatcactttgttgcccaggcttatcttgaactcctgggccagagcaaccatcctgcctcggcctcctggatagctggaattatgggtgtgggccactacccctggcttcatgttcatttcttcttgctgctgttacaaactaccctacgttgagtggcttaatacaccacaaatctactacctaacaggtctgggggccagaagtccaaaataggtctattaaggctaaagtcaaggtgtcagcaggactgcatcccttctggaggttccagagagaaggtgttcccttgcctttcccagttccaaaagccacccctattctttgcctcatggcccctaaatgcatcttcaaagccagaagcaaagcatattcaaatctccctctgtgacctgtgcttccatcatcaaatctccttcaattctgactctcttacctccctctttcacttataaagacctcttgtgattgctggacacagaggccggtgctcacaaccatggtcccagcagtttaggaggtcgaggcaggagaaatgcttgaggccagaagttcgggaccagcctgggaaacacagtgagacccacccccctcaattaaacaacaaaaagaaataagagaaaattagctgggcgtggtggtatgcatctgtagtttcggctacttgagaggctgtggtgaaaggattgctttagcaccagagttcaagaccagcctcggcaatataacaagatcccatctctac

SEQ ID NO: 278 - DNA, 3120 bp, Homo sapiens
aggcaccaagttatttactcggtagagatcatgaatttgcccgggtgtctgtgctgccccgcaccctgcttgttaaccacgttaagacgactggcctgttaattaactttaattacgatcatttggcttccacctgcctgaacccgataccttacacgggaacctgtatgatgcttaagcaggtaaagcagtcactgtgaagaaaataacattttaagaaacttttctgtcacaattgatagaggaaaagccagtagagaagtacatcttcttgtgtgtgtgtctcatcgtgccactttttgtaactcagcttagtaatgaagccaccattatgtcctcagtcagtgaagtaaatgtggatataaaagatttcctaatgagcattaatttggagcagtatctcttacatttccatgagtctggttttactactgtgaaggactgtgcagcaataaatgacagcctgctgcagaaaattggaatatcacctacaggtcaccgtaggaggatacttaaacagttacagataatcttgtcaaaaatgcaagatattccaatatatgcaaatgttcataaaactaagaagaatgatgacccttcaaaggattaccatgttccatcttctgatcagaatatctgcatagaactttccaattctggtagtgttcagacatctagcccaccgcagttggagactgttagaaaaaatcttgaagacagtgatgcaagtgtggaaagaagccagtatcctcaatcagatgataagctgtctcctcctaaacgcgacttccccactgcagaggaaccacacctgaatttgggttctttgaatgattctttatttggtagtgacaatattaaaatagaatcattgattacaaagaagactgtggatcacacagttgaagaacaacaaacagaaaaagttaaattgatcacagaaaatctcagtaagctccctaatgcagactctgaatgcctttcttttgttggctgttcaacatcaggaacaaattctggaaatggaacaaatggtttattagaaggatcaccaccatccccattctttaagtttcaaggagaaatgattgtaaatgacttgtatgttccatcatcaccaatcctagcacctgtgagaagtcgtagcaagttggtttcaagaccatctcgatcttttctgctaagacatcgacctgtaccagagattccagggtcaacaaaaggagtttctgggagctatttccgtgaaagaagaaatgttgctacctcaactgaaaaatctgtggcatggcaaaattcaaatgaggagaattcatcttccatctttccttatggagagacctttctcttccagagactagaaaattccaagaagcgatctataaagaatgaatttttgacccagggagaagcactcaaaggggaagcagctactgcaacaaactcttttatcatcaaatcaagcatatacgataacagaaaggagaaaataagcgaggacaaggtggaagatatttggatacctcgagaggacaaaaacaattttttgatagacactgcttctgaatcagaatactcaacagtagaagaatgctttcagagtttaagaagaaaaaattcaaaggcatctaaatctaggactcaaaaagccttgattttggactccgttaataggcacagttatccgttaagctcaacaagtggaaatgctgattcatcagccgtttcttcacaggcaatatctccctatgcctgcttttatggagcatctgcaaagaaggttaaatcaggatggctggataaactctctcctcaaggaaaacgcatgtttcaaaagagatgggtgaaatttgatggccttagcatttcttactacaataatgagaaggagatgtattcgaaaggaataattcccctttctgctatatcaacagtacgagttcaaggagacaacaaatttgaagttgttacaacacaaagaacttttgtttttagagtagaaaaagaagaggagagaaatgactggatcagcatactattaaatgcactgaaatcacaatcccttacctcgcagtctcaagctgttgttacacctgagaaatgtggatatcttgaattgagaggctataaggcaaaaatttttactgtgttaagtggaaacagtgtgtggctttgcaaaaacgaacaggattttaagagtggacttggtattaccataattcctatgaatgtagcaaatgtaaagcaagtggaccgaactgtgaaacaatcttttgaaataatcactccctacaggagtttcagctttacagccgagactgaaaaggagaaacaagactggattgaagctgtgcagcaatcaatagcagaaactctctctgattatgaagtagctgagaagatttggttcaatgaatccaacaggagctgtgcagattgtaaagccccagatcctgactgggcatccatcaatctctgtgttgtcatctgtaagaagtgtgcaggacagcatagatctttaggaccaaaagattccaaggttagaagtctaaaaatggatgctagcatttggagcaatgaactcatcgagctttttattgtcattggaagcaaaagagcaaatgacttttgggctggtaatcttcaaaaggatgaagaattacatatggactcaccagtagaaaagagaaaaaactttattactcagaaatataaagaaggaaaattcagaaaaactcttttggcatctctcaccaaagaagaattaaataaggtattcaattaaacataacagcagacgtggattttaatgtctttttaatgatgtgccaagattcttgagaaaaagtaaaaaattttatactatctgacaaaattattaattttattttatttccttttgtgacattatttcagtggtttcccccttgtttcatttaaggattcattgtcaaaagagcataaattcttcctccataattgaagtttcctgctaactcttgttgccacaatctgaggatttggaagcaaatgggatccagtaaagtgaagtctgaggactgatataatgtgggaagaaaggatgagaagagatgtagaggcagcttattatttcaaggc

SEQ ID NO: 279 - DNA, 3193 bp, Homo sapiens
gtgcctgtgcagacggggtccccccagacacccctaaatctccactttccttaccaggggccaccaggtggacgatcgtaattactgagctggcaaactcgagagccgaatgcaagactcacagttcccttcctgctggtactgaagacgtgcaacttaagaccccagaatccaggagtgtcaggcctgggccacatctgtacgtttagttttcacaatgggctgaacctaacggctgtcccacacctgctttcacaactgcaaaagtaactagcgtgcacagcagaccccaagcagcccctacgtgttcatggaacaacaggacaaagaggacgacacggcgttcaacttacgctccaggtccttgccacgtccatgtgatggtgtcctggggaggaagaggcagggtcagtcagcatggggcctgcacccagggcctgcacccagcacctgcgtgtgccggcctctccctgcacctcccaccccacagaggcgctgcagccagggggaagggaggagggtgctagagctccagcttcccagagtccctgaggatccaggactcggaccagccccccagcctgaggtccccagagcctctaaggacccagagaaccaccaccttacaggtccccagagttcccccaagatccccagagtccctgaggactcagagccccctcttataggttcccagagcccctaggacctgggaaaagggtcctccctccctccatgctcttcgctttcctcacagacctggggacaccaattccagtgtgcacccgggaccccggccctctcctgcccaccgctctctccaactgctctgagtgttcccccaaccacggtgcatgtgcagggcccccccaccccgggtgctctgaagtcccatcttcagcctcagtgccgccgggcagggaccacacagcaggggccgtgacggcagaggcccagacaccgtcaccctggggtggaccttctgctcccctgacggctaagctagtgcttcttggtgcatccagtaatagtgtgttgctttaaacacactgatgaaacaatcttaaaagtggaaaatctagatgactgcacagatcggagtctgttgtcctcgggttgacttttttgcccacaggagttgcactggggcatggtttccgcagcggaggcaggaaggggcccttggccaggagcctggctgacaaacgcacgcctcagtaagaaggaagaggtctttcagtcgtgtgactaccggccctgactccattttattacctgaccgtcagctctccgggcaaagtgaagcccggcaggcatcggacgggacaggccctgaggcggatggcccagaaccctggcacccagaggtcacctgtatttctgccccactatgtcctgacccacgggggttttctttcagtgctttcctttgccatcacaaaaaggaactgctatagacgggaagctcgctgtgatgggcaggccctcctcggtgctctcccaggtgggtgctccaccaggaacctgcagtgagcccagcaccagtgggctgtggggaccttgagtccacctgggccgtctttatgctccaggagcccatgaaggggcaaggacgtgcgggagtcattgctgtggaagggggaacacagctggcaccaaatgaatgccctgagctcggcggcaggcctgtgaggcaaggtcgcctaagtggggagggccgatggaaccggaagtattctgagcatccaagagcacctggaggaaggtgcagcagccaccttacagctgcctccgccttccagaacttaaatgttcttaatttttaaacttcctggagcatgaactgggtactgaaagctgctgggggccctggccggtgatgtggggtggaggggttccctctccaaaatgtcaggtttggcacacagaggaaagggcagctttgtcaggagctatggaagcagggctctggaacactggggaccactgtggaatcatggggttgatcagggacacgtgcatagaacaggccgcactcaggaacgtgccgagcccagggcccgggcctgtcctgccctctccagcgctgaggccggatggactcagcatggccaagtgtgggctgtggcgcagataaagggtgtggagagacagagacacaggtgcacagaggcagctcgcagttcccgtttcccggagaattcccctggaagctgaccccaaaaaaacacaactcaccagtttatttggatatcgtaaaaccacaggctggacgggcgctccaggaatgaatgcacctgccgagaaaggaacagcggtgttgcccatggcagcccacgcaggacagcgtctgctgcgtttctcatgctgcccttgggataaaagtgagcttttctgtctaggccttcctggtcagcaagggcactccatgcctggactatctcaacatctgtcctgaccgtaaacacccagcgccacagcacggatgggcaggaacatcggccaggggcgctccccggccaaggaacactttctgttttaacatcgcgcacaagctggaaggcgtctgtggagggacacttgctattataacattgcgcacgagctggaagacatccgtggagggacactttctgctgtaacatcgcgcaccagctggaaggcgtctgtggagggacacttgctattataacattgcgcacgagctggaagacatccgtggagggacactttctgctgtaacatcgcgcaccagctggaaggcgttggtgggaagtgggggtcctcatcaccggccaatgctcacccacctgacggggttagggtctgccctcaccaagcacatacacctgcctcggggccccacccgccgccctcacctgcccctggggctcagctccaaggacgggcggatttggtcacagctgcagcaggacttgcccgggatctgcctctctctctgagtggctgccacctgatgggctcccaaggaatcaggaggagccccagcgaggcccagctagagccacaggccgcagaggctcaggaacttccccgttcccactggaattgtggctgtacccagcagccgctccgccttctcactggccggagttgtgcccttgcgggctggagcaaggcaccatggactctgtggatgattgtttctattttaaattctatttaaatctct

SEQ ID NO: 280 - DNA, 3978 bp, Homo sapiens
cttacagcagctaattgagatagaccttcttattttacagctaagaaaactaaaactcataagtaattaaataaattaaataattttcacaagatgacacagccaggattcaaccgtgggtcttcccagcagggaaatgaggctgcatccctgtcagcacccagctttgcatccccaggcagcactgatacgtgttcctgggatgtgaggtttgctgcaggccaccgaggtgtcagccgcacaggggaactaggccgggtgtcttcagaccctcctctcctgtggtcgccgggaactgaattcccagcacaaaaatgcatgccatgagaatgtgcagttttcagactttttcaatagcggagttgctttcaacattgcatttcttaaaaacaaaatcctggaatatttccatcggcatcccagggaaagattgatgcctattgtatgaggagacttgcggcagatgggctgcagagggagctgccagtgacggagtggctgcagcccgcatcttttcggcagggggtctagtgcctgcatccagatttcactggaagctgaaagagggccagaatccaactttcacttcctaggggaggtctagacagattattgtcctcaaccaccttctctctcaccccagccctgtcctgcatctgtgtctccctctgtccaagccagcctccaccatcatcatgaagacatcctggcgagcccgtgcgcccaggtacccacacctcctcatcaacaccagcctcctctccttggcctcgtgtgcctccaggattccccctccagatgcctttgtactcacagggctgtggttggggcaccgatggggccattggattgctcctaaggaggagaaggagaacattcctgcccaactcttttcctctctacgccaggaagggagctgcccattcttaggcaaccaaaaggtcttgcgtggaggggcagcggcaggggcagtgggttttgactgctgtcctttgagtgagaggtaagaaccctagaaggataagatgctgtgttgagaacggtatcctgggctcacagacaggtgatgagcaggcagattcgggggcagagagtgtggcagggacgctcagctctctaatgacagccctttcctgggaacctccccatgttagcactgccttactctgtgggtccgtttggcctgggagaggacaggccggatggaagtggctgcgtgcttctctataaaatgggaataaagacaatatccatttcacatggcttctgcgaggatgaaatggcacgatatacgtaactcactgtggacttggctcaatcaatgctgttttccctcctccgcttcctcttctatagatggtgattccaggattgactacattgctgataaaaactaccttctggggcttccgttttggggagctggggatggggagagggagtgcaagttctagatgcctggtcagcccctctttttctcttctgcatgtagggggacgcttggaccagcttgcctgcaccctgcccaaggagctgagggggaaggacatgcggatggtccccatggagatgttcaactactgctcccagctggaggacgagaatagctcagctgggctggatattcctgggccaccctgcaccaaggccagtccagagcctgctaagcccaagcccggggctgagccggagccggagcccagcacagcctgcccacagaagcagaggcaccggccggcgagcgtgaggcgagccatgggcacggtgatcattgcaggggtcgtgtgcggcgtcgtctgcatcatgatggtggtggccgctgcctatggctgcatctacgcctccctcatggccaagtaccaccgggagctcaaaaagcgccagcccctgatgggggaccccgagggcgagcacgaggaccagaagcagatctcttctgtggcctgagcgcccatccccacccggccaggtaggaagggcggggagagcacacggcattgctcagccacagctcccaccttgacccggcgctggccactgcctccccgagtccaccctcctccccgccctccagcagacaagccacaccgggttctctccctgcactttcgaggctccctgaaagccaccgtgctgggggctcctgctgatgctcctgtctgggccagtaaatctttggaacatgtgggggatctccctaagctctggccacagcaaagcaaggaggtgtgtgcaagaggaggcttccggactgggcattcccctgtcgcccttcctgccctggggtggccatagctggtgactcttcctaccttgctggtcccacctcacctgcattgaggggacggggagggagggatctgagggatgaaggtagatttctgagactctctcctaagccagaaagacgttcttaacacccctgcagtgtgaaagctggtccagctctacaactgttggtaccaatgtgcaaacacaccagccctgccatctggacccagcactcagaaacaccatacacccctggccgacgccatcatgcccctggatctgctataggccacactgaccacatgctcctggattcgctaattcactcacacacccattgcatcaccagtgcggtcacatggattgaaagaattaatacacacacacacacacacacactcacacggtcacacggagaccgaggctatgagcgctcgaacagcagagacatgctcttccccaggggtctccctgagaccacagagcctctcgcgtgctcactgcaatcttctcaagtcaacagcaggaaggaactcaaccagtaacaccaggatcctttgagatcctctaaagtgggccaaagtggtgcccctggaggagccctcctgtcaccatggtaaccctctcacacctctcctgctgggctttcccgggataccacccaggggcctggagcggctgcatgtgtgcatggcggcctcctgaggacccagccacacaccactggtgttgcctcggtcctgcccacgcatctcacagcaccaggccctgtggggcccccactgattcctccacagcctgcagcctggcaccgtgactctgtgcctctcgccctccatcttcagtactcctggcctgtgacttcagggctgggacttggtggtgctttgccattggtggcaccctctggggaaagcaggtggcaggcagagaacacggtggctcccctgaggctcattgcctgccagcttattgcagacagagcccaggagcaggagcgggtggccacgtgctgcccagaggctcccaggatggggcctctgttcccgggctttgtctgctcagtgtggctccctagagcacccagccggggccaaaccagagagtgggtggggagcctgtctgggacagagccacctgctgccaaggcagtgcaagttttccaggttacctgtccccctccctagctctgcccctcctcagagtgtgaagatggtgggtacctaggtgtcatgctcacaggctcaggaggcatcaggctcgtccctggctctgggatggaatctcaatgggggctcaggaagaggccagcaagaaccctgaagccaagggtctgagcagagggagttggcaggcctagctcctgtgccccactccgaccctccctgctcatgcggcagtgggtgggtgaggtgggctgggggcctggaggagtgcctttgaggaggtcagtcctggcaggtggacagaggacgcctggcatgggctgcttactgggaccccaggcggccctggccatggccacagtcttccttcttttggcgtgtgggctggtaccagatctggggattttctaaagggactggggggaggggagggcattgtcaatggtggtatctttagcctgagacagaagatttttaaaggcaaaattatatttctggtttgttgtttcagaagaccaataaagactgtattttcctatgt

SEQ ID NO: 281 - DNA, 5153 bp, Homo sapiens
tcattgctcttctgctgttcatatcatcttagttattcacaaagtctacttgataaaatggctcaagggaaatacaagtttgttaagtttttattcttcaaatagaagttttaattttaagcattccttatgatattttttaagcctaaaaaccattcaaattgcttgacaaaattatttcatggtgaattttataaggttgatagaagtaaaagctatttttcccaaaacaaacaaaataccatacatagttttttgggtttggtttgttgatgtcatgccaatttccaagcaccaactggttaccacaaacatgggaatatttagtgatatctttgtagtcatcgttaaaattcctgggaaaaaaagaaaaagtttacgtcaaaggaaaattcacctcccacaaggaaagtctgagatgttcatcctgacatttgcattcctgattatttgtggacatttcttcattgtgacagtaggaagctgagcttgtttctcctaatttgacactgggttggtgagcattgtctcaaattttgtgcttgcctcatttatggtcctgaagcttagcagaaaaacagacaagctattcagaccagttttctttaagagcacttatgttgcagaacatgatacaaatgattcaccgtgagcaggcacacagagtactgaaaggtattcaactatgcaaagatattgaggggatttccagagaaaacttaaatgttttgaagatttgtaggtagggttttgattgtgtcacattctacactcagtgccaagttagaatgtctttatggggaaggcaataaagttacttgttgggtccttccttcccttacaaacagaatgtttttatgaaatcaaatggatcctccactttgtgtagtaaggaccccccaggccccacaacatcatcactgtgagtcctatcgcagatgtgtgtaccagcccaattcagttttgcttttctttttccctaagatttttacttcaccaaatcccatttcaaatctttttaccttcatgttaccaacaggatgtttagttgaatcagcaacaaagacgtgacaacctattgtcctccacaaaagcatgagtcattttattcagtgatctttggtagtacgataatcaatggaatttatggtgtcgtagaaaaccaaaaatccatgttgaatatagtgactgtcttaaatatacttaaatatgttattctacaaaacaatatccttttacactatgggatggattcctttctggatgcagggatgggagggtctatgggtcagtgactgggacaaaggaactgggaatctctgcacaactgagccctaatccctggtccatctctccagcctcagaaactcaccctcagcctcattttccccatatgcaaaagagagatatttatttacctacctcataggggtgttgtggagattagctagatttgctaaagtgcttgtaggttagaaagtgctgtcattcctgagaactggcattaacagaagagagctgtgtgcagcacggaggaagtggagtctgaggaatacaacagcaacaactcaccaagcagagaatacaatggttcttcatcattatataaaactaacacttttccttcaaaggtctatgtataattttcttcaatgattagctttttaatgagacaactcctttcatccagacattcagatgctttatataagttggcaattttcctgttaaccaaactgaattttattaaatgtttattaaaatgcacccagaaaacttgtctcctcctgatgcctgaggggtttgcatgcctgatcccaagctgcattttttcagaatgcgtgcatgatgccccagtcctgtactcatgatcaccaggtggcgttctgaaatccactactggggaaagatttttaacagatattagtgagattagagttggtgtcatttccattgagtatcctcttcacccctaagatgacacatctttacaacacaataaaagaacgtaaagccttatttccacctgtaactcctgaattgattcattttcacgttataactacatttcaaatatttcggagaagtttttacacagggcttcagctatatactgatatacatatgcttacatgtgcttaggtgggaattctactaaaggataaaggacacagtgtgaaaacaacatcagagaatatcctgtacaacttccccaaaagtgacaagttttcttgtacttaaaaatttaatcctgataagaactaatgtgaaataacatcattttggtttataaatatttgtaatttttgagacatagaggcaatatcatgatataggaatacattcataaaactagactagcaaagcagataatgttttcatgatatggcttcatgaggcaaagttgttgtacatcaatattatcattgtgcccttatttaaggattatattccattgtgaaaaaaatgtgcacactcttaaaaacacaaaatgggtttcagaaagtttaccttgagaagtgggtttgaaatcatcttgtgcttggagctgacataagatacgcactcaatataatctcttctggattctaaaatctaattggcagtgatatttcaaagccttaacatttcaaggtggttaattaatatctaatgcatggtattaaactttctgaagcatgaatttaacctaggcaattatctgattcattttttttaaagtttgtgctgccaaaccagactgaagtattgtttttctggactaatactgtgagaatagtaagtgagtcaaaaaataattgggactgtcctttttcccctgcccacttcctagtatcaatactcccccaaccagaaatgcagcagaatatcctttttgctataaaggaaaatactgtgtttttatttgtttttgcagaagaaaactggtgttgcctatttggactagatgtaggggcctggaagaaggaagtggcagattcacaggtggggtgaccaggatgggaggaaaatagtggggcgagtatgtcatggggagattttgccacaaagatacaaaacagaattgaagtgtgttagagctggacaaccctttgaaatgacagagtctagattcttcaccaaacagatgaaaagacaagtagagacaacatgtacttgagatataagctatacatctcatcactggaagaaaggagacttcagcctcttttcaaggctttccagaccacatggaactctccagagccctccttgaaagtttttagaaaaactaccattttcagcaaagattcatgtgattatgctgctgaggaccagtcattctgtaaacatcacatatgtgatgctttgtaaatgtattaattgtggtcaattttcatggatatttcccattaacattgtattccatgaacaagtgatagaaaacatatggaaattctcttttgatcaaaaggagtgtctcccaattagtttacgtgtgttagtattgctgacatattattatcatcacaaaattccttttatatctagatggtatcaaataagaaaaaaatgcatcatttggtcaattgcttattgaagatcccagctgaagcctttctttggtaaagagcgcagaaagagaccatagctattcttggatgagaaccttgcctctactaaatagtttctgcttttcctctctgtagccagacagctcaatagcctagggagagtcgatgaaggatatgcaaattacatttttcccattctcagaacaaagacagcaaccaatgagccagaggtttcttctctctttgaaaccaaatagcacgctgaatttagggctatgacaaaaatgttgttaaagcaagagcaaaatcatccttcctatggattcttttctcagtgtttacttaattctttttgcagtttggattggagtttctagtaatgataattaatgccattttacatgatagcttcaatgcagaaatggtgtgagcctgagttacaaatgacatgactagggatacaaacttcgtctgtactaacatcctaccaagcagattggaaacaaatactactaccactaatattctgatgtaattaataacatctaatagaaaaatagaaacatcgtgcttagcatgaaaccattgcacaatataaacctgctcccaaatggcaaggatttttgctaccaatatttgttcttaattctccagttattttaagtaaataagtttcacatctaactacctcagctactgttgttttatttagaaacatgaaaccatgcactttgtaatcaataagtcttttgtttaacatttcaaaaggacatttggtgcaaagcaattttcaaaaatttgtacatgatatacaccacccaacctcaggaggttgtacttaattttgtttgtttgtttctaaggttggttttgggtaaaatcctcatttccactcaacatcaagataagctgctctatatttgcttaatttgccttaaacattttgtgctcctttccctgttcaatttttttgttttgttttaaatctatctctgaaaaaaaaatggaacaggtggcaggtgaacagcaaatggaagagaatggaccagtaatttctcagtcccctgttgtcaactatctgcatgacattctgattgtgcaaaaatgccattcctgtgcttccccctccattacagaataaggtccgagagaccccacgagtgtgcgtagggaacggtgtagacatttcccccagtatgagcacagtgcctggacctgaatgatcatcttggcagttcttgtgcttttactttgtaaacattgtacaaatgtatttggaattttatttgaaatggagacttaaactagttattaaatttgtttccttcctgtaaatatatatattcaaattccatgtatccaaacatccctttagcgttcagattgtaagtgtgtctttattcgcgggaggccactgtcagcaggcagtgacccccagtgccctagtttgaagcacagtgtgtggagtatttgatgtactacagtaccatagttattttggtctgttaagtaagttgcaatttgtgatgaaatgaagtggaaagtagtacttcataatgaacaaatttccttggttacatggtttttcttgtaaaactt

SEQ ID NO: 282 - DNA, 3498 bp, Homo sapiens
aactcggtgaaaggaattggcgccgttcgacaccaggcggatccgctctgcagcacgaacccatctccagccgcagccgcagccgccgcccgggccgaggagcagccgcagcagccgccaccagtggccgagtgagcggagccgagtttgaggcagcgcctagcggtgaatcggggccctcaccatgagttcctcgcctgttaatgtaaaaaagctgaaggtgtcggagctgaaagaggagctcaagaagcgacgcctttctgacaagggtctcaaggccgagctcatggagcgactccaggctgcgctggacgacgaggaggccgggggccgccccgccatggagcccgggaacggcgacgatcagggtttccaggaaggggaagatgagctcggggacgaagaggaaggcgcgggcgacgagaacgggcacggggagcagcagcctcaaccgccggcgacgcagcagcaacagccccaacagcagcgcggggccgccaaggaggccgcggggaagagcagcggccccacctcgctgttcgcggtgacggtggcgccgcccggggcgaggcagggccagcagcaggcgggaggtaagaagaaggcggaaggcggcggaggcggcggtcgccccggggctccggcggcgggggacggcaaaacagaacagaaaggcggagataaaaagaggggtgttaaaagaccacgagaagatcatggccgtggatattttgagtacattgaagagaacaagtatagcagagccaaatctcctcagccacctgttgaagaagaagatgaacacttcgatgacacagtggtttgtcttgatacttataattgtgatctacattttaaaatatcaagagatcgtctcagtgcttcttcccttacaatggagagttttgcttttctttgggctggaggaagagcatcctatggtgtgtcaaaaggcaaagtgtgttttgagatgaaggttacagagaagatcccagtaaggcatttatatacaaaagatattgacatacatgaagttcgtattggctggtcactaactacaagtggaatgttacttggtgaagaagaattttcttatgggtattctctaaaaggaataaaaacatgcaactgtgagactgaagattatggagaaaagtttgatgaaaatgatgtgattacatgttttgctaactttgaaagtgatgaagtagaactctcgtatgctaagaatggacaagatcttggcgttgccttcaaaatcagtaaggaagttcttgctggacggccactgttcccgcatgttctctgccacaactgtgcagttgaatttaattttggtcagaaggaaaagccatattttccaatacctgaagagtatactttcatccagaacgtccccttagaggatcgagttagaggaccaaaggggcctgaagagaagaaagattgtgaagttgtgatgatgattggcttgccaggagctggaaaaactacctgggttactaaacatgcagcagaaaatccagggaaatataacattcttggcacaaatactattatggataagatgatggtggcaggttttaagaagcaaatggcagatactggaaaactgaacacactgttgcagagagccccccagtgtcttgggaaatttattgagattgctgcccgaaagaagcgaaattttattctggatcagacaaatgtgtctgctgctgcccagaggagaaaaatgtgcctgtttgcaggcttccagcgaaaagctgttgtagtttgcccaaaagatgaagactataagcaaagaacacagaagaaagcagaagtagaggggaaagacctaccagaacatgcggtcctcaaaatgaaaggaaactttaccctcccagaggtagctgagtgctttgatgaaataacctatgttgaacttcagaaggaagaagcccaaaaactcttggagcaatataaggaagaaagcaaaaaggctcttccaccagaaaagaaacagaacactggctcaaagaaaagcaataaaaataagagtggcaagaaccagtttaacagaggtggtggccatagaggacgtggaggattcaatatgcgtggtggaaatttcagaggaggagcccctgggaatcgtggcggatataataggaggggcaacatgccacagagaggtggtggcggtggaggaagtggtggaatcggctatccataccctcgtgcccctgtttttcctggccgtggtagttactcaaacagagggaactacaacagaggtggaatgcccaacagagggaactacaaccagaacttcagaggacgaggaaacaatcgtggctacaaaaatcaatctcagggctacaaccagtggcagcagggtcaattctggggtcagaagccatggagtcagcattatcaccaaggatattattgaatacccaaataaaacgaactgatacatatttctccaaaaccttcacaagaagtcgactgttttctttagtaggctaactttttaaacattccacaagaggaagtgcctgcgggttccttttttagaagctttgtgggttgattttttttcttttcttttttgtacatttttaattgcagtttaaaagtgaatcgtaagagaacctcagcattgtgcacgataagagaatgtgtcagtatttcagggttctacattttatctgtaaaatgtgacttttttttttttttatcacaacaaaagtaaaatgttgctttgtacctggtgtcttttattaagaatttactccccccatttctcacagagaataacagtcgggagtcattgtcacaatataatagaaatgttagcaaccagattcatgtaaggactaagtggtcctcatgaattgcattaagactctgtactgctcatattacactccatcctctctgtagtttgctgggtagtggagggggtaagctaaatcatagtttctgacaataactgggaaggttttttcttaaaataacaatggaattggtataattgggattgaaaactaaaacttggaactaagatagagaagatggagtgtatgtagaagggctgttaagaatgtaaaacttggttgcattatttgtggaggctcaaacttgtgaaggttaataccataatttttccatttgttctgcattttgattctgaaaagaaagctggctttgcccatttcttattaaaaaaacttgttgtaaatccagttgtctaatgggatctatatgaagttagccatgtctgtatgcccttctcccacaaaatactgtataactagtgtgcttgtagtagttaactccaccatctttgtaagctaatgaaattgtgagtcacccatttatatcttaatttttaatcatgtcagttcttgaatgggtatctccttagcctgctgatttctttttctttctaaagaaagtgggtggagaaattaatttagacgtttgtttgcaataaaaagaattcatttt

SEQ ID NO: 283 - DNA, 3197 bp, Homo sapiens
cttatcagtcctgttcacactcttggagaagtggacagtgtgtcatgcagagggtcatagccttactttcaattcaccgggaccttttcttttggggatacaccatgaacccattggaacagtttgctgtcattagattggagggctctctgtcatgtactgagttgggactctgttttcatttcttttctaggcagagctgcaaccctcttgtcctctttgaagcagaaattgaaaagtactgcccagagaattttgtagacatcaagaaaactttggaacgagagactcgccagtgccaggctctggtgatctggactgactgtgatagagaaggcgaaaacatcgggtttgagattatccacgtgtgtaaggctgtaaagcccaatctgcaggtgttgcgagcccgattctctgagatcacaccccatgccgtcaggacagcttgtgaaaacctgaccgagcctgatcagagggtgagcgatgctgtggatgtgaggcaggagctggacctgaggattggagctgcctttactaggttccagaccctgcggcttcagaggatttttcctgaggtgctggcagagcagctcatcagttacggcagctgccagttccccacactgggctttgtggtggagcggttcaaagccattcaggcttttgtaccagaaatcttccacagaattaaagtaactcatgaccacaaagatggtatcgtagaattcaactggaaaaggcatcgactctttaaccacacggcttgcctagttctctatcagttgtgtgtggaggatcccatggcaactgtggtagaggtcagatctaagcccaagagcaagtggcggcctcaagccttggacactgtggagcttgagaagctggcttctcgaaagttgagaataaatgctaaagaaaccatgaggattgctgagaagctctacactcaagggtacggatgccactcatgcggagcacatcgagaccatcaaagcccggatgtacgtgggcctcaccccagacaagcggttcctccctgggcacctgggcatgggacttgtggaaggttatgattccatgggctatgaaatgtctaagcctgacctccgggctgaactggaagctgatctgaagctgatctgtgatggcaaaaaggacaaatttgtggttctaaggcagcaagtgcagaaatacaagcaggttttcattgaagcggtggctaaagcaaagaaattggacgaggccttggcccagtactttgggaatgggacagagttggcccagcaagaagatatctacccagccatgccagagcccatcaggaagtgcccacagtgcaacaaggacatggtccttaagaccaagaagaatggcgggttctacctcagctgcatgggtttcccagagtgtcgctcagctgtgtggcttcctgactcggtgctggaggccagcagggacagcagtgtgtgtccagtttgtcagccacaccctgtgtacaggttaaagttaaagtttaagcgcggtagccttcccccgaccatgcctctggagtttgtttgctgcatcggcggatgcgacgacaccctgagggagatcctggacctgagattttcagggggcccccccagggctagccagccctctggccgcctgcaggctaaccagtccctgaacaggatggacaacagccagcacccccagcctgctgacagcagacagactgggtcctcaaaggctctggcccagaccctcccaccacccacggctgctggtgaaagcaattctgtgacctgcaactgtggccaggaggctgtgctgctcactgtccgtaaggagggccccaaccggggccggcagttctttaagtgcaacggaggtagctgcaacttcttcctgtgggcagacagccccaatccgggagcaggagggcctcctgccttggcatatagacccctgggcgcctccctgggatgcccaccaggcccagggatccacctaggtgggtttggcaaccctggtgatggcagtggtagtggcacatcctgcctttgcagccagccctccgtcacacggactgtgcagaaggatggacccaacaaggggcgccagttccacacatgtgccaagccgagagagcagcagtgtggctttttccagtgggtcgatgagaacaccgctccagggacttctggagccccgtcctggacaggagacagaggaagaactctggagtcggaagccagaagcaaaaggccccgggccagttcctcagacatggggtccacagcaaagaaaccccggaaatgcagcctttgccaccagcctggacacacccgtcccttttgtcctcagaacagatgagctcagggtagggtagagaacgccactttctcagacctgtcccctttgtgtttagaaatgagttaaccaggaccaagtggccatttagtgtcctggaaacttacgaggacagtgttggcctttggagtcgggccttcttgtgttaaggagcacaaggtccagatcactctggagcaggccagctctgctggacagtgaccctcttcccaggcctcaggagtgaccatagccactgctgaaaagtcacgcagctgctccctcggaccccccaaggatggttgctgttagcagaggattggtgcagtcccagctgaagcccactgtgtgccaaaggaagaagctcccagggctgcttccttcacctgcagaaagccccaagtgagccaccagcactcatggggcagtccctgtccaggctgcccagggcttctcatagacgtcctgagaaggacggtgtaatgcaaggaaatggctgtggtaacactgatccttcagaagaagcttcattccctcttaatctagttaagccaggacatccagaattcattgctttaataaagaacccaggccgggtgcagtggctcgtgcctgtaatcccagcactttgggaggctgtggggggcggattgcctgagctcgggagttcgagaccagccggggcagcatggtgaaaccctgtctctactgaaatacagaaaattggccaggtgtggcggtgtgcgcctgtagacccggctgctcgggaggctgaggcaggagaattgcttggacccgggaggcggaggttgcggttagctgagattgcgccactggacgacagagcgagactcagtctc

SEQ ID NO: 284 - DNA, 3572 bp, Homo sapiens
gaacatggatgcctcgcttttcagagactcgcgttcttggaacttacacccttttgggtttgctatttttacccaccctgagccttccggtctccatggcgacgcctccaaacagcagattccaggcggcaatgacgtcatctctccctttcctgccgcccaggccttggagagatccaaggcctgtgggccacggctgcgcctctcctgactccagcttgcccgtctgtccttgggggcagcgtccttccttctctcggccccagacgcagctgcatcctggagtccttctgagaaatgtgggacctgccccagctccaccccaggggcagcgagggaggcgttggatggagccaccccacggctcctctgtgaaggtctgcacgtcactcagaaagttgaagcaaaccaagcagggttggagcccacagttcacagccggctgcacaggggatgcaccaagcacagtttcctatgacaagtggaaacctgtgcgccacaggtgagctgggtcctggaaggtgcagggaccaggcagcatctcatctcaggacatcaagggctgtccccagccagcagatttcccataaaaacgtgctgaactggggacaaagctgattctacagagccgagaagccagaccttccctggggactcccgagggggtcccagccaccctctccacctgcagaggtttcctggcccacttggaggaccttgggggatcctccaagggcccccttccagctcttggcccatgggggagcctcttcctcagctccgggtgtggtggacaggagaccgagggctccccgcacccagctgggctcagcgttttcaagctgaacttggtgcgtggcggcttggaaagccgggagcctgctgcgtgtctcctggggctgctgtgaaaaaatgaccacacactgggagcctaaaacgagtgacatgtatattctcacagttcaggcagctggtgtccaaaatcagtggttgggagggtggagctccgcctaaaggctctgggtggctgctgcctgccccttccagccccgggcccccggcattccctggcgtgcagctgctccacccccaaccccaaagcctccttcctgtgtctctgtgtccaaattttccttaccttttttttttttttttgagatagagttttgctcttgtcgcccaggctggagtgcaacagcacgatctcggcctatcgcaacctccgcctcctgggttcaagcgattctcctgcctcagcctcctaagtagctgggattacaggtgcccaccaccacacccagctaattttgtatctttagtagagatggggtttcacgatgtctttcaggctggtctcgaactcctgacctcacatgatccacctgcctcggcctcccaaagtgctgaaattacaggcatgagccacagcacctggccaattttccttttctttctctctctcttttttttttgagacggagtcttgctctgttgcccaggctggagtaaaatggcacaatcttggctcactgcaacctctgccttctgggttcaagcgattctcctgcctcagcctcccgagtagctgagactacaggcgcccaccaccacacccagctaatttttgtgttttttagtagagacggggtttcactatgttggccaggctggtctagaactcctgacctcaagtgatctgcccgcctcggcctcccaaagtgctgggattgcaggcgtgagacactgcacccggacaattttccttttcttacaagaacactgctcacactgcattcagggccaaccctaacccagtatcgcctcatcctggtttgattatatcggcacagaccttgcttccgagcgaggccactttctcaggtactggtggacatgagtcttcggagacgctgctcaacccacagtgctcctccagcttggtttctgtgacttgccttccccagaggaggggtgccctgagaggtctccactccctgaccggctccttggtgccgcgcactctgagaggcttcccagggaacagagcacacaggaccgccctcctgggtagaccaatcagcatctgagctcacaatttcccagcagggcagtggggtggagagagaagcctgggctgggctgggctgggctgggctggggaagcttctccgggcagggggacgtcagagcaggatctggggctgataaaagcccgcccctgggtgggggctgagtggtgcggaagctgagcccgacacgtggggatggaggacaggctgtgggagggtgtgaaccggatactgcttgaaggggtgctggggactttgagagagggcggctggccctgtctggtcggggatgctggcccagacacaggccatggctgggatggggttcagaaacaggaccgctgtctctcccgggccagggccctccccagctgctcctggctttctggttcttggggtcaggggcaggcctgtgccatgaccccgccactgaggctgtgaggaggctgtcggtgcccaagggcaccaaggcacacccctactcttgcaccccatgtgtgggcccgagcacctgctctgctgccccaaagatctggcgatgtttcccaggcaactgtctctcacagcctgtctgcctggcactcccgtatcccataaatgccaccacatctggctatgggtgggcgtgcctgcctggcatccacgggccagcaggtgtggtggagcacagcccagttcctggctgcatcagaaggctgcccgggccttttggctgtccttgccagcagcaaaactccgtcaccacagcagcagatggctccgaagaagtggagcgttttcatcaggttcaactttgaaacctccaccatcaccatcaccagcaccgctgtgtcatgctgataacttgaggacaggcaggacaaggccttctggcggccgcccctggtttctcctggggggtgatgagcgggagcggctctgggccgagctactgcgcacggtgagcccggagctgatcctggatcacgaggtgccttcactgcccgccttcccaggacaggagcccaggtgcggcccggagcccactgaagtcttcactgtcggacccaagaccttttcctggacaccctttccgccggacctgtggggcccgggccgttcctaccggctgcttcacggggcaggagggcacctggaatcccccgccaggtccctgccccagcgcccggcacctgatccctgcagggcccccagggtggagcagcagccgtctgtggagggtgccgcggccctgcgcagctgccccatgtgccagaaggagttcgcccccaggctgacccagctggatgttgacagccacctggcccagtgcttggccgaaagcacagaagacgtgacgtggtgagcgccatccaagagccctgcgcagagtgcagcgcccggacacgctctcccccgccagcagccccgcctctcggctcccccgccagcagccccgcctctcggctcccccgcatgcgcattaaagcagggcgggctcctgtctgtctctgtgttgtgatg

SEQ ID NO: 285 - DNA, 3113 bp, Homo sapiens
taacatagttcctagtggggtgggcttactttgtgtctgacccatttttctttcgagacaagacaacactcacactacaagagggaaagggtaaaggtcactcacgcgtggtggtacatgcctgtaatcccagctactcgggaggctgaggcaggagaatcgcttgaaccccggtggtgagccaatatcacgccattgtactccagcctgggcaacaagagtgaaactctgtctcaaaaaataaataaataaataaattgctttatggaagaaagtaagtatagatggagagaaagggatctgataaccgaagcagggaataaatgtttggagtccacagcatcctgagaacttcttgggaatggagtctaggcctccagtgctgtcactctcacccatcttcctctacacatgtgagatgtttcaggacccagtggcctttgaggatgtggctgtgaacttcacccaggaagagtggacattgctggatatttcccagaagaatctcttcagggaagtgatgctggaaactttcaggaacctgacctctataggaaaaaaatggagtgaccagaacattgaatatgagtaccaaaaccccagaagaagcttcaggagtctcatagaagagaaagtcaatgaaattaaagaagacagtcattgtggagaaacttttacccaggttccagatgacagactgaacttccaggagaagaaagcttctcctgaagtaaaatcatgtgacagctttgtgtgtgcagaagttggcataggtaactcatcttttaatatgagcatcagaggtgacactggacacaaggcatatgagtatcaggagtatggaccaaagccatataagtgtcaacaacctaaaaataagaaagccttcaggtatcgcccatccattagaacacaagaaagggatcacactggagagaaaccctatgcttgtaaagtctgtggaaaaacctttattttccattcaagcattcgaagacacatggtaatgcacagtggggatggaacttataaatgtaaattttgtgggaaagccttccattctttcagtttatatcttatccatgaaagaactcacactggagagaaaccatatgaatgtaaacaatgtggtaaatcctttacttattctgctacccttcaaatacatgaaagaactcacactggggagaagccctatgaatgtagcaaatgtgataaagcatttcatagttctagttcctatcatagacatgaaagaagtcacatgggagagaagccttatcaatgcaaagaatgtggaaaagcatttgcatataccagttctcttcgtagacatgaaaggacccactctgggaaaaaaccgtatgaatgtaagcaatatggggaaggcttatcctatcttataagttttcaaacacacataagaatgaactctggagaaagaccttataaatgtaagatatgtgggaaaggcttttattctgccaagtcatttcaaacacatgaaaaaactcacactggagagaaacgctataaatgcaagcaatgtggtaaagccttcaatctttccagttcctttcgatatcatgaaaggattcacactggagagaaaccctatgagtgtaagcagtgtgggaaagccttcagatctgcctcacagcttcgagtgcacggtgggactcacactggagagaaaccctatgaatgtaaggaatgtgggaaagccttcagatctacctcacaccttcgagtgcatggtaggactcatactggagagaaaccctatgaatgtaaggaatgtgggaaagccttcagatatgtgaagcaccttcaaattcatgaaaggacagaaaaacacataagaatgccctctggagaaagaccttataaatgtagtatatgtgagaaaggcttttattctgccaagtcatttcaaacacatgaaaaaactcacactggagagaaaccctatgaatgcaaccaatgtggtaaagccttcagatgttgcaattcccttcgatatcatgaaaggactcacactggagagaaaccctatgagtgtaagcaatgtgggaaagccttcagatctgcctcacaccttcgaatgcatgaaaggactcacactggagagaaaccctatgagtgtaagcaatgtgggaaagccttcagttgtgcctcaaaccttcgaaagcatggtaggactcacactggagagaaaccctatgagtgtaagcaatgtgggaaagccttcagatctgcctcaaaccttcagatgcatgaaaggactcacactggagagaaaccctatgaatgtaaggaatgcgaaaaagcattctgtaaattctcttcttttcaaatacatgaaaggaagcacagaggagagaagccctatgaatgtaagcattgtgggaatggattcacatctgccaagattcttcaaatacatgcaagaacacacattggagagaaacactatgaatgtaaggaatgcggaaaagcattcaattatttttcttccttgcatatacacgcaaggactcatatgggagagaagccatatgaatgtaaggattgtgggaaagcattcagctagcctggttccttttatggacatgaatagactcacactggaaggaagcactatgaatgcaagcaatgtggcaaaactttcacattttccagttcttttcgatatcatgaaaggactcacactggggagaaaccctatcaatgtaagcagtgtgggaaagccttcattccttttacttcttttcaatgtcatgaaaggactcacacgggagagaaaccctatgagtgtattctagttccgtttgatatcatgaaaggacttacactggagtgaaaccctatgaatgtaagcaatgtgggaaagccttcagatgtgcctcgcaccttcaacggcatggaagggttcacacttgggagaaactctatgaatgtaagcagtatgggaaagccttcagatctgccaagattctttgaatacagataattaatgtaaacaattatcataagtatactaacatgttattctttttaaataagaaggtataataaaatatcccattggttttatgtattagatcaagctt

SEQ ID NO: 286 - DNA, 3262 bp, Homo sapiens
attagtgagcaggagcagccagctcagccttctgagtcttctggggaggttgaatcttctcagactcggcaggagaccccagctcagcctccagaagagatggaacctcctgcaaaccaagaggaggccccaactgagcctccaggtcctcctgtagagcctgaactttcccccagtgagcaggagcagccagctcagccttctggggaggttgaatcttctccagcccagcaggagaccccagctcagcctccagaacatcatgaagtcaccgtttcacctccaggtcaccatcaaactcagcattcagatttgcccaatgtctctgttaagcctccagacatgcagctcaccatagcaacagagcctagtgcagaggtgggaacttctccagtccaccaggaggctacagctcagctctcaggaccaggtaatgatgtagaacctcccactatccagcacgggggcccacctcttcctccagagtcaccggaagatgctggacctttagcaattcaacaggagacttcagttcaatctccggaacctattaataatgagaacccctctccaacccagcaggaagctgcagctgagcatccacagactgctgagaagggtaagtcttctctaacccagcaggaggccccagctgagactccagagctccctaatgtagttgtagctcaatctccggaacattcaaacctgactcaagccacagttcaacctttggacctggggcttaccatcactccagaatccacaacagaagttgaactttctccaaccatgcaggagaccccaactcatcctcctaagaaagttgtaccccaacttccagtatatcaagaggttacaattccaacaccaggtcaggatcaggctcagcatccaatgtcacccagcattacagttcaacctttggacctgggacttaccatcactccagaacccactacggaggttggacattctacacccctgaagaagaatgtagttcctccaaagcaccctaaggtgacacttccacatccagaccaggttcagactcagcattcaaacctgactcaagccacagttcaacctttggatttggggcttaccaccactccagaatccacaacagagattgaaccttctgcagccctgacgactacagctcctcctccagaacaccctgaggtgacacttccaccttcagacaagggtcgggctcagcattcaaacctgactcaagtcacacttccacctctggacctggagcttaccataactacagaacctactacagaggttaaaccgtctccaaccacggaggagacctcaactcagcctccagacctggggcttgccataactccagagcccactacagagactggacattctacagccctggagaagactacagctcctcatccagaccaggttcagactctgcatcgaaaactgactgaagtcacaggtccacctactgaactagaacctactcaggattcactggtgcagtctgaaagttacgcccaaaataaggctttaaccgcaccagaggaacagtaggcctccacaagcaccaacatatgtgagctctgtacctgcggaggtgagacgctgtcgtgtattgatctcagcccaaaacagaggctctgccaagtgcctgtgccagagcccaacacctaccatggcaccttcaccatcttaaatttccaaggaaactatatttcttacattgatggaaatgtatggaaagcatacagttggaccgggaaactaattctcaatgaaaattatttgactgaattacataacgattcatttaaaggcctgctatccctccagtatttagatttatcctgcaataaaatacagtctatcgaaagacatacatttgaaccactaccatttttgcagtttataaatcttggttgcaatttactcacagaactgagctttggaacatttcaggcctggcatggaatgcagtttttacacaagttaattctcaatcgcaatcctctgacaactgttgaagatccatatctctttaaattgtcagcatttaaatatctagacacgggaacaatgcaagtcccacttacaacaattgagaacattctcgtgatgactgttgaactggagaaactgatcttacctagccatatgacctgctgcctctgccaatttaaaaatagcactgaggctgtctgcaagacagtcaagctgcattgcagcagtgcatttctgacaaacaccatacattgtctgaagaagcatctgtagagaatccaggagtgttcatgaaggtgttacaagcccagaagaagcacacgagcactgagctgactattgagccggaggcagcctcagacagcaatggcatcaatttgtcaggctttgggagtgggcagctagacaccaatgatgagagggatgttatcagtgcactaagttacatcttgctttatttctcagcggtaaatctagatgtgaaatcaatgttgttacccttcattaatctgctttcttcaaatgtgcaagatggagataggctcctgggtattttgaataacaatacaaagagcccctctcttcaacctgcatccaacaactcaacttatgaaaataaattgagaaagctgtatttgctggaaagtatgttagatgcagaaatacaagaaaaaattgatgaagttaaaagggaagaaaaaactgccatgcttatgcagtccagccttctaggtaacaaatttaaatgccaaatatttgaaaagaaattagaaactatctaaccacaggaaagcagcctggcaaagattcaaagtgtaggcaaaaacctgcagagagtgaacagagtcctcatgggcccaaggagcatcttgaaaaggcacttcaaagaggtggaaagcagaggatcaggagggaacagggtgcccaggcatttgcagagaacgctgccaaagaaaaaaggctcgggagtccagccccaagggagctgagacagcctcacatagagcaggggcctgacaagttagtgggaaacaccatctacaccaagccttcgttcatccaagagcataaggccgcagtctcctctgtgctgaaacccttctccatgggtgtgccttctgcctccacccctgcaaaagccctacctcaggtcagagacagagcaaaagacttaacctacaccattttcattttagaaaatgcaaaggctagagttaaaaatatgaaggctgctaaaccaatcgtacatccc

SEQ ID NO: 287 - DNA, 3315 bp, Homo sapiens
aacctgtggacggccgcggccggcggacacacagcagcgggggcccggccgggggtcgcccgggggcccggaagccggggaagagcgaggaaaccaacttggagagaggagtgacctgggggccgggggcggagtcgtgagcgggggaggagagagccggccgccagcaagagccgcgcggcggcccaggaagcgagagcgccgccgcaggagaggcaggctggaccgggggctccccgggcccgcgacccccgccgtgaccccgcagcccccagctcgcccccaagatgatgaagaggcagctgcaccgcatgcggcagctggcccagacgggcagcttgggacggtagaacagcggctggagccggccaagcgggcagcccacaacatccacaagcggctgcaggcctgtctgcagggccagagcggggcagacatggacaagcgggtgaagaagcttcccctcatggctctgtccaccacgatggctgagagcttcaaggagctggaccctgattccagcatggggaaggccttggagatgagctgtgccatccagaatcagctggcccgcatcctggccgagtttgagatgaccctggagagggacgtcctgcagccactcagcaggctgagtgaggaggagctgccagccatcctcaaacacaagaaaagcctccagaagctcgtgtccgactggaacacactcaagagcaggctcagtcaggcaaccaagaattcaggcagcagtcaaggcctaggaggcagcccgggtagtcacagccatacgaccatggccaacaaggtggagacgctgaaggaggaggaggaggagctgaagaggaaagtggagcaatgcagggacgagtacttggctgacctgtaccactttgttaccaaggaggactcctatgccaactacttcattcgtctcctggagattcaggccgattaccatcgcaggtcactgagctcgctggacacagccctggctgagctgagggagaaccacggccaagcagaccactccccttcgatgacagccacccacttccccagggtgtatggggtgtcgctggcaacccacctgcaagagctgggccgggagattgccctgcccatcgaggcctgcgtcatgatgctgctttctgagggcatgaaggaagagggtctcttccgtctggctgctggggcctcggtgctgaagcgtctcaagcagacaatggcctcggacccccacagcctggaggagttctgctccgacccgcacgctgtggcaggtgccctcaagtcctatctgcgggagctgccagagcctctgatgaccttcgacctctatgatgactggatgagggcagccagcctgaaggagccaggggcccggctgcaggccctccaagaggtgtgcagccgcctaccccccgagaacctcagcaacctcaggtacctgatgaagttcctggcacggctggccgaggagcaggaggtgaacaagatgacacccagcaacatcgccatagtcctgggacccaacttgctgtggccacctgagaaagaaggggaccaggcccagctggatgcagcctccgtgtcttccatccaggtggtgggcgtcgtcgaggcgctgatccagagcgcagacaccctcttccctggagacatcaacttcaacgtgtcaggcctcttctcagctgttaccctccaggacacagtcagtgacaggctggcctctgaggaacttccgtccactgccgtgcccaccccagccaccaccccggctccggctccggctccagctccagctccggccccagccttggcttcagcagctaccaaggaaaggacagagtctgaggtgcctcccagaccagcctcccccaaggtcaccaggagtcccccggagacagctgccccagtggaggacatggctcggaggagcaccgggagcctggccgctgcagtggagacagcctcgggacgccaggccctggtggtgggcaagcccagcccctacatgttcgagtgcatcacggagaacttcagcatcgaccccgcacgcacgcttatggtgggtgaccgcctggagaccgacatcctctttggccaccgctgcggcatgaccactgtgctcacgctcacaggagtctcccgcctagaagaggcccaggcctacctagcggccggccagcacgacctcgtgccccattactatgtggagagcatcgcagacttgacagaggggttggaggactgagcccactgcacctgcagccacaggcccacccctccccactccctgatcccgtaggtggaggcgatgggtcacgagccatgttaagcacaaccggctccttggtccagttctgcaccggggtggggctgggacccggggaaggtttgagggcccttgcaaccccctcccagcagtggctgggcactctttgctgccccagaagctggtcccctatggattcatcttggcctgacccagccaggtggccttatttcttccctgtcacctcccctccttgaaatctgggccctggtgcctgctgaagattccctctatccctgagtacttagtcttctcccccttccctggggcttctagagctctctctgcccctcaggtcctggcccttgggtccttgtcaaccagaggtctagggaaccacaacccttattgtcctgggtggaccaatccaaaggctaagtgatagtgactcatcaatgttgggtcctgtggggtaccagtttaggttcctaagtaatagtgaccctttcacgtcctggagcccgagtggaccaatcggaagcctaagtgacgatgaccctcgcatgtcctaggtccctgggtggacccatcaggaccccaagtgatagtgacccagtggtcttttagatcctcagtagaacagtccagaagcctgagagacagtggccccttgataatctgggtctcacgggaccagctaggggtccaggtttcagtcagtaaataagagtggtccacgtcctaaagacacctctcctttacaaagacttgtgatgctctggggcttctgtggccaagccccaccctttcctggtcatggtacccgtacagcgttgatggccacagctcgaaggggggctttcgtgtccccctgtgcggtcagtgttttcagtaccacctctctcccgtgcccacttggctatttacttatttatttattgtgtgccagtgatggtgggtgggggctgggccttccccgccacctccacccctgttgtgacctgtccttccgtacttaataaagtgcgcgtgggagtgtt

SEQ ID NO: 288 - DNA, 3297 bp, Homo sapiens
atttctgcgcagctctagcgcgcctcggagcccgccggggcagccgccggacaccaggaccgcgagccagacagctcccggaagccgcgccgccgccgccaggtgcctgactgacagaagttcttgcccccggggagctggtgtggacagaggaggggctgctgttcgtacctgcctcatggttttcttggggaggatcaatgaggtagaacctgcaaagggcttagcagagagcctagcacctactgagcgctcagtaaagagcctagacatggaggagaaggactacagtgaggccgatggcctttcggagaggaccacgcccagcaaggcccagaaatcgccccagaagattgccaagaaatacaagagtgccatctgccgggtcactctgcttgatgcctcggagtatgagtgtgaggtggagaaacatggccggggccaggtgctgtttgacctggtctgtgaacacctcaacctcctagagaaggactacttcggcctgaccttctgtgatgctgacagccagaagaactggctggacccctccaaggagatcaagaagcagatccggagtagcccctggaattttgccttcacagtcaagttctacccgcctgatcctgcccagctgacagaagacatcacaagatactacctgtgcctgcagctgcgggcagacatcatcacgggccggctgccatgctcctttgtcacgcatgccctactgggctcctacgctgtgcaggctgagctgggtgactatgatgctgaggagcatgtgggcaactatgtcagcgagctccgcttcgcccctaaccagacccgggagctggaggagaggatcatggagctgcataagacatatagggggatgaccccgggagaagcagaaatccacttcttagagaatgccaagaagctttccatgtacggagtagacctgcaccatgccaaggactctgagggcatcgacatcatgttaggcgtttgtgccaatggcctgctcatctaccgggaccggctgagaatcaaccgctttgcctggcccaagatcctcaagatctcctacaagaggagtaacttctatatcaagatccggcctggggagtatgagcaatttgagagcacaattggctttaagctcccaaaccaccggtcagccaagagactgtggaaggtctgcatcgagcatcatacattcttccggctggtgtcccctgagcccccacccaagggcttcctggtgatgggctccaagttccggtacagtgggaggacccaggcacagactcgccaggccagcgccctcattgaccggcctgcacccttctttgagcgttcttccagcaaacggtacaccatgtcccgcagccttgatggagcagagttctcccgcccagcctcggtcagcgagaaccatgatgcagggcctgacggtgacaagcgggatgaggatggcgagtctggggggcaacggtcagaggctgaggagggagaggtcaggactccaaccaagatcaaggagctaaagttcttagacaagccagaagatgtcttgctgaagcaccaggccagcatcaatgagctcaaaaggaccctgaaggagcccaacagcaaactcatccaccgggatcgagactgggaacgggagcgcaggctgccctcctcccccgcctccccttcccccaagggcacccctgagaaagccaatgagcccgtgaaaacagaaaccatgactgtcagcagtctggccattagaaagaagattgagccggaggccgtactgcagaccagagtctccgctatggataacacccagcaggttgatgggagtgcctcagtggggagggagttcatagcaaccactccctccatcaccacggagaccatatcgaccaccatggagaacagtctcaagtccgggaagggggcagctgccatgatcccaggcccacagacggtggccacggaaatccgttctctttctccgatcatcgggaaagatgtcctcaccagcacctacggcgccactgcggaaaccctctcaacctccaccaccacccatgtcaccaaaactgtgaaaggagggttttctgagacaaggatcgagaagcgaatcatcattactggggatgaagatgtcgatcaagaccaggccctggctttggccatcaaggaggccaaactgcagcatcctgatatgctggtaaccaaagctgtcgtatacagagaaacagacccatccccagaggagagggacaagaagccacaggaatcctgacctctgtgaagagatcctggcatttctggtccaacccaagccagagaaccattaagaaggggccttcattctggattctccgacgcaacactgacgtcccagctgcgacgtactgtcactgatgagagactgggaagggaaaagcatatatatatagatatatagagatatagatatatatacaggaaacaccgcatccttgcactgctgctggggctggcagagcagttggctgacagcaacaaccgacatctgaacacctacatttcctttgcagacaaattgaagaactggtgggatttttttcaagaaaaaaaattatataataactataatcccttgctcacccctttcccccgccaaataagaaacgcaagccagaccacgatgattgtagaagtccctcccgccctggttctgcacgttacagttagcagacgagcaattccatttgttcttctccagcatctctaaggcccacttgaatgcaaaggaaaacacttgcacagcaaagcaagagaagtcacagcagcaagacacgcacagtcaaccattttccgagaaaaaaagaaaattccccacttggaaagaaagaggaggaacactggattcttactttctggatcttgacactgggctgcaaaacctaccttcctctctcccgcctcccctcaccctcaactctcaatgtcttgctgtcattttctgtctcggctccctcctcccccttcccccttcccccaccccacacccttcaccctctgtgtcctggtccttctgagggccactgcagatgactctcctttgaaatgagaaaaagaaaagaaagcaagaacagaaaacgaagccacaggaagggaagtagacattgtatgcttatggtttctcattatgaaggtgcagcttgtaggaggtttgtacggatgtgctttgaagttatgtatattacatataacaggaaaaaatattaaaataaacagtgctggtaagtatgaagctgacattctaaaatt

SEQ ID NO: 289 - DNA, 4586 bp, Homo sapiens
attagaaatttgggtgcttcctcgcaccagcacatttcaagtgctcaatagtcgcatgtggcccgtggctcccattttggacagggcagatacagagtgtttctgtcattgcagagccttctctttgctggtgctgctgtatgctggagaagatgcgggtgctggggctggggcttgggaggacaaaggactggctgaggggacagcagctctgtcaggcctgggttcccccagcacctcggatgcccacttccctcttctgggcacgcggtctccttacgtctcatgttctgcttagcttgctacgctcgtgtccatggatcccctccccactgccagaggaagctgcctcttctttctggcaacttcagccttttctccttttcccggatggtggctcagtaagaaacctggctgtttcgggggaggcaagggacgggtccctcacctgggtttggcggatgggatgggggtgtgcacacacctcctttagttgctcctaaggtcatgttcaacattcgtggagtgcatttttctgctcagggagctttcccagacccggaatgtttggtgctcacagaccctggcaaggaccggtattgctgttcctcagttttgcctggggaaatggaggctcagtgacgttcagtgacgtgcccagagtcatgccattggcgggtggcccagggctccaggtctccagcacccctcggccccctcctcaccaggtcacatcatctcctggattagaaatctgctcacatagtctgtcctgaaaggaaaaaaatcggttacagcctcctgttgcccctaaagagggagatccccgggcatgaacgcaccttctcacccccactgtcgtccttggcctttgctcacggacctgggagggaagggtctgggtggttctgatctctgcaggccgaggcctggggaggcgggtggccctcggtagcaggcatcccaggccgtcccttccctgatgagcctctctacctttgctcagatgacccagctcatgaaggccgccaagagcgggaccaaggatgggctggagaagacacggatggccgtgatgcgcaaagtctccttcctgcacaggaaggacgtcctcggtgactcggaggaggaggacatggggctcctggaggtcagcgtttcggacatcaagcccccagccccagagctgggccccatgccagagggcctgagccctcagcaggtggtccggaggcatatcctgggctccatcgtgcagagcgaaggcagctacgtggagtctctgaagcggatactccaggactaccgcaaccccctgatggagatggagcccaaggcgctgagcgcccgcaagtgccaggtggtgttcttccgcgtgaaggagatcctgcactgccactccatgttccagatcgccctgtcctcccgcgtggctgagtgggattccaccgagaagatcggggacctcttcgtggcctcgttttccaagtccatggtgctagatgtgtacagtgactacgtgaacaacttcaccagtgccatgcccatcatcaagaaggcctgcctcaccaagcctgccttcctcgagttcctcaagcgacggcaggtgtgcagcccagaccgtgtcaccctctacgggctgatggtcaagcccatccagaggttcccacagttcatactcctgcttcaggacatgctgaagaacacccccaggggccatccggacaggctgtcgctgcagctggccctcacagagctggagacgctggctgagaagctgaacgagcagaagcggctggctgaccaggtggctgagatccagcagctgaccaagagcgtcagtgaccgcagcagcctcaacaagctgttgacctcaggccagcggcagctgctcctgtgtgagacgttgacggagaccgtgtacggtgaccgcgggcagctaattaagtccaaggagcgtcgggtcttcctgctcaacgacatgcttgtctgtgccaacatcaacttcaagggccagctggagatcagcagcctggtgcccctggggcccaagtatgtggtgaagtggaacacggcgctgccccaggtgcaggtggtggaggtgggccaggacggtggcacctatgacaaggacaatgtgctcatccagcactcaggcgccaagaaggcctctgcctcagggcaggctcagaataaggtgtacctcggccccccacgcctcttccaggagctgcaggacctgcagaaggacctggccgtggtggagcagatcacgcttctcatcagcacgctgcacggcacctaccagaacctgaacatgactgtggctcaagactggtgcctggccctgcagaggctgatgcgggtgaaggaggaagagatccactcggccaacaagtgccgtctcaggctcctgcttcctgggaaacccgacaagtccggccgccccattagcttcatggtggttttcatcacccccaaccccctgagcaagatttcctgggtcaacaggttacatttggccaaaatcggactccgggaggagaaccagccaggctggctatgcccggatgaggacaagaagagcaaagccccattctggtgcccgatcctggcctgctgcatccctgccttctcctcccgggcactcagcctgcagcttggggccctggtccacagtcctgtcaactgtcccctgctgggtttctcagcagtcagcacctcccttccacagggctacctctgggtcgggggcggacaggaaggcgcagggggccaggtggaaatcttttccttgaaccggccctcgccccgcaccgtcaagtccttcccactggcagcccctgtgctctgcatggagtatatcccggagctggaggaggaggcggagagcagagacgagagcccgacagttgctgacccctcggccacggtgcatccaaccatctgcctcgggctccaggatggcagcatcctcctctacagcagtgtggacactggcacccagtgcctggtgagctgcaggagcccaggtctgcagcctgtgctctgcctgcgacacagccccttccacctgctcgctggcctgcaggatgggacccttgctgcttaccctcggaccagcggaggtgtcctgtgggacctggagagccctcccgtgtgcctgactgtggggcccgggcctgtccgcaccctgttgagcctggaggatgccgtgtgggccagctgtgggccccgggtcactgtcctggaagccaccaccctgcagcctcagcaaagcttcgaggcgcaccaggacgaggcagtgagcgtgacacacatggtgaaggcgggcagcggcgtctggatggccttctcctccggcacctccatccgcctcttccacactgagaccctggagcatctgcaagagatcaacatcgccaccaggaccaccttcctcctgccaggccagaagcacttgtgtgtcaccagcctcctgatctgccagggtctgctctgggtgggcactgaccagggtgtcatcgtcctgctgcccgtgcctcggctggaaggcatccccaagatcacagggaaaggcatggtctcactcaatgggcactgtgggcctgtggccttcctggctgtggctaccagcatcctggcccctgacatcctgcggagtgaccaggaggaggctgaggggccccgggctgaggaggacaagccagacgggcaggcacacgagcccatgcccgacagccacgtgggccgagagctgacccgcaagaagggcatcctcttgcagtaccgcctgcgctccaccgcacacctcccgggcccgctgctctccatgcgggagccggcgcctgctgatggcgcagctttggagcacagcgaggaggacggctccatttacgagatggccgacgaccccgacgtctgggtgcgcagccggccctgcgcccgcgacgcccaccgcaaggagatttgctctgtggccatcatctccggcgggcagggctaccgcaactttggcagcgctctgggcagcagtgggaggcaggccccgtgtggggagacggacagcaccctcctcatctggcaggtgcccttgatgctatagcgcctcccctctcccctcagagggcacagctgcaggcctgaccaaggccacgcccggctctcgtgctctaggacctgcacgggacttgtggatgggcctggactctccagaaactacttgggccagagcaaaggaaaacctcttgttttaaaaaaatttttttcagagtgttttggggaggagttttagggcttggggagagggaggacacatctggaggaaatggccttctttttaaaagcaaaaaacacaaaacctcacaactgcctggcaagcccagtatcacttgtttgggccctagcgggactccaaggcagccacacgcccctcctggaagggtgtgtgcgtgtgagtgtgtgcgagtgtgtgggctggtgtgtgaatatctataaataagtatatatggtgtatattatatgtgtataaataaagtctgtacatattggagctctgggagatgctggaataaaagacaagagtt

SEQ ID NO: 290 - DNA, 3960 bp, Homo sapiens
aaaatgccgccagcctggagcggggaatccatggaccgtggggttgtggggttggggagcacgaaaacccagagaggggctagagctccacctccccagaccgccgaggggcgagagggcgcgccgggggccgtggttgccatggctcctggtagcggagcccggggggctggagatgccggtcgcggatggtcccttcttcctctttgtgcctctctctttctctcgctttttttttttttggagtgtgagtgtgcgtggggaggcagcacggagaaagtgattaatttggggagcagggattggagccgggaggctggggaaagccagcccctccgttcccactctccgggctcgctgcgagccacagtgtctcagccaggggcagggccggggaactcctgcgaaaaaccacgggcctgaggagcagcagccgcgcgggcccaggtgctgtaaactgcaaaccataatcctgtcttaatactgcaaacaaatcatagtggaactaaggggaacttaatttactgtttccaggttaactaaggtctcagctgtaaaccaaaagtgagaggagacattaagattttcattcttaccgggttgtcttcttcctgaagagcaatggagccgcttttacttggaagaggactaatcgtatatctaatgttcctcctgttaaaattctcaaaagcaattgaaataccatcttcagttcaacaggttccaacaatcataaaacagtcaaaagtccaagttgcctttcccttcgatgagtattttcaaattgaatgtgaagctaaaggaaatccagaaccaacattttcgtggactaaggatggcaaccctttttatttcactgaccatcggataattccatcgaacaattcaggaacattcaggatcccaaacgaggggcacatatctcactttcaagggaaataccgctgctttgcttcaaataaactgggaatcgctatgtcagaagaaatagaatttatagttccaagtgttccaaaattcccaaaagaaaaaattgaccctcttgaagtggaggagggagatccaattgtcctcccatgcaatcctcccaaaggcctcccacctttacacatttattggatgaatattgaattagaacacatcgaacaagatgaaagagtatacatgagccaaaagggagatctatacttcgcaaacgtggaagaaaaggacagtcgcaatgactactgttgctttgctgcatttccaagattaaggactattgtacagaaaatgccaatgaaactaacagttaacagttcaaattccatcaagcaaagaaaacccaaactgctgttgcctcccactgagagtggcagtgagtcttcaattaccatcctcaaaggggaaatcttgctgcttgagtgttttgctgaaggcttgccaactccacaggttgattggaacaaaattggtggtgacttaccaaaggggagagaagcaaaagaaaattatggcaagactttgaagatagagaatgtctcctaccaggacaaaggaaattatcgctgcacagccagcaatttcttgggaacagccactcacgattttcacgttatagtagaagagcctcctcgctggacaaagaagcctcagagtgctgtgtatagcaccggaagcaatggcatcttgttatgtgaggctgaaggagaacctcaacccacaatcaagtggagagtcaatggctccccagttgacaatcatccatttgctggtgatgttgtcttccccagggaaatcagttttaccaaccttcaaccaaatcatactgctgtgtaccagtgtgaagcctcaaatgtccatggaactatccttgccaatgccaatattgatgttgtggatgtccgtccattgatacaaaccaaagatggagaaaattacgctacagtggttgggtacagtgctttcttacattgcgagttctttgcttcacctgaggcagtcgtgtcctggcagaaggtggaagaagtgaaacccctggagggcaggcggtatcatatctatgaaaatggcacattgcagatcaacagaaccaccgaagaagatgctgggtcttactcatgttgggtagaaaatgctataggaaaaactgcagtcacagccaatttggatattagaaatgctacaaaacttagagtttctcctaagaatcctcgtatccccaaattgcatatgcttgaattacattgtgaaagcaaatgtgactcacatttgaaacacagtttgaagttgtcctggagtaaagatggagaagcctttgaaattaatggcacagaagatggcaggataattattgatggagctaatttgaccatatctaatgtaactttagaggaccaaggtatttactgctgttcagctcatactgctctagacagtgctgccgatataactcaagtaactgttcttgatgttccggatccaccagaaaaccttcacttgtctgaaagacagaacaggagtgttcggctgacctgggaagctggagctgaccacaacagcaatattagcgagtatattgttgaatttgaaggaaacaaagaagagcctggaaggtgggaggaactgaccagagtccaaggaaagaaaaccacagttatcttacctttggctccatttgtgagataccagttcagggtcatagctgtgaacgaagtagggagaagtcagcctagccagccgtcagaccatcatgaaacaccaccagcagctccagataggaatccacaaaacataagggttcaagcctctcaacccaaggaaatgattataaagtgggagcctttgaaatccatggagcagaatggaccaggcctagagtacagagtgacctggaagccacagggagccccagtggagtgggaagaagaaacagtcacaaaccacacattgcgggtgatgacgcctgctgtctatgccccttatgatgtcaaggtccaggctatcaatcaactaggatctgggcctgaccctcagtcagtgactctctattctggagaagactatcctgatacagctccagtgatccatggggtggacgttataaacagtacattagttaaagttacctggtcaacagttccaaaggacagagtacatggacgtctgaaaggctatcagataaattggtggaaaacaaaaagtctgttggatggaagaacacatcccaaagaagtgaacattctaagattttcaggacaaagaaactctggaatggttccttccttagatgcctttagtgaatttcatttaacagtcttagcctataactctaaaggagctggtcctgaaagtgagccttatatatttcaaacaccagaaggagtacctgaacagccaacttttctaaaggtcatcaaagttgataaagacactgccactttatcttggggactacctaagaaattaaatggaaacttaactggctatcttttgcaatatcagataataaatgacacctacgagattggagaattaaatgatattaacattacaactccatcaaagcccagctggcacctctcaaacctgaatgcaactaccaagtacaaattctacttgagggcttgcacttcacagggctgtggaaaaccgatcacggaggaaagctccaccttaggagaagggagtaaaggtatcgggaagatatcaggagtaaatcttactcaaaagactcacccagtagaggtatttgagccgggagctgaacatatagttcgcctaatgactaagaattggggcgataacgatagcatttttcaagatgtaattgagacaagagggagagaatatgctggtttatatgatgacatctccactcaaggctggtttattggactgatgtgtgcgattgctcttctcacactactattattaactgtttgctttgtgaagaggaatagaggtggaaagtactcagtt

SEQ ID NO: 291 - DNA, 2595 bp, Homo sapiens
agtacaggtttggaggttctgagaggctaacagacttactgaagcaaatagggactaaatgacaggagtgggacttgaacccagggctccctaccaaaatgcttttgctcactgtgttgcttttttgtggttgctgtaacaaattactacaaactaggtcgcttaaagcaatagaaatttattctttaactcttttggaggccagaagtccaaaatcaaggtgttggctgagccacattccctctggaggctctttgggggagaaatctgttccttgcctcttccagtttctgttgtgtatggggcattccttgacttgtggctgcctcactccagtctctgcctctgtggtcattatagccttcttttctgttctgtgtcttctcttctgtgtgtctcaaatctctctctctgcctttttcttctaaggactgactttaagagaatctacttgtcactggatttagggtacacctggataatccaagatgatctcacctgaaaatttttaattacatctgcaaagaccttttcttcaaataaagtaatattcacagggtctggggattgggatatggatgtgtcttttcaggagccaccatttaacccactaaattcattatatgctgtttaatgctgtatcttccttttggattgaagagatatgcttctgtttgaagatgggcaagtgggctagggaatttttggctagtaggtagaaaggaactttaaaaatatttctggttggtgctgtttagtaagtgcttgttaaactttcagaggtcaaatatcttgaacacaaattggagaaggagtaaatcagtataaagtgaaaaatatgatattttctccaaaaggcagtcactgactgctttggcagaaagaattgaggtgattactcaagagttccaccaaattgttgtgctagcttttacatttgcaaactataaaaaacgggactaaattaagtagcagctcactttttttattaacagtattacaagttgactttttcatttcttgtgtaattgagataaaagggggggtgtgtgtatgagagagagacaaagattttgttaatggttttagtatgattcatttcttatgtcatatgggcattctaatttgagtcatattaattaaggtgatctatgtatgtaaactctttgagggagggacttggcatgccttgtatacagctagatccccagtgtagttccggacacgtggtagatgtgctcagacaacattagctgtatgaatgaaagaacttcttatgatacccaaatctggcagccacaagtctcattacaatttactttatggagggtccccattggtaataaggtctattaattgtagaattgtccctgctgactttaagagacttcactctgtgtccttttatgctgacagagcctacaacttttttcatctccaataatcttcagctccaggccaaaaaaaagttgttcttgccctgctcacattaattgaaataagtcagtgagattccttctgcccaccacctcacttctcactagcatggggctcagctaccattagagatgttagagtggggctgttgtgcagttcttcagactattagtgctgtatgctatgttctgaggagggttcgggcttttatcttctcaaaaatgtgtaaaattttgactcactcatacagctttagatgttaacagatagaagtatactgactgtgtgtgctaggctcttccatgtattatatcagatgttgcttccagccaacctgagaagctaagtactaacattgtccctattttacagaagcataaagaagttaagcaacccaacctaagttcacaccaaaatttgaacccaggtagccttacttcattcagtgcccgtgttcttaaccatgtccaatgacagcctcaagctcatttgtttataagtaactcgttcttactttctaaaagcttttctgttttctttattttgaagctcagaaattagaaatctgactaggatatatatataggtatatgccctttttcatttatcctgtctggtactcaatgagcccttttgatttcataattctagtctcctcctgagggaagttttcttgtattatgttttgattattactttttccattatggtccttgttctctctctgaatgccttttatttccaattagacctcctggacctgctggttagttctctcatctttttattcaagaattccatttcttttttttttgctccagataatgtgatacacattcacctgcttttccagataacagatttgttctttggagggtctcctgtactttttacttcctcaattgaaatttaaaatttataaatcatgtttaaagaattacccaatctattattttgtttcagttattcccttgcattcaacagcatatacaaaataaaatatacaagtaaacatggtttattttagaaatgtgagactatttcaacattaggaaatactaatgtaagatatcactctaatagatcaaaggaaaaaaacttagaatcattttcacaaatactgcaaaggtatttgataaatcactactcattcttgat

SEQ ID NO: 292 - DNA, 3259 bp, Homo sapiens
tcttgcggcttcttagctttacgatggcaacaagtatggcggctgctagtggtagatttgaaagtgcgaagagtatcgaagagcggaaagaacagacccggaatgccagggccgaggtgttgcgccaggctaaagccaattttgaaaaagaagaaaggcgtaaagaacttaagcgacttcggggtgaggatacatggatgctacctgatgtgaatgagagaattgaacagttctcacaggaacactctgtgaagaaaaagaagaaaaaagacaagcattcaaaaaaagcaaagaaagaaaagaaaaaaaagagcaagaaacagaaatatgaaaaaaacaatgagtcatctgatagctcatcaagctctgaagatgagtgggttgaggctgttccatcccagactcctgacaaggaaaaagcctggaaagtgaaagatgaaaagtcaggaaaagatgacacccaaattatcaagagggatgagtggatgactgttgattttatgtctgttaaaactgtgtcatcatcatcactcaaagctgaaaaggaaactatgaggaaaatagagcaagagaaaaaccaagcgcttgaacagtccaaactgatggaaagagaattgaatccgtactggaaggatggtgggacaggtcttccacctgaagactgtagtgtgtcatcgattactaaagtttcagtggtagaagatggtggattaagctggctaaggaaatcttatctaagaatgaaggaacaagctgagaaacaaagtagaaactttgaggacattgtagccgaaagatatgggtcaatggaaatatttcagtcaaaattagaagatgctgaaaaagctgcatccacgaaagaagattatagacgggaacggtggaggaaacccacatattcagataaagcacaaaattgtcaagaaagtagagaatcagacttagtaaaatatggtaacagttcaagggatagatatgctacaacagatactgcaaaaaatagcaataatgaaaaatttattggtgatgaaaaagataagagacctgggtctttagaaacgtgtagaagagaatctaacccaaggcaaaatcaagagttttcttttggcaatttgagagctaaattcttgagaccctctgatgatgaagaactgtcatttcacagcaagggcagaaaatttgaaccacttagttcatcttcagcattggtagctcagggctctttgtgtagtggttttagaaaacccaccaagaacagtgaagaaagattaacatcatggagtcgctctgatgggagaggagacaagaaacattcaaatcaaaagccatcggaaacagtactgatgaacaccaacatgttccagaagacccaagagaaaaatcacaagatgaagtcttgagagatgaccctccaaaaaaagaacatctacgggatacaaagtctacatttgctggcagtccagagcgtgagtccattcacatcctgagtgttgatgagaagaacaagttgggagccaagattatcaaagcagagatgatggggaatatggaattagctgaacaacttaaagttcaacttgaaaaggcaaataaattcaaagaaactataacacagataccaaaaaatctggggtagagaatgaagaccagcaagaagtaatccttgtcagaacagatcagtctggaagagtatggcctgtgaacacacccggaaaatctctggaatcacaaggaggaagaagaaagagacagatggtttcaacccatgaggaaagagaaagggtcagatactttcatgatgatgataatctaagcctaaatgatttagtcaaaaatgaaaagatgggaacagcagaaaatcaaaacaagctctttatgagaatggcatctaagtttatgggaaaaacagatggagactattacaccctggatgacatgtttgtctccaaagcagctgagagagaacgtcttggtgaagaggaagagaaccaaaggaaaaaagctattgctgagcatcggagtcttgctgcacaaatggaaaaatgtctgtattgttttgacagctctcaatttcccaagcatcttattgttgcaataggtgttaaggtttatttatgtttacccaacgtacggtctcttactgaggggcactgcctgatagtccctttgcagcaccatagagcagctactttgttggatgaagacatctgggaggagatccagatgttcagaaaatcattggtaaagatgtttgaagataaaggattagactgcatttttttggaaactaatatgagcatgaagaaacagtatcacatggtttatgaatgtattcctcttcccaaggaagtgggtgacatggctcccatctattttaagaaagccataatggaatctgatgaagagtggtccatgaacaagaagttgatagatctctcttcaaaagatatcagaaagtctgtacccagagggttaccttacttctctgtggattttggccttcacggagggtttgcccatgtcattgaagatcagcacaaattccctcattactttggaaaggaaatcataggtgggatgctggatatagaaccaagactttggaggaaaggcatccgagaaagctttgaggatcagaggaaaaaagcactgcagtttgctcagtggtggaaaccatatgacttcaccaaaagtaaaaactattgaggtgtaccttccattttaaaatttttcttcagatcccgttcagttttatttccattgcatctaatgaagcaactgaccctcaggtcacaggcagagagagtcacagcagcagactgctctgggtcagtgacaactgtacatcaggagattgtgttgttttcttcttcacctgctcctatctatggacttcattttagtcaccatggagtaaaaacatatattcgatgatctgctcacattcctgctctctacctacttcttggtattccgaattgttcagttaatttagagaaggccttttctgaagggatatctaaaaagcataggaaatccttggttcagagggaagtgggtctgcttcatggttgttaagtctactgtctggcttcttttgcatttttaaaaataagacgatttaattttaatttcataggattttatagaaaagctcttaattttctactagcagtatatagtatcacttctattctttttgttaaaggaaaaggaaatgtccccaaagtattaaagaattaaatgatactgaaaattt

SEQ ID NO: 293 - DNA, 4277 bp, Homo sapiens
acacacacggcccgaccggcagccccagagcagaggctccactgatggcaggcgcccctggctaggctctgaggttcctttgccctcgccttgctgaatgacttcagctacgggacggacgagtacgacggagaggggaatgaggagcagaaggggcccccggagggctcagagaccatgccgtacatcgatgagtcgcccaccatgtccccgcagctcagcgcccgcagccagggcgggggggatggcgtctccccgactccacctgagggactggctcctggggtggaagcagggaaaggcctggagatgaggaagctggttctctcggggttcttggccagcgaagagatctacattaaccagctggaagccctgttgctgtttctcccagcccatgaaacccctgaaggccaccgccaccacctcccagcccgtgctcaccatccagcagatcgagaccatcttctacaagatccaggacatctatgagatccacaaggagttctatgacaacctgtgccccaaggtgcaacagtgggacagccaggtcaccatgggccacctcttccagaagctggccagccagctcggtgtgtacaaagcgtttgtcgataactataaagtcgctctggagacagctgagaagtgcagccagtccaacaaccagttccagaagatctcagaggaactcaaagtgaaaggtcccaaggactccaaggacagccacacgtctgtcaccatggaagctctgctctacaagcccattgaccgggtcactcggagcaccctagtcctacacgacctgctgaagcacacacctgtggaccaccccgactacccgctgctgcaggatgccctccgcatctcccagaacttcctgtccagcatcaacgaggacatcgacccccgccggactgcagtgacaacgcccaagggggagacgcgacagctggtgaaggacggcttcctggtggaagtgtcagagagctcccggaagctgcggcacgtcttcctctttacagatgtcctactgtgtgccaagctgaagaagacctctgcagggaagcaccagcagtatgactgtaagtggtacatccccctggccgacctggtgtttccatcccccgaggaatctgaggccagcccccaggtgcaccccttcccagaccatgagctggaggacatgaagatgaagatctctgccctcaagagtgaaatccagaaggaggtggagaagaggggtatcgaggaggttggcatctacaggatatcgggcgtggccacggacatccaggcgctcaaggccgtcttcgatgccaataacaaggacatcctgctgatgctgagtgacatggacatcaacgccatcgccgggacgctcaagctgtacttccgggaactgcccgagccgctcctcacggaccgactcagaccctgcccgaccccaacctcatcaccttcctcttcctgctggaacacttgaaaagggttgccgagaaggagcccatcaacaaaatgtcacttcacaacctggctaccgtgtttggacccacgttactgagaccctcagaagtggagagcaaagcacacctcacctcggctgcggacatctggtcccatgacgtcatggcgcaggtccaggtcctcctctactacctgcagcacccccccatttccttcgcagaactcaagcggaacacactgtacttctccaccgacgtgtagcccgaggcagggtggctgcgggcgggtggtggaaccagcccctccagcctggggtccaactcagacttgaaagactgcaatagaaaactcccaaacccagcactccagactcgagggaagccagcttccaagaactggaatgcgtacgtcttttgtgccaccttgtacaaagccggctgcccagccccagcctcaccaccgcatcccacctcctgccctccatacctctagttgtgtctgatgctccgtgctgttcgggaattgttttatgtacacttgtcaggcagaaaaggtagtgaccggcccggcgtgggcacacagacagcccgctttgttctttcatttcctccagcactttctttccgcctgagtccagcccaaggccttttattttgcgctgtgtaactgctgccagcttctcttggccctgctcccagatggcggtctcctggcagcctcccctcagtcttcctccacccgctcttccttcccagcctgcctgcatgcatgtgcacccttggtcttcgctccatcgccttgaaagctctgaagaggccctgggttgccgcggcagcagtggtctgtttgatgctgccgtttgccgctgccggcccctcctcagactccgcctttgggagcacacctgctttgccttgctgcctgtgcaaatgttggacaagcagacacactcacactcgtccccagcttagcacagagctggagcgcccatttctggaattttccgtttgggaatctccacttctggggtttacctgttcggcctcctgcctatcagtgaggcatctctgactgtttcttctactgcttttcagttcccttccctgctgttctatttcctttgagtgtaaagactcacaggtgacctgctatcgagatagccagagggtcaggagagaatgggggaggaggcggtcaggctgctgaggaaacaccacaggctgaacgggggaggaatgcacatgccacgctgggtgtcccgggtcgcggggaggcagctcagctcttaggagcaagttgtgggggcttttcaagaggggccaggcttcctggagggtgactgatgtggccgaagcaggtgtccaggcaggtaggctgcagccaggagctccctggcaccgcaggacctcgtggtactcttgccttagattttacacacactccacagccaagcactgccacggtcctccaggacctgggaagcaaaggcacaggcccacggtggccagccattgtggtgccgccccagcttctggatacagccttttgggtaaacactgggaactccagaagttgtggggagagtggggaatcagacagccgcctctaggggctgggttctgctggggcctccttgttggtgctgtaggcacccgccagggagcagggacccgacttgcagacgcattgcccggtactaggaaggagtgaggtgtgttcccaccgtacacttcccacacgagctgcggctgccagcctcgggccatcagcctaggagagcagatgcagctccaggggctcgacttatagccagttacagctccccggctcttctgtgtggcagagcgtcgtttccgggccctcagggctggggagctcagttcccattgcttgtgctcagggctgagtcttaaagaagggtttgccggccctaacgctgcagcgcgtgcgcggtgagaggccctttttgagcctgtttactcctgtggccttgggcagaacagtaaatactctgtgcacggaggaaagacatgcccaagaggaaggaagtactgaccatcggctgcctgtgagcagcttagcaaggagcccttgctccctgggaaaggcggtgaacttgagtctaaagatgcagtgcctggcccttcctaaggtccctgcctggcatccgagtgtcggtgtgtggcacagaaggctcctgcttgcttccaaagtgatggacaggaaggggcagagtgagtcacggcccagactgggcaccttcacgtctcagcctcagggagccccacagccccaagctcgctgaggcaacgtgagaacaggctatgggaaggctgcaaaggctgagaaatgcaaaggctcatatttataaatcccacccccagagtggggagggtcaggtgccagacctggactaaactgcaccaaggaaacacccagcagggtctcctgtgagccggggaccatgcagcccgaaacctccagtcactgcgcccggcaggagtcaggagccagggactgtgcagcctggaacctccagtcactgtgcccagcagggtgggctgtgcccagcaggagtcaggctaagaaacgccaggtctgcctgttcttgctgggcaatggctgatggctgccagtttctgctgatacacaggtaggatgggacccttcatgaatatctgactttaataagttggtaaggatatatttttttgtctatgttctgtttcaacttatgtagattattataaattgatgtaaaccacgtgagaggaaaatgttaataaaaaatgcaaagccccatcatttgc

SEQ ID NO: 294 - DNA, 4017 bp, Homo sapiens
aagaggttgggcggatgttgtgagccgggtcgctgcggccgaggctccggcccccaggaccactggctgcccatgagagatgaaggatggcatccaagggggccggcatgtctttctcccgcaagagctataggctgacctcagatgctgagaaatccagggtcacaggcattgtgcaggagaagctgctgaatgactacctgaaccgcatcttttcctcttctgaacatgcacccccagcagccaccagcaggaaacccctgaacttccagaacctgccagaacatttggaccagttgctacaggtggacaatgaggaggaggaaagccagggacaggttgaagggcggcttggcccatccactgtggtcctggaccacacaggcggctttgaggggcttctcctggtggatgatgacctcctcatgcttccttcagtgaggaggcctacatcccgccccaggtcttctataatggcaaggtggactactttgacctgcagcgcctggggggcctcctctcgcacctgcggaagaccctcaaagatgaccttgcttccaaagccaacattgtgatcgacccactggagctccagtcaaccgccatggatgacctagatgaggatgaggagccagccccagctatggcccagcgccccatgcaggccctggctgttggggggccactgcccctgccccggcccggctggctcagttctccaactttgggccgagccaaccgcttcctcagcacagcggctgtgagcctcatgaccccacggcggcctctgagcacctcggagaaagtgaaggtccgcacgctgagcgtggagcagaggacccgtgaggacattgaaggcagccactggaatgagggcttgctgctggggcggccccccgaggagcctgagcagcccctcaccgagaactcgctgctggaagtcctggatggggcggtcatgatgtacaacctcagcgtacaccagcagctgggcaaggtcgtgcactcttggaccccgcattgggtggcgggtgttgtgcgtgtttggttgtgtgtgtattcctgtgtgcacatgggcccgcagggctgcctgttcaagaccgtgcatgggagcacatgcctcagcgaggctggtttctgctcctgctgcctcagtctgacctgctgactgttgtgggaatgggaccgccctgggcctaaggttgggaccttggcagggctggggtccagactgggtctgaagaagcctggatgaagtgcccaaggggcactctggacatgtggtcccatgctgtgtagatggtgggtgtctccgatgatgtcaatgaatacgctatggctctgagggacacagaggacaagctccgccggtgccccaagaggaggaaggacatccttgcagagttgaccaagagccagaaggttttctcagaaaagctggaccacctgagccgccgtcttgcctgggtccatgccactgtctactcccaggagaagatgctggacatctactggctgctgcgcgtctgcctgcggaccattgagcacggtgatcacacagggtctctctttgccttcatgcccgagttctacctgagcgtggccatcaacagctacagtgctctcaagaattactttggtcccgtgcacagcatggaggagctcccaggtgatggaaccattcaggctgaggcagaagcagaaaaggggtctctagtgtgagccctaggagccctggtctgagacctctgtggcccagcaacacacatctgtggggggcggggaggggaggagcttcctctgtggttcaccctgcagcaaacaaacgtctgcaccctgccctgggacctgcagccacagagccaacagctccctagcaaaggaaaacagacaagatggaacacggtgggtgtagacctcttggctttcacttccttcctagtgctatgagcaactgccatggtccaggagccagctggccttgcaccttgactccctggcactggtcacaaagcgtagcagttggtcaggggcagaatggtttgtcttggtaaatcacagcagggggtggaccctgctagggtccacatccgaacctgggcctctcagcctgctgattccaggctgggcgtggcagtgtatgtctggatcaggcagtgagctgtcaggcccctagcctgccccctgcccagccacaggcctcagtgcaggctttgtcttcaaagacagagctgtgagtgcccaaggagctttgactgctcatcaggtgtgtgtgctgagatgggtttgagcccaggtcagggctcctgccagggcctgtcatcccttcacagtgagcctgtgccttagcccttgcacagccaccaatgaatgctttgcccgatgtccccagatgccaccctgggtccaggctggccttgggagccagctctagagcctgctacccaagtccacccaccctgctgacatgcctgcctctggagcccccactcccagccgacacgtctcacttcccacccttgcaggctatgaagagaccctgacccgcctggctgccattctcgccaaacactttgccgacgcacgcattgtgggcactgacatccgagactcactgatgcaggccctggccagctacgtgtgctacccacactccctgcgggctgtggagcgaatccccgaggagcagcgtatcgccatggtgaggaacctcctggcgccctatgagcagcggccctgggcccagaccaactggatcctggtgcggctctggaggggctgtggcttcgggtaccgctatacacggctgccacatctgctgaaaaccaaacttgaggacgccaatttgcccagcctccagaagccctgcccttccaccctgctgcagcagcacatggcggacctcctacagcagggtcctgatgtggcacccagcttcctcaacagcgtcctcaatcagctcaactgggccttctctgaattcattggcatgatccaagagatccagcaggctgctgagcgcctggagcggaactttgtggacagccggcagctcaaggtatgtgccacctgctttgacctctcggtcagcctgctgcgtgtcttggagatgactatcacactggtgcctgagatattccttgactggacccggcctacctctgagatgctgctgcggcgtcttgcacagctgctaaaccaggtgctgaaccgggtgacagctgagaggaacctgtttgatcgtgtggtcaccctacggctgcctggcctagagagcgtggaccactatcccattctggtggcagtgacgggcatcctggtgcagctcctggtgcgtggcccagcctcagagagagagcaagccacatcagtgctcctggcagatccctgcttccagctacgctcaatatgctatctcctgggacagccagagcccccagcacctggcactgctctgccagcccctgaccggaagcgcttctccctgcagagctatgcggattatatcagtgccgatgagctggcccaagtggaacagatgctggcgcacctgacctctgcatctgcccaggcagcagctgcctccctgcccaccagtgaggaggacctctgccccatctgctatgcccaccccatctctgctgtgttccagccctgtggccacaagtcctgcaaagcctgtatcaaccagcacctgatgaacaacaaggactgcttcttctgcaaaaccaccatcgtgtctgtagaggactgggagaagggagccaatacgagtactacctcctcagctgcctagccctcacagcctgtgccatcctggaacctccacctttgaacccagagccaggctgggccctatttatgagctccctttgcccttctcctgtatcccacaccaccacatccaacctccttgcctgcctgtatcctcattggtgggagcccagccatggccctaattgtgcctgagcttgactttcagtcagggccacagtgagcattaaattattattccat

SEQ ID NO: 295 - DNA, 3448 bp, Homo sapiens
tacacacatgcacatacacagatacactcatatgcatacatatacacatacgcacatatacacatgaacatacacacatgcatgcacatatacacacatgcactcacacacatacacatgcacatatacgcacatgcatacacacatgcacagacacacatacacacatgcacacacatacactcacatatacacacattcacatgcacacacatacacagacgcacatatacacacaggcacacatacactcatgcacacaaataaatatatacacatatgcatatacactcacatgcacacagacacatacgcatatatgcacacatgcacatacactcacatatacacacatacacacatgcacatacaagcgcacatatatacaagggcacatacatacacatatgcacacatacacatgcacatgcacacatacacataaacacatacatgcacacatacacatacacacacatacgcacatatacacacatacagatgcatacactcacatggacacatatacacacacatacccacatacacatatatgtatacactcacacacacatgcacacacctacacacatatacgcacatagacacacatacacatacgcacactcacacacatatatacacatgcacacacatatacatacgcacatacacacgtatatatacaggcacacacatacccacatgccgtgtgcgcgcacacacataccatgaccagcctgggccagacccacagcgtccaagggatttaagaaaaatactgccgtctaccccaacccctcaccctgcttttctagtggggatggcgatatatgccctaacttcctcacaattagaaaaacacttcgaaaagtaaaaatggccacacaaatccaaggctgaggcatgacttttagacttttctagtggggatggcgatatatgccctaacttcctcacaattagaaaaacacttcgaaaagtaaaaatggccacacaaatccaaggctgaggcatgacttttagacttatgttcattccattcagagcttgaggcccatttctcgcaatgcgttacatgaggctgaaggagccagtgagaaccttctctattaggtcgcccaccctctgccactgaaacagtcccaacgcctcccctgaggcctccccgacgccccacccagacaacctggaagtggcgtgggttcctctgggctggggtgggtggactgatcagtgattgctccttcaggggagagtgtgcaggccccctcctgaggcctgcctgtctcattcctgaggagttcatcccccaacccacaccctgctcaaacctgacaggaggaggtggagaagccctggggtgggggactgagggaggggaggcagaggcagctccacacctgcctgggggcagaaaggaacttctgcttccatatccaggacctggttcttcagagcagagcccggaagaggcactggcacggccagtagggttgtggagtggggagggggctctgcagctggccagtgccccccaccaagtcacattcaaggccttgctgctcctcttaccattctgtgaccttgtgcaaaatgacctgactgctctgtgcctcactggcctcatctttaaaatggggctaacctgcctgtctcacaggccgttgtaatggatgaatagtgtaacagatgaagggaaaacagcctcctcacacttggcacatggcaattctcaatcgatgacagcttttactctttttttttttaaatggagtctcgctctgtcacccaggctggagagcagtggctcaatctcggctcactgcaagctctgcctcctgggttcacgccgttctcctgcctcagcctcccgagtggctgggactacgggcgtgcaccaccacgcccggctaattttctgtattttttttttttttagtagagacggggtttccgcatgttggccaggatggtctcgatctcctgacctggtgatccgcccgcctcggcctcccaaggtgctgggattgcaggcgtaagccaccgcacccagcccagcttttactcttgtggtgaatgataaccttgtcatttaaatcaccagatttagcctggcttcaaaatctggtcatctggatgacaaggttatcattcactataagtatcaaagccccttctctgccacattctagctgtgtggactcaccgagttatgtaacgtctttgtgcttcagtttccctatctgtaaaatggggacaagaacagtaccttcctcataggtggctgtgcttttggatgcattcatatatgtaaagcactcagtgcctggtgtgtggtcaatgatcagtaactcttacctgttggtaagttatctgaggtctgagccaagatttgaacccaggtctgtgtgactccccagcctatgttcttaagcactgtattatactggactcatgccctttctcgtatgaccacacatggctctttcatacaaaatattttattccacttactgccacaggctattgatgcttaccttgcctcctggttccttttttttgagatggagtctcactctgtcgcccaggctggagtgcagtggtgtgatcttggcttactggaacctccgcttcccgggttcaagcgattctcctccctcagcctcccaagtagctgggattacaggtgcccaccaccacgcctggctaacttttgtatttttagtagagacgggggtttcatcgtgttggccaggctggtctcgaactcctgacctcaggcgatccacccaccttggcctcccaaagtgctgggattactggatgaaccaccgcacctggcccactttttaaaaagttgatagataatcgtgtgtcattaatacactttcatacactacccccctttcatcctgggccaggctttttgattcgaatgcctgccagaccctgttcctttggtggccctcctgggggtgcaaatgttgtctgtgccatctaaatttttgacatccaggtcagtggagagaagtatcttctattggtatcaggcaagaaatgggccccagatctccactcagtggtctctcttcactccctcaccccctcaccctctcctgcagcccagtcggcgcacctggacatatggctggtagtctcttctccagagactccccaaagcccaagctcaccctctggctgtccctgggctgggtgatgcgggcaagtcacttacactgtctctgcctcagtgtccttagcaaatggtggagctgatagtgcgacacctgccgcagaggcttatggtgagaattcagtgaaagagttcacgaactcttcttttgtgctattttaacccttctattttaaacttctaattatataatatgtgaatacatttattcacatatttcacttttggaaaatcttaaatatagaaaaaagc

SEQ ID NO: 296 - DNA, 3742 bp, Homo sapiens
attctactgaggcatgtgtcctcgccctgctgcatggtgcacccctgcgtgtgtgtccgccggatcagaacccctcactgcagggtgtactgtcccaggaagcgggaggcggacggagacaggctcccattttcagccccaaacctgacattccacagagacgttcctcccatttccgcagctgcatggacaccctcgcgtgccccgtttctgctcgtgctccctaatctgagcaccttcagaccctttctggtcccgggctcaggcctccttggcagcctcgccctcctccagcccaaggagctgttctgtcgtggctttggaattcagatgctctcactgtgatagagatggggtcttggggggctgggagctgttctgtcgtggctttggagttcagatgctctcactgtgatagagatggggtcttggggggctgcctccaccactgcctgccctgctcagcgctgacccacttcccttgaccagagttttggcctctctgaatgggacggtcgttttagtcctgagggcccataagaagcccagtggcggctgggtgcggtggcgcacacctgtaatcccagcactttgggaggccgaggtgggtggatcgtgaagttaagagatcgagaccatcctggccaacatggtgaaaccccgtctctactaaaaatacaaaaattagctgggcatggtggtagtcccagctactcgggaggctgaggcaagagaatcgcttgaacctggtaggcagaggttgcagtgacctgagattgcgccactgcaccccagcctggcaacagcaagactccgtctcaaaaaaaaaaaagaagcccagtggctcccttaataaaatcaccccttagccctctgtggtgggcagtggtgggacagtctccctgtggggagggtggctgcactgtccagccccaaccctcccgcttcgggacccccacttcccctttagggcctgagactctgactttacctcccaccgtactgcttggccatccagcagctttatgacacacacaagaacccccaggggcttgtctgtgctgtttcgctggctgctcccacagccacaggccctagacccatcctcttggaggtccttctagcgctgcctatgtggagattcttccccactcatcttgggggtttggatttgttgcataaagcagctgatgtgtttcccacagggtcctgccagctaagccaagggcccatgcattggcactggggtctagcagagagaggggagcaggatggcccggcctacctcaggcagcctaacctatgagcccatcctgagtactcctgatggagatggggaggtgcccagacagacagcaagtggggcccagccgcctcatcagaatcagggccaggctccacctgggaacaggcccgtagcctacagcccacggcccctgagagcagggtcatcacactccaatgagtcatgtgcattttgaatttcagttgctgcccagcccctttgccaggccctaatgtcttccagatctctggtggagaatgtgcccctgctcatcaacagatagctggctgggctggctccttcctgcctggtgcctcccccggctgcctttagcaagtgctgactgcactgagtccactgggaccttttccttttgggtttcgaggctcctcccactcacccccaccctagtgctggaagaagtgagtctgcagctgaagggttgctggggagtcagtctttcctcttacttaggaggggaccaggcatacacacactgtcacaggtcagccaggccagtcagggaccagtgactcaccttcctcctcagcctcctggcagccggccagccctaccccggccctgccgggacgaaggaggccacccactgtctagacagataacactgtgggtatacttatctgcagggcaagctcatgagaaaaatttttttcagggaattttgttttggggtctcctgagagttcccctgtggcccagtgtcttctgttttcttctttctccaaaaagatttaacatcacttcttccacctaaatgtctgccaaagtcattgcttccccaagagtctgcagcattagatctgctctccccttctaagccacgcacccttgatctctgttcatggtggcggcctccgcatcctcagggccgagcagggagtccgtgggtcagctgggctcccttcctcgtgggctgatatcaccgctgcatgtgtgcacaggcctcaccctgcagaccacaggccagggcactggaggacacccacagaggcctgtgccttcacttccatttcctcgtggagcaccccctcccaggggcttgggctgagctgagggacagctgtcatcctcatctggccaaggagggagccagggctcagcgatctggtgttgctacgtcccagggctctacgcccccatggtgcaggagcagtctctgcatttggccacaggccacctgcttccttgctcccccgccccaccgtggcttccttcccctcctctggctcttcttgttcccatctattccacccctctctcctttttctgacaggtccatggccaacctctctgtcctgtttgggcaggtggtccgggggctgagtgcaggtgcccgggtctttgagtacatggccctgaacccctgcatcccactgtctgggggctgctgcgtccccaaagagcagctgcgtggctccgttacatttcagaacgtctgcttcaggtcagcacggctacccctgccgccccggcttcgaggtgctgaaagacttcaccctgacgctgccccctggcaagatcgtggccctcgtgggccagtctggcggaggaaagaccaccgtggcttccctgctggagcgcttctacgaccccacggcaggcgtggtgatgctggatgggcgggacctgcgcacccttgacccctcctggctccggggccaggttgtcggcttcatcagccaggagcccgtcctgtttgggacgaccatcatggaaaacatccgctttgggaagctggaagcttccgatgaagaggtgtacacagccgcccgggaagcgaatgctcacgagttcatcaccagcttccccgagggctacaacacggtcgtcggtgaacggggcactaccctgtctgggggccagaagcagcgcctggccatcgcccgagcccttatcaagcagcccacggtgctgatactggatgaagctaccagcgcgctggatgcagagtccgagcgggttgtacaggaggccctggaccgggccagtgcaggccgcacggtgctggtaattgcccaccggctcagcactgtccgtggggcccactgcattgtcgtcatggccgatggccgtgtctgggaggctgggacacatgaagagctcctgaagaaaggcgggctatacgccgagctcatccggaggcaggccctggatgccccgaggacagcggccccaccgcccaaaaagccagaaggccccaggagccaccagcacaagtcctgagaagggccccctgaggtgtggtcgctgccaagcatcagtgttagggctggggctcagcctgggggagcctactggggactgagcccccaggagggccagcatgtggagagtcgctgcggctgctcctgctcacaataaagccggggccgagcagctggcaggggaggccaatccctccctcccctccccagtcctgccggctgcctccctccc

SEQ ID NO: 297 - DNA, 3646 bp, Homo sapiens
tattaatagcagttcagtggatagtttcactccgggatacctcactgcatctaattgttcctcagtgaacttccaccacatccctaaaatcttggaggggcagaccactggacaagagcaagacacaaatgtgaacatatgtgaggatggtaaagaccatatgcagagttcagctttagtagaaagtctaattacagtaaaaatggcagctgagaatagtgaggaaggcaatacctgtattattcctcaaagaaatttgttcaaagctttatcagaagaggcttggaactcagggtttatggggaactcatctagaactgctgacaaagagaatactttacagtgtccaaaaacacctttgcgccaggatttagaggcaaatgaacaagatgcaaggccaaagcaagagaaccatcttcactctctgggaagaaataaggtgggttaccatttacatcccagtgataagggccagtttgatcattccaaagatggttggttaggccccggccctatgccagctgtacacaaagcggcaaatggacactcaagaaccaagatgatatcaacctccatcaagacagctcggaaaagtaaaagggcatcagggctgaggataaatgattatgataaccagtgtgatgttgtttatatcagtcaaccaataacagaatgccactttgagaatcaaaaatcaatattatcttctcggaaaacagccagaaagagtactcgaggatactttttcaatggtgactgttgtgagctgccaactgttcgtacactggccagaaatttacactcccaggaaaaagcaagctgctcagcattggcatcagaggcagttttcactcctaagcagacccttacaattccagcccctagacatacagtagatgtgcagcttcccagagaagacaaccctgaagaacctagcaaggaaatcacctctcacgaggaaggaggtggagacgtttcacctcgaaaagaacctcaagagcctgaggtttgccccacaaagattaagccgaacctgagcagctcccctaggtcagaggaaacgacagcctccagcctggtgtggcctctccctgctcaccttcctgaagaggacctgccagaaggtggctccacagtctcagctcccacagcaagtgggatgtcttctcctgaacacaaccaaccaccagttgcactgttggatacggaggagatgagtgtaccccaggactgtcacctccttccctccactgaaagcttttccgggggagtcagtgaagatgtcatttctaggcctcattctcctcctgaaatagtcagtagagaagaaagtcctcagtgctcagaaaatcagagttccccaatgggcttggagccccccatgagtctgggaaaggctgaggacaaccaaagcatcagtgctgaggttgagtctggagacacccaggagctaaatgtcgacccactcttgaaggaaagcagcacttttactgatgaaaaccccagtgaaactgaggaaagtgaggcagcaggtggtataggaaaattagagggagaggacggtgatgtaaaatgcctgtcagaaaaagacacgtatgatacaagcattgactcactcgaagagaatttggacaagaagaaaaaaggtaaaaaattccctgaggcctctgataggtgcctaagaagtcaactttcggattcttcctctgctgacagatgcctaagaaatcagagttcagattcttcctcagcttgtcttgaaatcaaagttcctaagaatcctagtgcaaaacgttcaaaaaaagaagggcaccctggtgggacaacacctaagggccttctacctgacagtttccacacggaaactctggaggacacagaaaagccaagtgtcaatgaacgcccctctgagaaagatgctgagcaggagggcgaaggcggggggatcatcaccaggcagactttgaaaaacatgctggacaaagaagtcaaggagttacgaggagagattttccccagcagggaccccataaccacagctggacagccactgcctggagagagattggaaatctatgttcagtctaaaatggatgagaagaatgctcatatcccctcagaaagtattgcttgtaagagggacccagaacaggcaaaagaagagccagggcatattcccacacagcatgtggaggaggctgtgaatgaggtagacaacgaaaacacccagcagaaagatgatgagagtgatgccccatgcagctctcttgggttgtcgagtagtggaagtggtgatgctgctagggcaccaaaatcggtgccaaggcctaaaagattgacctcttcaacctacaacctaagacacgctcattctctgggctccttaggtgcttcaaaagtgacttcagaaaaggaagctgcacaagtaaaccccataatgccaaaggaaaatggagcttcagagagtggagaccccctagatgaggacgatgttgacaccgtggtagatgaacagccaaagtttatggaatggtgtgctgaggaggagaaccaagagctcatcgccaacttcaatgcccagtacatgaaagttcagaagggctggatccagttggagaaagaaggacagccaacaccaagagcaaggaacaaatcagataaactgaaagagatttggaaaagcaagaaaaggtcacggaaatgtaggagttcattggagagtcagaagtgttctcctgttcagatgctctttatgacaaactttaaattatctaatgtttgtaaatggttcttagagacaactgaaacccggtctctagtcattgtgaagaagctcaatactcgccttccaggagacgttccccctgtcaagcatcctcttcagaaatacgctccttccagcctatatcccagttcactacaggctgagcgcttgaaaaagcacttgaagaaatttcctggagctacccctgctaagaataattggaaaatgcagaagctctgggccaaatttcgagagaatcctgatcaagtggagccagaagatggcagtgatgtcagccccggccctaattctgaagacagcatagaggaagtcaaggaagatagaaacagtcatcctccagcaaacctgcccactccagccagtacccggattcttagaaaatattccaatattcgaggaaagctcagagcccagcaacgtttaatcaagaatgagaaaatggaatgcccagatgctctggctgtggaaagtaagccaagtcgtaagagcgtatgcatcaaccctctgatgtcccccaagcttgccctgcaagtggatgcagatgggtttcctgttaagcccaagagtactgaaggaatgaagggaaggaaggggaagcaggtgtctgaaatcttgcctaaagcagaagttcagagtaaacgcaagagaacagaaggcagcagccctccagatagtaagaacaaggggcctacggtgaaagccagcaaagaaaagcatgctgatggagccaccaaaacccctgctgccaagaggccagctgcaagggacagaagcagccaaccccccaaaaagacgtctttgaaagagaataaagtgaagatccctaaaaagtccgctgggaagagctgccctccctccagg

SEQ ID NO: 298 - DNA, 3854 bp, Homo sapiens
actagcgaaaaatgatttggctcggactgtcccgtgacaggcggtgcgaggaggccaggcccgcgcccgccgagccctagggccgctgctgccgacagccatggaggacgagcagcctgacagcctggagggctgggtgccggtccgggagggcctcttcgccgagcccgagaggcaccggctgcgcttcctggtggcctggaacggcgcggagggcaagttcgctgtgacttgtcacgaccgtaccgcgcagcagcggcggctgcgcgagggggcccggttggggcccgagcccgagcccaagcctgaggccgccgtctccccgtccagctgggccggcctgctctcggccgcggggctccgcggcgcgcaccggcagttggcggcgctgtggccgcctctggagcgctgcttcccgcggctgccgccggagctggacgtgggcggcggcggggcctggggtctggggctcgggctgtgggcgctgctgtggccgacgcgcgcgggtcccggcgaggcggcgctgcaggagctgtgcgggcagctggaacgctatctgggcgcggcggccgacggctgcggcggcgccacagtgcgcgacgcactcttcccggctgagggcggcgcggccgactgcgaaagcccgcgcgagttccgggagcgggccttgcgcgcgcggtgggtcgaggcggacgcgcggctgcgccaggttattcaaggacacggaaaagccaacaccatggtagcattaatgaacgtttaccaagaggaagatgaagcataccaggaattggttaccgtggcaaccatgttcttccagtacttattgcagccatttagggctatgcgagaagttgcaactttatgtaagcttgatattttgaagtctttggatgaggatgacctaggtcctagaagggtagttgccctggagaaagaagctgaagaatggaccagacgggctgaagaagctgtcgtctctattcaggatatcacagtgaattattttaaggagacagtaaaagcattagcaggaatgcagaaagaaatggaacaggatgcgaagagatttggtcaggctgcctgggccacagcaattcccaggttggaaaaacttcagctaatgctagctcgagagactctgcaactcatgagagcgaaagagttgtgtttaaatcacaaaagagctgaaattcagggaaagatggaagatcttccagaacaagaaaaaaatacaaatgttgtagatgaattagaaatacaattttatgaaattcaattagaactatatgaagttaaatttgagatattaaaaaacgaagaaatactgcttactacacagttggactctcttaaaagacttataaaagaaaaacaagatgaagttgtctattacgatccatgtgaaaatccagaggaacttaaagtcattgactgtgtggtggggctgcaggatgataagaatttggaagtgaaagaactcagaaggcagtgccagcagctggagtctaaacggggcaggatctgtgccaaaaagagcctctctccggagtagaaaggatcagtgcaaagaaaatcatcggttcagattgcaacaggctgaagaaagcataagatactctcgtcagcatcacagtattcagatgaaaagagacaagataaaagaagaggagcaaaagaaaaaagaatggatcaaccaagaacgtcaaaaaacactccaacgattgagatcatttaaagataaacgcctagctcaatctgtccgaaacacctctggctcagaacctgtggctccaaacctgccaagtgatctttcccagcagatgtgcttgccagcttcccacgcggtgtcagtaattcacccgtcctctaggaaaactagaggtgttcccctatcggaagctggtaatgtgaaaagccccaagtgtcaaaactgtcatggaaatatccctgtccaggtttttgttccagttggtgatcaaacacattccaaatccagtgaggaattgtcactgccaccacctcctcctcctccaccaccaccaccgccgccaccgccgcccccaccccctcctctccgtgctctgtcctcatcctctcaagctgcaactcatcagaacttaggcttccgggctccagtgaaagatgaccagccacgtcctctagtgtgcgaatcacctgctgagcgaccacgtgactccttggaaagtttttcatgtccaggatctatggatgaagtgttggcctccttaaggcatggcagagctcctctccggaaggtggaagtgccggcggtgcgccctccccacgcctcaatcaatgagcacattctggctgccataaggcaaggggtcaaactgaagaaagttcaccctgatcttggcccaaaccccagcagcaaaccaaccagcaacagacgcaccagtgaccttgagaggagcatcaaggctgcgctccagagaatcaagagggtgtctgctgactctgaggaggacagtgatgagcaggaccctggccagtgggatggttaggctcaagtttgacaaaggcacctgccacagtaggcttgaataaagtgggtgagtcttagacctatcgaaaagcatactaacagggtgctgatagatgggccacataacaccccggaagatcagcagggccttgtgtaggctgctgcagcattttttttttttttcttttttgagatggagtctcactctgtcgcccaggctggggtgcagtggcgccatctcggctcaccgcaagctccgcttcccaggctggggtgcagtggtgcgatcttggctcactgcaagctccgcctcctgggttcacgccattctcctgcctcagcctcccgagtagctgggactacaggcgccaccaccttgtccaactaattttttgtattttttagtagagacgaggtttcaccgtgttagccaggatggtctcgatcttctgacctcgtgatccgcctgcctcagactcccaaagtgctgggattacaggtgtgagccaccacgcccggccttttttttttctttcttttgagacagaatctctctgtcatccaggctagagtgcagtggcacgatcttggcttactgcaacctccacctcccaggttcaagcaattctctgtctcagcctcccgagtagctgggattacaggcatgcaccaccacgcctggctaatttttgtatatttaagtagagacaaggtttcgctatgttggccaggctggtcttgaactcctgacctcgtgatccacctgccttggccacccaaagtgttgggattataggcatgagccaccgtgcctggctgatgctggagcttttatgtgacatggtgactcttaaaactggggagggacgtagaaatgagagtttcacacaccagcccataggtgggatgtcaagacccatcggaagtgtcgctggcctaagagaagagcacttatttctcaccatggctgatctagaattgttccctgattctgaaagaagtttacactacactggtaagcagtactattagactactgactgtggccttctgtgcatatggaataatgatttctcagatttgtaggcttgaatgtgaatgttattttatcagtaatcagaataaattgcttatattcaggagttattttaaatatttaaatgaaatttattttaggcaccaagcactacctaaactcataataactatttgcaatgcattagcatcactcacggggtaatgaaaacataccttagctgctgtaaaagcaaagtcttccgtgtccgggtgggctgaaagtttttaataaaattttagctaaacatttgtttaagtgaatact

SEQ ID NO: 299 - DNA, 4290 bp, Homo sapiens
attttaaatgagcttggactcagttttagttattgacatgttggtgtgaaatttcttcttaagtattgcagtaatccaacagaaataatagaatttcgttatatttaggaagttacaaattatgtagtcataattttaaacttgtttttccagtagtacttattaactttaaaaaaaaaaaaaacccagctgtgctgttcagagaatgtttgtaagtgttgtacagaagaggaggaaaaactacttgtgctcttccaactgtgacttttatcacatagcttggaatttagtgttttaaaagatcgaatgagtcgagtgtgtattgttgttttggaggaggtagaagatgaatctcctgcattcatttctaaattgccacaggaaaataaatccctacattctccaccttctggaaatgtattggtaagatatccatcactggtgcaagctatatttaacggagatcctgatgaagttcgagcactaatatttaagaaagaagatgttaactttcaggacaatgaaaagcgaaccccattgcacgccgcagcttaccttggagatgcagaaatcattgaacttcttattttatctggagctagagttaatgccaaagacagcaaatggttgacacctttacacagagcagttgcatcttgtagtgaggaagcagttcaggtacttttgaagcattctgcagatgttaatgctcgagacaaaaattggcaaacccctttacatatagctgctgctaataaagctgtaaagtgtgctgaagctttggtacctcttctgagtaatgtaaacgtatctgatcgagcagggaggactgcattacatcatgcagctttcagtggacatggtgagatggtcaaactactcttgtctagaggtgccaatattaatgcttttgacaagaaagataggcgtgctatccattgggcagcatatatgggtcacattgaagtagtgaaattgcttgtgtcgcatggagctgaagtgacatgcaaggataaaaagtcttatacacctcttcatgcagcagcctctagtggaatgatcagcgtagtcaagtaccttctagatcttggagttgatatgaacgaaccaaatgcctatggaaatacacctcttcatgtagcctgctataatggacaagatgttgtagtgaatgaacttatagactgtggtgctattgtgaatcaaaagaatgaaaaaggatttactcctttgcactttgctgctgcatcaacacatggagcattgtgtttagagcttctagttggcaatggggccgatgtcaatatgaagagtaaagatgggaaaaccccactacacatgactgctctccacggtagattctcccgatcacaaaccattatccagagtggagctgtaatcgactgtgaggataagaatggaaatacccctttgcacatagcagcacggtatggccatgagctgctgatcaacactcttattacaagtggtgctgacactgcaaagcgtggcatacatggaatgttccccctccatttggcagccttaagcggcttttcagattgctgcagaaaacttctttcttcaggatttgatatagataccccagatgattttggcaggacttgtctacatgcagctgcagctggagggaatttggagtgcctaaaccttctgctgaatactggtgcagactttaataaaaaggacaaatttgggagatctccactgcactacgctgctgccaactgcaattaccagtgcctgtttgctcttgtgggatcaggagcaagtgtgaatgaccttgatgaaagaggctgcacacccctgcactatgcagctacatcagacacagatggcaagtgcctggaatacttattaagaaacgatgcaaatccaggggtccgtgataagcaaggatacaacgcagttcattattcagctgcttatggtcaccgtctatgtcttcagctgattgcaagtgaaactcctctagatgttttaatggaaacctcaggaacagacatgctgagtgattcagataatagagcaacaataagccctttacacttggctgcctatcatggtcaccatcaagcactggaagtgttggtacagtctttgttagatcttgatgtcagaaatagtagtggaagaacacccctagatcttgcagcttttaagggccatgttgaatgtgtggatgtactcattaatcagggagcctcaatcttagtaaaagattacattttgaagaggacacctattcatgcagcagcaacaaatggtcattcagaatgcttacggctattaataggaaatgcagaaccacagaatgcagtggatattcaagatggaaatggacagtaagtttcgataaataattgttgcatcacagaagggcgtatttcgaaaaccagagtacagtcttaagtgacagcactgaacctattcctgttgttgctcaggacgcctctgatgctatccgttctcaacgggcacacagactgtgtttactcattgctgaacaaaggagcaaatgtagatgccaaagataagtggggaaggacagcgttgcatagaggggcagttacaggccatgaagaatgtgtagatgcattacttcaacatggtgctaagtgcttacttcgggatagcaggggccggacgcctatacacctgtctgctgcctgtggacacattggtgttcttggagcccttttgcagtcagcagcatctatggatgcaaatccagccacagcagacaatcatggatatacggcacttcactgggcttgctacaatggttaagtatacaaacacaaatgcatatcattgtgtagtgaacagagataaaagaatgacatatttataaggcaaattttaagtttaaaattagcaaaaaccttgggaataatctactgtataggctcacgtactaataatacttagtacgtaggctcactcctgtcctttgtcatgctaaagccaagacactagttgtcaaaggtgttctgagataagccatgaagtatttttgaggtttttcttttcttttcttttcttttttagttttggtaggatcttgctatgttgcccaggctggtcttgaactcctggcatcaagtgatcctcccacctcagcctcccaaagtgttgggattacaggcatgagccaccatgtagcctgaagtttttcttagatccttatttccacaaatattttgcatttttaggaggtttttagaatgtttccattgcttttatatagtgtgcttgtattttgattgtgttcttttactatttttttttttttaagagtcccactatgttgcccaggctggtcttgaacaactgggcttaagcaatcctcccacatcagactccccaagtgctaggattacaggcatgagccattgcacccagccatgttcttttactttctaaatacaatcatattaggggaaaaataaccaaaagtaggagaaacagtgagatgtatcacattctaaactgaaatctatgtatgttttctgagcacattgcaagataacattcttatattaccagtaatatccatgttcaatgttttaaaggaataaatccctagcaggtcttagaattagaaactttgatgggttaactctgctacatggttaaaagagattttctttggcctcctacaggctcacagtcacagtcatcgcttttataggtagactcataaaaggtcacgtagggaagcataaagctactttgaagttatagatgttaaaaatgcagtttggcttatgaaatgccactaattaaaataatttatgcaatgaagcatgttgagatatttttagatttgatcatcttagaaaactcaagtacattatatacagtgcaagcatcagtgttgtcaaagttcaagcttcaggctttagtagagaaattagaggtttttaaaatttgttttcaatttcagtgtagcttcaagattaatgttaattatgacagcagatctacaaagctgtagttcacaattctaataaccttccctcaaaatgcagagaaaatataagttgtctctttatataaatacccatttgctaaaaataaataagtataatatctgttgtaaaatcagactgccttaccaggaagttgagatttcctatctttctataatatgctgtttcatagttctttcactgggagctgttctgacaaagttatcaagttaaagcaaaagaggaaaaagctgaatcttgtaaaattataacttcattaaatgtttccacaagt

SEQ ID NO: 300 - DNA, 3632 bp, Homo sapiens
acctcgcgtcttcccaccgcgtcggaggacgtaggcgcctgggatcctggaaggcttcggatgggaagtttgcgttggagtccaacacccgacaggaaccccagttaacgcctccgcatggccaggggcagagttgttgacacctgtagcttaatcaacgcaggtggagattcagggcttgaatcgcccggccacgcgcaagccgcagggcaccctcatactactacttctgccttattacccttaaaactggcgtctcagttatttgtatcccactattggtttttttttaatcttttttcgtgggtttgcccccttttcctcagctgcgtttctgtcttcagtcctgtagggcacaatgtctgaacaagagcgtatacaggaatgtctgcggaaggaaataaggtcacttctcatttccaccaaagatggtttgagcccacaggagttggagaaggagtaccttttgatggttggcaaccatctaccactccgaatccttgggtatcggtccactatggagctggtattggacatgcctgatgttgttcgtgtctgccccggtgcaggtggtactgtaatactgaaagccattccagatgaatctaccaaaggaatagcaagcttagttgcaaaacagaggagcagccataagcttcgaaactcaatgcataagggaagacctagtatttattctggaccgagatctcatcggcgagtaccttaccgaggaagggttgcccctattcttccagctgttgtgaagagtgagttgaaggacctgttggcgttatctcctgttcttctttctgattttgaaaaggcatttgccaaaagatttggacgatcattccaatacatgcaatatggatttctctctatgtttgaagtgcttaatgcggcttcagatgtcatttctgtagagcagaccagagcaggttctttgttgatgctaaagaagagtgtaacagaggaaaagccgagaggatgtccagcaggtaaaatttttacccagccatttagaatgaaacaagggtcatactccacaggctttccggtagcaaagccatgcttttcacaacccacttcaaacatggaaccaccgaagcaaataatgagcatggaaaagacttccaagttaaatgtagtggagacttcaagactgaatcacactgaaaaattaaaccagctggagaacacattcaaatcagttattgcacagattggacctggaggaactatcagttcagaactaaaacataagataaaatttgttgtatctaagttcccagagggtttgtttatttctaaactgcttggagagtatgaggtaatttttaaagagcaactatcaccaaaaaaattaggcttcttaaatgtgacagaacttgttggagctcttagtgacattctccatgttgagttcaggaaaggacaccaagacttactagtgtttgatgcggataagaagcctctaccacctgttcagtcagataagaaaatagaagccaaagcttgtgtctccagtccacctagaaattcattgtctactgctgctgtcaaagagactgtatggaattgcccttcaaaaaaaacaaaaagagccacaacagaagatttgcaagaagcctaatctggtggtaaagcctttacagctgcaagtagaaacaaacaaatcagagctcaacttggcaatggcaaatcatgacatcccgccagatgctgtgccgaacaagaaattatgcagactcccaccattagacaccagttccctcataggggtctttgtggagtatatcatctctcctagtcaattctacatccggatctatagcagggattcgtcagagttactcgaagacatgatgattgaaatgcggcgctgttattctaatcagctggtttctgatcgatatgtcatgccagaatgttttattcagccgggacatctctgttgtgtaaggatttctgaggataagtggtggtatcgggtcattatccatcgagtccttgagaaacaggaagttgaagtgttctacccagactttggaaatattggaattgttcagaagtcctccctgaggttcctcaagtgctgctacacaaagcttccagctcaggctatcccttgttctttggcttgggtgagaccagtagaggaacactggacatcgaaagctattttgcagttccagaagttgtgcggtttgaagccattagtgggggtagtggatgaatatgtagatggaatccttaacatttttttgtgtgacacatcctcaaacgaagatgtctatttccatcatgtcttgagaacagagggccatgctattgtatgccgagaaaatatctcttctaagggtttcagtgagctcaaccctttagctttatacacgacatccagtggagggccagaggacattgtcttgacagaactgggttatccttcccagcagcactattttaatgaagaccgaaagataagtccacagtcaaaagagagtgagttacgtatcttggatgagatccccactggaatgccatgcctggagtcagtgaccataggtgatgatatttgggatgagaactggttacctctacaggctaagatgggaaaaggaggtgatgctgcctcccatctatttactgcaagccttggtggaaagaatcagtattcatcatgtaaagaaatgccacagaaggactggtgtttttctacccctaaagatacatgggatgattcttggcagccttcaggccttgtaaatggaacgaaagtagaagttcataagccagaagtactgggtgctcaggaaaaaaatactggcacaaacaggactcaaaagcaactagacataaatggttcttcagattcttccacactgcccaaattggaagaattctgtacctctcttacccagtcagagcagtcagcagacgggagccagtctgaacccaacaacagtcagactcagccaaagcaaattcagctttccacagcagcaccctgttcaacaactgcagtggatgattccgcagaaaagccctctggttctgtggaaagctcaccagagatcctaaagaatgaagatttttctagcagccgtgctattacattgtacaaagacaagcgtcaagaatctgtagaccagctgtctttgattttgtcttatgagtgccagatttctcagaagctctacattcctcgaagtacagccactgctgccttaggtgctgccgcacggttagctacatccaggagcctcctacactggtaccccagtgtgaaaaggatggaagcatgagggagggagggaggagggagaaaaacagaatccagccgcttaggctttgatgaactcccaggccaaaatgaggagttattgaagcaaaatagtatcttgatcattgatacttttgtctttctgtgactatatgttagctttattatgctaacagtctactttgatgtgtaagtaagtattgatatttactgttaatcttgatttttcttgattttattctgtgtcattttgttcacctttgtttttaatgtagtttaaaggaatttgtttttttgtgtttgtttttcttgtacattatcatgactgataaatgaaaattgaaaaact

SEQ ID NO: 301 - DNA, 3408 bp, Homo sapiens
aaaaattagtcagatgtggtggtgcatgcctgtaattccaactactcaggagactgaggtgggaatctcttgaacccgggaggtggaggctgcggtgggtggaggttgcagtgagctgagatcgcaccactcactccagcctgggtgacacagaccctatctcaaaaagaagaaaaaactaagtccatactgatataaatgagtaattcaataggtaggaatagacaaatctgtgcagaataatgacaaataatttacgtacatatccaccctccaggagctggagcctaactccacccctcaggtgtgggccgggcacagtgactcctcctacagagtgtggcacggagcaggaggaggagacggtacctcacaggagcctgccagccgtgacctcagctaggtcatcgaggccagtggcaacactgcggagttacgctgtgcagagcgggaggcagacccagatcagcctgaggggagccccctcctctctgactgcagcacctggcttggggccagctgccttcgcccacttgtttctgttggttttctgaccggcaggcagggggcccaggccatggctgccccagccttgctgccagccagagggcagaagctgcctgctctcctcctgctccccaggcgccttccctgtgttctcctcctgctcccctggcgccttccctgcacctccactcacgccagcacaggcacggcagcttcccagcccacacagtgctcagaagggcccccggcacctctctgccactcacacagccacgtccccccagaaacgctcagcccccagctgcacagggtgagcccccaacaggcccaggggcctgctcaccagccaagtgcgggagctgagtgggcgctggctcctggcgttttgttctgtcgtgctgatggttgtctttgctccccagtgacacagcacataaaagagctcctggaaagaaacactaagaagaagtccaaattgagaaagaaacccaagccttatgttgaagagccggatggtagggcctctccccgcagcccctgggcgcggcgtctgcacagctctgctctccagcctcggccgcctggccttctcttctctaaccgcttctgggcgggggggatggggccactaacctcaggcctgtggcctcctgagcgagctggagggcccaggtgactgactggacccctggagcggtcaagcctgtccacacgtgtctttgtggtgtccagagccatttccaacttgcttgctgggttcttgatggggtgggggcatgataacttgccggctgagggctcctggaggtgcccccaggtgagtgtttgggcctgacccccacagggaagtttgtaggtggaggggtgtgtggtgccctgcagacaagcacccctcagtcctgtcttcccgcccagggctgcccctgggccacaagagccaagcctggtgttcagaatctgcaaggagtcgtcccctgctttgatggtgggcccctagcacagccccagaagcagggggagggcttccccaccctccccaccagcacccttcccacccacactctcacacagcttccacctctctaccttcccccaggccctggctcaggaaagccctgtgaacccagggctgtgctctcccttttgagagctacgctgtcagaccaagtcagctccgcgctcacacccatgcacacacaggcttccagggccgtcctcccgacccctgcagtgtggtcctgccagttagtgcctcacgcccactcatctgtctagagctccgccaccacctctctgctccacttcctttgagaccacttggcttaggcaccccttcctccaggaagccatccctgactgcatgctgcccatgcaggcccagaacagtgccagcgagctttctgtggatgaggtttgcttagggccaactctgggaccagcaggaggctacaggggcacgaagggccctcgtggggaatgccaggatggcatctgctgggctagggacttgtcctcaccctggcacctccgaggctgccaccagcaggtctgtgccaggggtccctggcccagtcccgagtcacccagcctggcctcacccaggaccctgggagaagagggccagctgcaatgtaggggtgagattcctggccacagacgtcctcagaccactccatctggggcagcgtagaaggagctttgcgctcctacctgggctggcgtccggtggcctgagagctggaccgacaccgctggccataaaagcctcctggctgcagccaggcggagcagggagcagactcccctgtgcctggagtggagcccagtgggacattgcggcccagggtgtgtcaggtggggagcagggtcaacatcaggaggccctggccacacctggtggcctgggagacctgtgacctggtcctgtagctctaaggtccccggggcaggcctggcccccgagcagagtagcacaggccttaggagagctgctgctgttggtgcctctgtgggcagccgtccctcctgggcttgcctacggccggagggggatggagatgagggctgaggtccaggcaaggccggatcagggcagtgggctcagagcagagcaccccacacaggtgagggtctccctgggctggcgatgggcactgcccactatcccactgcaggtcagcagacaccttggtgcctggccctgtgcctgaggcagcgtgagtgcagtcatccccaccttcctagaccttagggcacaggcagcctgacccccagagtgaagttgcaggtgaagtagtgtggcctcagtccctggcctgcccactacagttgtgacaccggcagctgcctgctgagcactgcaacagacaggcattgtcacagtccccatcctacagaggagtaaactgaggcacagagagactgcattatgatcaccttcatcagctgagaggcggtggccccagtgtatcccagtcacagagtgttggagggtgtcccagtcccaagcaggctcaggctggggtgtttgtcccaccaggggcctggggacaggagatcagggcctgtcttcccgcagggacagcaagcaggaggcccagccctgccgtctgccccaggccccccagcctagtgactacatgtcccagctgctgagctgaggccctgggtttctgccgccttcctgcaaagctcattccctccttgccttcttgaggctctgaagcctgggtccagtgtgcgtgggcaccatccattctagaaaaacaagggtacctcatagcctgcccagaggggcccttggttccacatggtcccacgctggaggctggggccacatcctctgccaagacctgtggtcccaaggaccatgacagattttctaggacctaaacgtctatg

SEQ ID NO: 302 - DNA, 3165 bp, Homo sapiens
caggatgctgtggctattgagctggtgaatgccggagccaatgtcaaccagccgaatgacaagggcttcacgccactgcatgtggctgcagtctcgaccaatggcgctctctgcttggagctactggttaataatggggctgacgtcaactaccagagcaaagaagggaaaagtcctctgcacatggctgcaatccatggccgtttcacacgctcccagatcctcatccagaatggcagcgagattgattgtgccgacaaatttgggaacacgccactgcatgtggctgctcgatatggacacgagctgctcatcagcaccctcatgaccaatggcgcagataccgcccggcgtggcatccatgacatgttccccctgcacttagctgttctctttggattctctgactgttgtcgtaagcttctttcctcaggtcagttgtacagcattgtgtcttcactcagcaatgagcatgtgctttcagctgggtttgacatcaatacacctgacaaccttggccgtacctgtcttcatgctgctgcttccggagggaatgttgaatgtcttaatttgctgttgagcagtggagctgacttgaggaggagggacaaatttggcaggaccccactgcactatgcagctgctaacggtagctaccagtgtgcagtaacattggtgactgctggggcaggtgtcaacgaggccgactgtaaaggctgctctcccctccactacgctgccgcttctgacacttacaggagagcggaaccccatacaccttccagccatgatgccgaagaggacgagccactgaaggagtcccgcaggaaggaggccttcttctgtctggagttcttactggataacggtgcagacccctccctgcgggacaggcagggctacacagctgtgcactatgcagccgcctatggcaacagacagaacctcgaactgctcttagaaatgtcctttaactgcctggaggatgtggagagcaccattccagtcagccctttgcacttagctgcctacaacggtcactgtgaagccttgaagacgctggcggagacgctggtgaatctggacgtaagggaccacaagggccggaccgcactcttcctggccacggagcgcggctctactgagtgtgtggaggtgcttacagcccacggcgcctctgccctcatcaaggagcgcaagcgcaagtggacacccctgcacgctgctgctgcctctggccacactgactccctgcacttgctgatcgacagtggggaacgagctgacatcacagatgtcatggatgcctatggacagaccccactgatgctggccatcatgaatggccatgtggactgtgtacatctgctgctagagaaaggatccacagctgatgctgctgacctccggggccgcactgccctccaccgcggggcagtgactggctgtgaggactgcctggctgccctgctggaccacgacgcatttgtgctgtgccgagactttaagggccgcacgcccattcacctggcctcagcctgtggccacactgcagtactgcggaccctgctgcaggctgccctttccacagatcccctggatgccggggtggattacagcggatactcgcccatgcactgggcctcctacactggacatgaagattgtctggagttgttacttgaacacagcccgttttcgtacctggaaggaaaccccttcactcctttgcactgtgcagtgattaataaccaagacagcaccacagagatgctactgggagctctgggtgccaagattgtgaacagccgagatgccaaaggacggaccccccttcacgccgctgccttcgcggacaatgtctctgggctccggatgctgctgcagcatcaagctgaggtgaacgccactgaccacactggccgcactgcgctcatgacggcggctgagaacgggcagaccgctgctgtggaatttctgctgtatcgagggaaggcagaccttactgtgttggatgagaacaagaacacggccctccacttggcttgtagcaagggccatgagaaatgtgccctcatgatcctggcagaaacccaagacttggccttatcaatgctaccaacagtgcgctgcagatgccactccacattgctgcccggaatggtctagcttctgtggtacaggccctgctgagtcatggggccacagtgctggctgtggatgaggaaggtcacaccccagcactggcctgtgcccccaacaaagatgtggcagactgcctggccttgatcctttccaccatgaagcctttcccacccaaggacgccgtcagtcctttcagcttcagcctgctcaagaactgcagcattgcagccgccaagacggtgggtggctgcggcgccctgccccatggggcctcctgcccctacagccaggagcggcccggcgccattgggttagatggctgctactctgagtagccccctccagtgtccctcccccgccggtggcttgatatctaattctatttatttagaaaaagtctaaacatttagggcactttaaaggagaacacgactgggtggagggggcggaggggaaggaagccctggggagcagctgctcacccctttgccacaccatcttggcctggcaggggtctgggactgacagggagcaccccaggcccttggtacccccagggcgaccccttctgccaagtgtcccaaaatgattgctaaatgcctggctcccccactctttgactccatctcttggttccctctttctgctgccagctcccccgactcttccctggggactcctctctgtgtcccccttctcccctgcccctactgccaggcagatcccctcttcttccatacccatcactgcctccctgctcggccggtccctccatccccgcagcagtgagaagccttaatttctggtactgtgtgagcactctgggggtgtccccctccccccttcaggggcagctagaggatgaggggggaggatatttagcactggggcctggagctttttccccacttctgtaccccacaccccatctctcttccctaatcctccaagtcttcagcgagacccttgcattagaaactgaaaactgtaaatacaaaataaaattatggtgaaattatg

SEQ ID NO: 303 - DNA, 3220 bp, Homo sapiens
ctgtttgtgtttcttctcctgtgccccaaatgcctccatcaccgacagcacccaatgggctggttgactctgtaacatatccagtgtctccaccgcctacctcagggccagcagctcctccgccgccgcctccactgccttccctcgcatcactctcacactgtggatctcaagcttctcctcctccaagcacccctattgcctcaactccctcatccaagcctagtgttctcccttctccctctgcagctgcccctgcctctgttgagactcctctccctaatcaagtaccccctcctcctccaccacctcctgccccacccctccctgcatctggattctttttggcatccatgtcagaagacaatcgccctttaactggacttgcagctgcaattgccggagcaaaacttaggaaagtgtcacggatggaggatacctctttcccaagtggagggaatgctattggtgtgaactccgcctcatctaaaacagatacaggccgtggaaatggaccccttcctttagggggtagtggtttaatggaagaaatgagtgccctgctggccaggaggagaagaattgctgaaaagggatcaacaatagaaacagaacaaaaagaggacaaaggtgaagattcagagcctgtaacttctaaggcctcttcaacaagtacacctgaaccaacaagaaaaccttgggaaagaacaaatacaatgaatggcagcaagtcacctgttatctccagaccaaaatccacacccttatcacagcccagtgccaatggagtccagacggaaggacttgactatgacaggctgaagcaggacattttagatgaaatgagaaaagaattaacaaagctaaaagaagagctcattgatgcaatcaggcaggaactgagcaagtcaaatactgcatagaggaacagactaaggagagataggactttaatctggaggaaaaatatcctacaaacaacaactgttcacaacagcaaacccctacatttatgagctgtaagaagaaaatggagacaaacagaaggagggaaaaaccaacctactctgaaagccttcagacattatgactctggtgataagctctttccctctccgtttgctgcttttttctggcctttacaacagaatggaagagaatcatttaagagttcctgtaacagttatgcagaaaatactaaaacccatcaggcaagatcaccacgcattgaaatattttcatatcaagataaagtcgcacattttccacaatacattgctaaaataaagaggagaaaggcttaggaagtttttttgcagagagtgctggtaaagaattgagcaagtttgctattgtattgtaatgtttctctcaggtttgttcttcctatcatgtttgatattccatgaataattgagatcagccctatgtaagttaagatcataatatgtggaacaaatggaattgtaagtgctttcaaagggtaatatttataagaaagtgtccgaaaaatgtttcttcagcttgagaaattttagaatgataggaagtttctcgagttagccttcatgcaattttgtagattaaaacataaaatttgtccagaacttaaagatttagatgccttcctaaattgttacaatgctttaccaaatctatgacttctacataacacaaaccagtggtcaaatgtaaacactatattgtagatttactgtaggttttcaaccttttttagatttatgcatgtggacatttttataatgtaattacaatcaccacaaggttagcttttttaattgcagacagtaatgcatgtcacactaatatgtagtggccttttcaaggcctagtcccagggaaaacattttgtagagtataggggagtgggaggaaggggaggaataattttttatttaaagttgatttctgcactatctttttctcagttacctgcatgaataaataatgagaaatattttgtgactttaattggtaaatatgttacaaaaccaagtacttaatcttttacatcatgtcttcagctatttgtattttaaccagtaatttcaatggtctgaaacatgattctgagcttcacataatatcttaactgtggaactcaaaagtttgatcactgaatttggcagttattattacctaggtacccccgctgttacacaggtgtttagatacgtgttcctgaatgaagctgcttttgaattttgttatgttgaaatgcaagaaataacaatgatggcagcaattaaggtcacagaaatcattaggtaaaggaaaaccaatgaggagttctgcagttttcttttaataagtaaagtgagacttgggtggtgggaagaaggaaggtgggaagaaggaattagacactctgcctgccactctgcgtgtgtgtgctctcgcgcacgtgctgtctatatggaagccactcccttttctttcctttgaaactggtaaggttaaaataggggagaaatcctacatgttggaatgatagctttttggaaaatttaagaaactctccaggctctccatcttgatttatgcttgagttgttatgtgccatatttgctttgaactctgattatcagaagttttactaaaactttgaaataattcactttcatctgctttctagattttgtacatctcagtccataaagcaaagcttgttgatagtgtagttttctaaacgctgcaaatttgcagcctttaccactacaaagaagtttggatgagggattttttttttctttgtcaaaatagttcctgtttctgtagaaatttcatttttagattaaactgtgatggatgagctatcataattcaagtatacatttcttttttctatcagatattcattgtcatgcagtagtagtaaaaacatcaaagatgcagcaagcttattaagtattattttctaaaagaaataggaggcattttcatctttattattgtacttttggttatgcaaacactttgataatataaacagttatgtcccctataaatctggtcagcaacctcttttgattttgttgggtaagttaaatagtctgtagtaggtagagtactgggtacaagtggtccaaactaagataagagactaaaataaaatgctaaatcttaaaagaaactgggtttatgcactaaacgttttgtgccttggtctaatattaacatgatgtatgtgtaaactgac

SEQ ID NO: 304 - DNA, 4466 bp, Homo sapiens
agtacttcctcctggttgttctcctgaggaggaaaagaaggggtgactctccacatccttgcagcctcacctcatcatccctgcctgctgcctggccacacctggtcactcaagacctccttcagtgccctggtctcagctgcctcagtaggtgagttacgtgatggatcagggtagagggacttccatagagtgctcactctgtgggccccggatggcaggcaggcaggcaggcagtccagatgagggcagtgatgacctgagccatgggaatgaagcactggggggtggggagacaggcagaagctggaaggaggagccctccagaagaggcagagggccggagtgtggagctgccggagccctggaggctgggggagaggcccttactcccatggtgggggacctccctgaggtcctgggcagctcctggagtaatgaagcctccctgatcacctgtctggagcaagaggggtttgcggggatatacctgtggggctccacgtggtgataggggagcagcaccatcaggaaggggaggccttgggactgtaaagggttgaggtcagtgagggtgggtgggtggagctgacgcaatggttgggcccatgggctaaaggcaggatgttgaaagcttaccgatctcttcggtggccccgtttcaggggcccaggtttcctgtgctgctttgaatgctgagatcccatgggccagggagtgcctcctgggaacaaaatccctgtctcggcaaagaaagaaacccagaaagaaggcaaaggtgtcctggcccccatcgtggccacaggatggagtgggtttaagggatggtcccacttcaggctgcatagtaagacctggagcctgttgaaactccctgtattcgcctcagtactgaaaccagcacttggatgtctcccttcatcaccgtggcaacagtcagactaacaaccaccatcacccattaattaggacatggaaacatcttctggtcgcagtctccccccaaacccttcaggaccagactgaatcctcaaggtctcagtggccatgccacacagggacacccaattgctggtttccatggcaacacggaggccaagtctctctgcatctgtgggttactatagcaacccaggcagagacaagtgcactgcggacaaaggccccatctggaggaaccaccgaggacacattcactgctgccctctctgcggccagctctgtgctagggctcaggctgtgtgctgggaggggcacacatcgtgccttctagggactgatggaagatctaggatttgcttgtctgtgtcctcagcctcttgtccccttgcttcacctgaaatgcacctgggtgttcccatccactcacaaggcttcatctcccacaactcttacattgagaacatccaaggctgcattgtggacccagccctcttctaaactctacctacctgctctctggaccctgcaccccggatgtcccacagcacctcaagttggggtatgtagttttggacttcctgtgagtctgaacattcactctatacattctgtctctgtgagtgacatcactcagccccttgaggcaccatcgtagctttctgcttttccctgtccaccttcctccaccaacccagacaatcatcaagcactgctcatgccatctactgagcatctctcaattctatgcacctcaccttccctagagccacttctgagctagggccttcctgtctgttgcccagatcttggcatcatcatgggcatctacacctaacttgctcctctcaaatccatcctgcaactgacaccagagtgagcttcctaagatcatgtcctcccagcctacttaaacccttcagaagacccccacttcctctggacagaatctaagctactttagtccgcccgatgatcctgccaactgtccagccttatctactaccaggccctggctttaactcctaatgacaacatcaccttctgtctgtcccttccctccctccagccccactacttcccctccatgtccatcctcagccatgctcttgtaaaaattacacccagattttcaatgagaacttggaacaataattaggaatcttcagaatccaatttcaagtatcagaaggaaaagtgatacccagatgcaaagctggacattgctgaccccaccccaaatggacgctggagacccagacccctcatctgctaagcagacagactgtaagtggtcatggaagaagggtgcaaaagtgaacacattctgttaacactcatggcctccagaaaacagaagaatcacggacatcagctgagaagcgcatctcatccttcccctcccataacactgttgggaaaatcaggctcagagaaaggaaaggtcaaagccaaggctcccaatatggagtcttccattctctctgcttggacacatgccccaaagctgcacagccagcctcaagggagtcagtgcaaggggcacacgcacagacatcctgcatgccggcacctgccaggtggggaagtggacgtgtgcatgcacctgcaactggagacctcatcctccatctcccagaaactctctttcaggtgtctttagtcttgctacaggtggaatgagaccctccagtcagagtaaaaggacatctcaaagccaatgctcaggccagcactttctcaagcacaacatcctccctggtttccttcctgccaaagctctcaggtttggtcacagggttaaaccaaggaaagtggaccaggaaaaaaggtgaacttatcaactgtagatgaagccagcttcctccagggaggtccattcttaccttaaggctggaccatggggcccgtgctactgagacttgtgccatgaccccctggaggacaaccggggaaagatggtcaaacagaacctcagggctggataaactgcatctctcaagggtcatagctccctggggcaggcagcccttttgaggctaagctgctggatggtgattatgaaacctcctcatgcacactctgagcatcagggtgtttgctcttcccagagcggtccctccatctttgtagttggccattgctgcttcacctaaagctcaaacacacctcccttcagtcctagttctgtcctccatggccccacagaacatgactcttcagtcggtcacagtgctttgcattagtgcactgaatggtgagcacagccttctaagaaggatgctatcattgatatttcacaaaaggggaacctaggactcagagaggggaatttaagtggcagagtgcataggaggaacaggaaccatgtattcctatctgcaggaaaatagaatgacttactactgccaggctagatgaccagctggctctgtgctgcagtaggggctcagaagggagattacagagtggaacaggcagggcagaggtgcttctgatacatgtcccctgagaccctcaggcctcccaccgtgacaggcatctggacactgtgaccagctggcctaggcctggacctcgacataacagtgtctcaagtcccagatataatttggcatcttgggtaccccttcaacactgatctttctaaaatgtctgtttaccttttaggctagtggagcacagccaggggaggacaggaggagggtattctctggagacaggtgtgcccccctactgacagaccctgctcagcagaacagaagcccttcagcgaatgagacctaccctctgcggaaggctggttaggaagcatccatgtctacttcagcgtctcacctccctgtcacaaacagatcaccacagttttcctccagcctcatgctgtcgtccccctagaggaatgtgggtacatggaatgttctccacctccatgcatgtccagtgacgttttggatcagcgtgtcagggacgctgtcaggcgtgcctgcttgcactcatccagccctggctggacgtgattctacgagcagagcaagaccagcatgttctgtcctccagttatcacagcagttactctggcaacctgcaggccctccctgaggtgtctgacggctgaagcagggtccagtgggatggaatgaaggatgggcaccctggaagacagcccatggaggggccctttgggtcccctgctgccctgggcacctgcgaagagagaagctgagccaccctgcctgaggcagtaggcagtaagagctgaagggagcaggaggttagggcccagcgggaagtgagagcagtggggccagcaccagggtaagctgaataaagctctcgcctgaggcgcagaatttaaagatctgccaaaaaaactcagcagccaagaaatttaatacttccagcaaatcaaagcaaaactgtccatgataaacaaggctggagttagggtaaggcaagtgaggccaatacaaggcccgcaaatccagtgttgtatcgtgtctttattaaaggtttgattttgttgt

SEQ ID NO: 305 - DNA, 3310 bp, Homo sapiens
gagcaggacgcgccggggccgcctcctcccgcacggacccatgaaccagccgggcggcgcggcggctccgcaggctgacggagccagtgcagccggaaggaaaagcactgcgagcagggagcgcttgaagcgcagccagaagagcaccaaggtggagggcccagagccagtgccagccgaggcctcgctgagtgccgagcaaggaacgatgacggaggtgaaggtgaagacagagctgcccgatgactacatccaggaggtgatctggcagggcgaggccaaggaggagaagaaggcggtcagcaaggatgggaccagcgacgtgcctgccgagatctgcgtggtgatcggcggcgtccgcaaccagcagacccttgggtcttacgaatgcggaatctgtggcaagaagtacaagtattacaactgcttccagacccacgtgcgggcgcaccgagacaccgaagccacctcaggggagggagcctcccaaagcaacaatttcaggtacacatgtgatatctgcgggaagaagtacaaatactacagctgtttccaagagcaccgagacctgcacgcagtggatgtgtttagtgtggaaggggcccctgagaaccgggcagaccccttcgaccaaggtgtcgtggccacggacgaggtgaaggaggagcccccggagccattccagaaaatcgggccaaaaactggcaattacacctgtgaattctgcggcaaacagtacaagtactacactccctaccaggagcatgtggccttacacgcccccatcagtgagtacctcctcccggtagggatgggggttgggggacccgggacagggtgggccagccgttggccaggcctctggaatttggccaggaaatggtgaaagcaaggtgagctcagttctgggtcagtctttaggtattatgtctgacccagggccacctgtctacagtggccggcatagctgagaagtccccctcttaagccagagcagagtccgagccctcccttagtggactcagagtcctgtgcccacatgattggggtgaggagggtggacatcacttgtccaagtcctgctgtggccctcttctaggtaccgctacatcacaaggtttatgaatctccacccccaaagccagttccgcatgatgcagcttcagtctgaacagatgcatgaaggagcccgggctaggggcgtggttaactggacaggaaagctccctcttggtccttgatggtgggaagctaaggaggtggcaggaaccctgagctgggagtcaagccctggctgttaatcccagctgagtcccaggcctgcttgtgacctggggcaggctgcgtcctgaccctggaccaccatctcccactctgactgggaaaggaaagggctctaagggcccttcccacagtgacatcctcaccttccatcctcctggtgcccgtgagcctaccttactgatttcccagctccttttctggatatttgaggggtctccatcctcagatccccgagtatatgagctagggggctcatcagcctccctctcttccatgtgcaggtgcagaaaccaaagtctgacaggggtggggcttgtgcagtctcagggcagtagggctggatgtttagcagcgtttttggaagtgttgctggttttgtttctcacagcagagctgtggggatccctctccccattctgtggatgggaagactttggtccaaacagagagggagggtttacagaaggtcactgggggctgaagccctttatagtctgggaaggcccaggtccctcctagagccctgctgttgggataccaagggtattggatagggagggagaagtattcagagcctggagggtggtgtaggtagcttccccaggaattcctcccctctgggcagagtggcaggggctgaggggtcttcccgtgggtgagaactccagtcctgaggtcgagcactgggctgagattctcatccctgcttgcccctcactgctctgtgaccttgtgcctgttgctttccttctccgggctcttttcccatctgtgaaagctgtttaaggtcttttcagcccaggatctggattatagacatctctgacatgaggtacctgctatggccccactagaagaatccattccacttcccagcctgggctatataggtcattcagtacccgccatagagccagatcttgtgtggagagagaggatgcaggattccactgggtaggcaccgactgtccagttgacccacttgtggtgctgatgcctaggcagcagggctgtggtcgggcttgaacaccatggcctgcgcccctctggagatccagctttccataagcaggtacagggcagccatgtttgttctccagtgaagcagcaactgccctgctccctggtgcccaggctggatgctacccagaatgcactttcagtgaggtgttagctacaaggccagactataaccttgagttcagcctttggagactatcttcagtgcttcctgggacaagttgagtaaggccatggagttagtaagatggggagcttggctttgaattccggcaggcaggctccaggcccacactcaaccatgaagctatcctacatcccatgtcagatggtaaagcagaaaggggtgtgtctcttccaccctaagtttttccctgacagcctggtgcatctctcctgaagggctgtctacttttctttctgtgttcctcactttcttttgctttctattatgaactctctttctttcttcctgtatctgcttgttgaattaatctctctgttacctactgaagtctggggactcagggatcatctgtgtttaaaatacagcatgagagatttagcctagattcaagagagaattatttatccaaggctgtccaagagatagctcctgcagtggcctctggtgttagagatttgtgtgccaatggacttcttgtggaggcaggggctggacttgagggcttcatcaggtggtatccatggctgggacttgagactctgggtctggtgagtgtccataaggacatagactgactgtggaagaatttcttagaattagtgtcatagaatctatattcttttatgtctgacttcttttgctcagcagaatgtttttaagattcatattttatcatattctcatatgtatcagttcattcttttttacttctgagcaatgttctattgtatgaaaataccgtttgttagccatttacctgttaatttgggttgtttccagctttaggctattataaataaagctgctatgaaaatgctt

SEQ ID NO: 306 - DNA, 3521 bp, Homo sapiens
caataccagatgcaagatgtgttggagaaatctgatcatctaatagctgcagcaaaagagctgtttcctcgtaggcgcacagggtttccaaatgtaacagtggctcctgattcctctcagggtcccattgtggtaaatcaagaccctatcacccaatctatctttaatgagtctgtcatagaacctcaggctcttaatgatgtagatggtgaagaagaaggaactgttaatagccagtcaggagaaagtgagaatgagaatgagttggataactctctaaactctcagtctaacacgaatacagacaggtttctccaacaactaacagaagagaattttgagttaattagtaagttgtggactgacattcagcagaaaatagcaacccagtcacaaataactcctccaggaacgccatcatctgctctttcatcaggggagcaaagagctgctctgaatgctaccaatgctgtcaagagactccaaaccaggcttcagcctgaagaatctactgagactctagactcaagctacgttgtgggacacgtgctgaactcaaggaagcaaaaacagctgttaaataaagtgaaaaggaaaccgaatttgcatgctctttccaagccgaagaaaaacatatcatcaggtagcacaacctctgcagacttaccaaataggactaattccaacctggatgtcctcaaacacatgatacatgaagtggaacatgaaatggaagaatatgagcggtggacaggtcgcgaggtcaagggtctgcagagcagtcagggtcttacaggcttcactttgtcgctggtgagctccctctgtcgcctggttcggtaccttaaagagagtgagatccagctacgtaaagaagtagagacaaggcaacaactggaacaagtattaggtgatcatcgagagctcattgatgctctgacagctgaaattcttcgtcttagagaagaaaacgctgctacacaggcaagacttcagcagtacatggtcacaacagatgagcaactgatatcactcacacatgctattaagaactgtcctgtgataaataacagacaagaaattcaggcatcagaaagcggagccacaggtagaagagttatggacagtccagagcgtccagttgtaaatgccaatgtctcagtgccattgatgttcagagaggaagtggctgaattcccacaggaagagttgcccgttaaactgtctcaggtgccagaccctccagataacatgaatctggccaagaattttccagcacatatttttgagccagctgtgttgttaacaccacccaggcagaagagcaacttaaaattctctcctcttcaggacgtattgagagggactgttcaaactcgtcctgctccacgacttcctccaactgtggaaataattgagaaggaacaaaattgggaagagaagaccttacctattgatacagacattcagaattcaagtgaagagaatcgtctcttcactcagagatggagagtctctcacatgggagaagatttggagaacaaaactcaggctccttttgttaacctctcacagcccctctgcaattcccattccaacactcaacagtcaagaagccccacattctcagaagagctcccagtactgggagatgggcagcagctgagaacaaatgagtcattaatacaaagaaaggacataatgacacgaattgctggtttgacattgcagaattcagctatcaaggcacatatgaataatattattgagcccagaggagagcaaggggatggactccgggagttgaacaaacaagaaagtgcaagtgacatgacttctacttttccagtagcacagtctctaacaccaggtagtatggaggaacggattgcagaattgaatcgacaaagtatggaggctcgtggaaaactactgcagttgatagagcagcagaaacttgttggtttgaatctttctccaccaatgtcacctgttcagttacctctcagagcatggactggttggtcacaaactcatgatttaaaaactagaaatatgaaggttttcagttttcttgattttgcaagtttatattaagccaaaagaagtatcagagcatatattttggtgccttcaattttgcacagaaagaaatggccctaactcacaggataagtgacagaaatgggattagaaggcagatctcctgattatttctatcctatgatgcctatagttaatctttggtgtctgagttcctaaattatcgtacatctaaatgggattcattatagtgtacggttcacttaggtcatatgctgcaactaagcatgaaatatctgaatgttcatttagaatttcatcagcaatgaattacaagttattattctgtaaaacacttaaaacattttcactcaattaaattttttgttacatttaggaatgtgaaaagctagaggggattctgaataataaaatagtaactgaaaaaattgtcatagtattcacattcaaaaagatactgatgaaacgaagtatgtatcaagttgctttttatcagaaattgcattattaaggccctcaagggacagctacatgaagagtactgagagattgattttggcccagtaaaagagaaggctctaattgtcaggaatagaaaaagctccatgtaccagtaattgatgtgttctctgagatgttcaaacattggtgtttgaaggggactcatatgtcttatttctggttgaagtaggttacctttaagataccttccaataagacttttcccctcagaaattatttcctttttgaaatacagacccagaaagcagactcttttggaaattgctggaaaaagatggtaatgcatttccccagggctctctgtttattctaggcttcctcaaatgacagttttgtctactgttcttcatagttatgaagcctagagacaacttctgattagaataaataaatcaattaactatatatgaacatgtactatgtgcgaacatgtactatgtgcgaacatgtactatgtgcgaacatgtactatgtgcctgccatgtgtgggcttgaatactctagcatttgagtaggggagcaggcaacaaacaaatcaatatttgggataatatcagttagtgctaagtgcaaggaagaaaaataaagcagatcagccttaagaataattttgtgtttaaatatacatcttccatttcagtatttgtgtatggttaaaatatgcttttatttatgttatgtaatttagtcctcaacatactttaagaggagacagggctaatattatacctatttgatgaataagtaaactgaggtacaaagaggttatgtgatttatcaagttacaaagcaagttgtggatttgcaactgcgttctttcctgtccagtgatttatctctaaagtattctttttataagtaaaattcttatatttgtttaaaaaaaagctgctgtggactataatgataaaaataaaaataaaccatatatcatg

SEQ ID NO: 307 - DNA, 2098 bp, Homo sapiens
acctggaggcagcgcgcgcgtcgaagaggcagcggctgtggagcgcggcggggcggctccgcccagggcagcccgggctgggccaaggagcgagctctcccttctcctgctctcagcctcagtgatcaaggcttcagtgaactgcactggagctcccagcgggggatcttgtcccctgtcccgacttttgtgctgcacattggatctggtgacactcaggaaatgcttgtctccggctgttaaggaataatttcagagtactatggatcatgctgaagaaaatgaaatccttgcagcaacccagaggtactatgtggaaaggcctatctttagtcatccggtcctccaggaaagactacacacaaaggacaaggttcctgattccattgcggataagctgaaacaggcattcacatgtactcctaaaaaaataagaaatatcatttatatgttcctacccataactaaatggctgccagcatacaaattcaaggaatatgtgttgggtgacttggtctcaggcataagcacaggggtgcttcagcttcctcaaggtccttttgctgttattagcctgatgattggtggtgtagctgttcgattagtaccagatgatatagtcattccaggaggagtaaatgcaaccaatggcacagaggccagagatgccttgagagtgaaagtcgccatgtctgtgaccttactttcaggaatcattcagttttgcctaggtgtctgtaggtttggatttgtggccatatatctcacagagcctctggtccgtgggtttaccaccgcagcagctgtgcatgtcttcacctccatgttaaaatatctgtttggagttaaaacaaagcggtacagtggaatcttttccgtggtgtatgcgtcgggctgatggtttttggtttgctgttgggtggcaaggagtttaatgagagatttaaagagaaattgccggcgcctattcctttagagttctttgcggtcgtaatgggaactggcatttcagctgggtttaacttgaaagaatcatacaatgtggatgtcgttggaacacttcctctagggctgctacctccagccaatccggacaccagcctcttccaccttgtgtacgtagatgccattgccatagccatcgttggattttcagtgaccatctccatggccaagaccttagcaaataaacatggctaccaggttgacggcaatcaggagctcattgccctgggactgtgcaattccattggctcactcttccagaccttttcaatttcatgctccttgtctcgaagccttgttcaggagggaaccggtgggaagacacagcttgcaggttgtttggcctcattaatgattctgctggtcatattagcaactggattcctctttgaatcattgccccaggctgtgctgtcggccattgtgattgtcaacctgaagggaatgtttatgcagttctcagatctcccctttttctggagaaccagcaaaatagagctgaccatctggcttaccatttttgtgtcctccttgttcctgggattggactatggtttgatcactgctgtgatcattgctctgctgactgtgatttacagaacacagaggtgagtgcccagattggaatgggtgtgaatgtcccggcagagatgacaatgttgactttaggtgtagaccaaagtttaagttggtagaagtggagccctttgatgatttctagttagcgtgagagggagctataacactcatgtagcctgttgactagatgaacaaaatgccaatttaaaaattccatataattttgccaaatgctcttctatgtcacaatttatgctcccatcaatggttatgttaaaagagcctaatttccatcattgtttctgccattcctggtctagtgctatgctggtttatttatcctcttgtgatttgttttggcaccaagtactgacatgagcttcaatgacatgaagcaaactctgacaccaagttatcgtatgcattccttccactgtcatttcctccaccctgaaccactttcccttgttatctcttctccctagtgggaagctgagcccactagggaaagtat

SEQ ID NO: 308 - DNA, 2782 bp, Homo sapiens
aaagaggaagttgtcccctcttgggggccctggggctcccggggtcaggattttgatactctgaagcaggaaactttgattcccatggcaaaccctgttcctgttcagaggagccacctccagggccccattctcaggctgcgctacatggtgaagcagttggagaatggggagataaacattgaggagctgaagaaaaatctggagtacacagcttctctgctggaagccgtctacatagatgagacacgaacctggatctctggtgctttgatgtcttttccttgaaccaggcagcagatgaccatgccctgaggaccattgtttttgagttgctgactcggcataacctcatcagccgcttcaagattcccactgtgtttttgatgagtttcctggatgccttggagacaggctatgggaagtacaagaatccttaccacaaccagatccacgcagccgatgttacccagacagtccattgcttcttgctccgcacagggatggtgcactgcctgtcggagattgagctcctggccatcatctttgctgcagctatccatgattatgagcacacgggcactaccaacagcttccacatccagaccaagtcagaatgtgccatcgtgtacaatgatcgttcagtgctggagaatcaccacatcagctctgttttccgattgatgcaggatgatgagatgaacattttcatcaacctcaccaaggatgagtttgtagaactccgagccctggtcattgagatggtgttggccacagacatgtcctgccatttccagcaagtgaagaccatgaagacagccttgcaacagctggagaggattgacaagcccaaggccctgtctctactgctccatgctgctgacatcagccacccaaccaagcagtggttggtccacagccgttggaccaaggccctcatggaggaattcttccgtcagggtgacaaggaggcagagttgggcctgcccttttctccactctgtgaccgcacttccactctagtggcacagtctcagatagggttcatcgacttcattgtggagcccacattctctgtgctgactgacgtggcagagaagagtgttcagcccctggcggatgaggactccaagtctaaaaaccagcccagctttcagtggcgccagccctctctggatgtggaagtgggagaccccaaccctgatgtggtcagctttcgttccacctgggtcaagcgcattcaggagaacaagcagaaatggaaggaacgggcagcaagtggcatcaccaaccagatgtccattgacgagctgtccccctgtgaagaagaggcccccccatcccctgccgaagatgaacacaaccagaatgggaatctggattagccctggggctggcccaggtcttcattgagtccaaagtgtttgatgtcatcagcaccatccatcaggactggctcccccatctgctccaagggagcgtggtcgtggaagaaacaacccacctgaaggccaaatgccagagatttggggttggggaaagggcccctccccacctgacacccactggggtgcactttaatgttccggcagcaagactggggaacttcaggctcccagtggtcactgtgcccatccctcagcctctggattctcttcatggccaggtggctgccagggagcggggagcttcctggaggcttcccagggccttggggaagggtcagagatgccagccccctgggacctcccccatcctttttgcctccaagtttctaagcaatacattttgggggttccctcagccccccaccccagatcttagctggcaggtctgggtgccccttttcctcccctgggaagggctggaataggatagaaagctgggggttttcagagccctatgtgtggggaggggagtggattccttcagggcatggtacctttctaggacctgggaatggggtggagaggacatcctcttcaccccagaattgcgctgcttcagccccatctccagcctgatcctctgaatcttccttccctccctttctgatatagtgactggggcaaaaggagccattgtgaccaggggctgcgggaggcctttcctgggaccttccttgggactggtctgggcccctggggcttgtcgcctgccctgagtccggagccctttgcctccttcctctcccctggggctgggaggctccatctgaccaatgtctgtaaagtgctttgaggatctccccagcaaagcaccttcagaatgtatcgacaccagctgggttagggtcaagggtgcctggggagggtgagtaatcctgcattgctaaaagagagggtctgtcccctcctctccacgtcccagaactggcccagctgcaggcactaagaagctcctcccctgagacaagtgaggggtagtcggtgaaaggcagatggacaaggggctcagggctgctgccttcctgtcctctggagagaacccagccaggcgcggtgccccttcctctcctcaggctcctccttgcccccaccttgccccaggaaaggccaaagtccaggtgactgccctccttctttcttgtaaataccaaccgtgcatttgtacagtgggccctgttcatgcgaaatccacatccatggtctcctagacctgctaccctggtacttccaccctaccccaccccgagaagggcagagacgcatgtgactcacccctgcccttggtttcccagacccctgctacagccagagaacaataaagaagggagaccagg

SEQ ID NO: 309 - DNA, 2569 bp, Homo sapiens
agcctgcgtggggggaggggagaagagggcaaggggaggggacaagagagctagcggtcccgcccggtgatgtaggcagcccggggaggtggagccgcgacgcctgaaggagtccccaccgcagccgcgctctcggtctgccccactaagcagccgccagcggctccggcgacccaaattgcggcggcagggaccgcggaaatcccaccgtttgggcttggtggacgtccagcccacctcacccccagccccggcccctcctcgcttcccagacggctggagacactcccgggaaaagcggtcctcagccactcggccgccgtccgcacctcggctgctggcccggctgggcaccgggcatctgcgaagctagccctgcctggcactgggcatctccaggcaacgactgtccccggccctgcccagcttctcgcgactccagggcggtggacttctgcgcgccttccctcccccggtctcccgacaggacgccggtgagctccctgcgcccccagcccctttcgccgccgccgcgatgctgccctggagacgtaacaaattcgtgctggtggaggacgaggccaagtgcaaggcgaagagcctgagtccggggctcgcctacacgtcgctgctctccagcttcctgcgctcctgcccggacctgctgcccgactggccgctggagcgcttgggccgtgtgttccgcagccggcgccagaaagtggagctcaacaaggaggacccgacctacaccgtgtggtacctgggcaacgccgtcaccctgcacgccaagggcgacggctgcaccgacgacgccgtgggcaagatctgggctcgctgcgggcctggcgggggcactaagatgaagctgacgctggggccgcacggcatccgcatgcagccgtgcgagcgcagcgccgccgggggttcggggggccgcaggccggcgcacgcctacctgctgccgcgcatcacctactgcacggcggacgggcgccacccgcgcgtcttcgcctgggtctaccgccaccaggcgcgccacaaggccgtggtgctgcgctgccacgctgtgctgctggcgcgggcgcacaaggcgcgcgccctggcccgcctgctccgccagaccgcgctggcggccttcagcgacttcaagcgcctgcagcgccagagcgacgcgcgccacgtgcgccagcagcatctccgcgctgggggcgccgccgcctcggtgccccgcgccccactgcgccgcctgctcaatgccaagtgcgcctaccggccgccgccgagcgagcgcagccgcggggcgccgcgcctcagcagcatccaggaggaggacgaggaggaggaggaggacgacgcggaggagcaagagggaggagtcccccagcgcgagcggccggaggtgctcagcctggcccgggagctgaggacgtgcagcctgcggggcgccccggcgcccccgccgcccgcgcagccccgccgctggaaggccggccccagggagcgggcgggccaggcgcgctgagagccgaaggacaggactcgcagccccaggcccgacccgccagactcacagcctccaaccccggccctgcccgcttcggctgccccggcccccggcccgtgtctcccccgtggtctccgtgttgtccgccccgccgcctcattttggctcagggtgatgcctgatacgcccttggttattggggggtgttcctctctccccacacccggagtttcccgggcctgccattgtggacccgccccctatgctttacacctagtctctttgcccacagacctcctcattccctcccaaaacatcctctcaagagaagggaggagaagtttcaagaaatcaggaggggtgggtttggaccctgggcagggtggaggcagtgaccttgcccttggtccctctagccttcttccctgtgcaaaaaaaaatgaccctggagaggcattcttgtaggagaagaatctagcggccggggagaattggggccgggccggcggtgggcagagtccgctgctatacacacagggaggaattctcacgcccaagccccgcctctctacgccttggaggactcctgtgacttcactgctctgcctctggagaacactgggagagtcctaccgacgttcaaacaacaggttaggccaggtaacagccctgcaccaggccgctgcccacgcctctgccctggcacccccaggggattccttgcccatcccatctctctgcagacggatgtgtgtggccccctcctaggtgccccacaaccaggaccaagatggggctcccaaaggaggtaaggagaacctttggcaggtgcttaggacactgactacctagaaagtagacgcagcagagttgctcccaagtcgaggctcctcagagcaggtgggtcctgacagcagtggattctcccagcaggatgaggaaggagggtgtgttaaccaaccaagggagtgggccccccacccaggtgtctccgcaagaccacaaaaagcccaaagatctatgtgtcactgatcattgtaaataaagtggacctgcttttac

SEQ ID NO: 310 - DNA, 2471 bp, Homo sapiens
gctcctcttcctctcaggctccgagacggccccagcagcgtccaccgctgtccatacgccaggagggtggctgggcaggctgctgtctaggccaggctaacccctgcggtgggcgtgggtgtcaccagggccgatggcgcttgtgcagaaacccacgtctctgagctgccagcagccaagctgtcctgatgacattcccgggtgggcgcacaagcctgcactgtccgtatagaatcggcccaggctgtgcagcaggggaacccggagcccggaccccgccacggaggccaggctgccgtgcaccatcctgggtgtcctcgtggtgctccgggcgcaggtggcagcagccatggaggagctggaccggcagaaggtggcttctccttcttagttcgtggggctcctcctacacccccaacccctcaggctcagggaaggaggcctctcccggtgtggggagctcgtggggacgctggtgcccggctagacacttcctgttagcggcattttcttctccgctgagtctgtgccggctgctgggccagaggcacattagcaggcccagagaaggtagatgccggagacgaagattctttcctcccgaaaatggtagggtttttaaaagtctcagcggaagtcccggctctgggccggttgctgagggcaggaggcccatcccctggcgtggttggcaggctggcgagctgcgctacccgagccacctgttctctggcgtttctcactccgccgcgccctgcgggctttcttttccaggcccctgctcctgggtcctgcctccgaggtcaggcagggcctgtggttcctcccgacatgtcgcagaagccccagggactgttccgcagctctagatggcccagtggggaggggctgccctgtgggcattgctgtctgatggcctgaaggcaccgcttggagggacacatgcctggggacagtgggctcacagatgtcttgctgctttgccaccgagcctcacagccatctgctgacctctcagagcccagcaggcccctgcccgggggttcgtggaatgcccctgggggtctcagacccactgctcagctcttggccaggctccgtatctctctagattggaggattctggagggaagtcggtgtggcctccgatcaaagcctggtgctgacggccccgaagcgggtggagggcttgttcctcaccttgagcgggagtaacctgaccgtgaaggttgcatataacagctcaggaagctgtgagatagagaagatcgtgggctcagaaatagacagtacgggaaaattcgcttttcctggtaagtgcagttgccctgtgatggcaggtggaacccggctgtgcacacagctaggccttattgttccccatgctgttccctgcactgttccccatgctgttccctgcactgttctctgtgctgttccctgcactgttccccatgctgttccctgaactattccctgtgctgttccccatgttgttccctgcactgctccctgcactgttccacatgctgtttcctgcactattccccatgctgttccctgcacttttctctgcgccattccccatgcgttccctgcactgttccctgcactgttccccatgctgttccctgcgctgttccccatgctgttccctgcactgttccccatgctgttccctgcgctgttccccatgctgttccctgcgctgttccccatgctgttccctgcactgttccccatgctgttccctgcaatgctccctgcactgttccccgcactgctccctgcactgttccccatgctgtttcctgcaccgttccccatgctgttccctgcagggttccctgcactgttccccatgctgtttcctgcaccgttccccatgctgttccctgcagggttccctgcactgttccccatgctgttccctgcacatttcatgccccagaccttcccattctcccaccaacacactggatcatccttcaaaagcttctgtagtgtctccaaccactcaagtgctgggactgggttggggcaggatggagttagaccctgcagaccctggccttcgaggtccgtccccctcagacgtctcccccaacgccatggccggctcttgaaggccacagagagatccacgtgctggacaccgactacgagggctacgccatcctgcgggtgtccctgatgtggcggggcaggaactttcgcgtcctcaagtactttactcggagccttgaggacaaggaccggctggggttctggaagtttcgggagctgacagcagacactggtctctacctggcggcccggcctgggcggtgtgccgagctcctgaaggaggagctgatttaatggagttcctgcctcagaccacaaggttcggagcgcccgcccacccctgcccctcctgggcaccctgcccaccaggtcacctgcacctgctctgaataaactgtgaagtc

SEQ ID NO: 311 - DNA, 2704 bp, Homo sapiens
acttgcttctccttgctttccaccatgattgtgaggcttccccagcaacatggaactgtaactccatcaaacctatttttcttcccagtctcatatatctttatcagtagcaagaaaatggactaatacagtaaattggtaccagtagagtgagatgctgctgaaaaaatacccaaaaatgtgtaagcgactttggaactgggtagcaggcagaagttggaaaagtttggagggctcagaagaagacaggaaaatgtgggaaagtttggaacttcctagaaacttgaagaatggctttgaccaaaatgctgataatgatatggacaatgaaatccaggctgagctggtctcagatggagatgaggaacttgttgggaattggagctaaagtgactcgttatgttttagcaaagagactggtggcattttgcccctgccctaaagatttgtggaactttgaacttgagagagatgatttagggtatctggtggaagaagtttctaagcagcaaagcattcaagaggtgacttgggtgctgttaaaggcattcagttttataagggaagcagagcataaaaggttggaaaatttgcagcctgataatgtgatagaaaagaaaatcctattttctgaggagaaatttaagctggctgcaaaaatttggataagtaatgaggagctgaatattaatccccaagacaatggggaaaatgtctgcagggcatgtcagaggtcttcacagcagctcctcctgtcacaggcctggaggcctagaaggaaaaaatggtttcatggtctgggcccaaggcccccttgctctgtgcagcctaaggacttggtgccttgcgtcccagccactccagccatggctaaaaggggccaaggtacagtttgagccattgcttcagagagtgcaagccccaaggcttggcagcttccatgtggtgctgagcctgcaggtgcacagaagttgagaattgaggtttggaacctctgcctagatttcagaggatgtacggaaatgcctggatatgcccaggcagaagaagtttgctgcagggacaaaggcctcatggagaacctctgccagggcagtgcagaagggaaatgtggggtcagagcccccacacagagtccctaccgaagcactgcctagtggagctgtgagaagagggtcaccgtcctccagaccccagaatggtgaatccactgacagcttgcactgtgcacctggaaaagccgtagacaatgccagcccatgaaagcagccaggagaggggctattccctgcaaagccacatgggtggagctgcccaagaccatgggaacccacttcttgcattggcatgacctggatgtgagtcatggagtcaaaggagatcattttggaactttaagacttgactgccccaatgattttggacttgcatgggcctttagccctttgttttggtcagtttctcccatttgcaatgagtgtgtttatccaatgtctgtgcccccatttcatctagaaagtaattaacttgcttttgattttactggttcataggtggaagggacttgccttatctcagatgaggctttggactttggccttttgagttaaggctgaaatgagctaagactttgtgggatggttgggaaggcatgattggttttgaaatatgaggacatgagatttgagagggaccaggagtggaatgatatggattggctttgtcctcactcaaatctcatctttaattgtaactcccacaattcccacatgttgtgggagggacccagtgggaggtaaacgaatcatgagggtgggtctttcccatgctattctcatgatagtgaatatgtctcatgagatctggtgcttttaaaaatgggagtttcctctcacaagttctctctcttttcctgttgccatccatgtaagatatgacttgtcctgcttgccttctgtcatgattgtgaggtttccccagccacgtggaactgtaattccattaaacctatttttcttcccagtctcgggtatgtctttatcggcagcatgaaaacagactaatacagaaggcattcagtagaggtttgttaatctaataatgaaaaatgattgaatagtgtcgtgtcagttagcttttgctgcataacatgaaatcctaaaagtttgttgtttaagcaacaatataattagctcatgattggttggctcagcatttctggttggcctgacttggctgttgtcttcctaattggctcacgtccatggtcagctgatgggtcggctggaggttagatgatctaagatcaccttacacatctggcagttggcaggctgttggccagggttatggggatgattacaccatgtgtctctcatcatccatcaggctagcccaggcttatttacagggcagtaacaagaatagcaagagtgtaagcccctacgttcaacccctttccaagccactgctcatcacatttattaatgtcccattttccaaagcagtcacatggccaaacccagattcatggggtggagaaataggctctataccctttgatggaaggagcagcaaagtcacagtgcaaatgagtatgtgtataggaataagaagaatcacacctatttaagtgcaccataaacgttgaggaaattttcacttaatctacctgaatattaaaaactagagccaattcaaaatc

SEQ ID NO: 312 - DNA, 2619 bp, Homo sapiens
gtcggcgggggagggactgttgaagacaggtctccacacacagctccagcagccacatttgcaaccttggccatctgtccagaacctgctcccacctcaggcccaggccaaccgtgagtaccctgccccactgggctagtccctggcctgccagcttcagggagaggggtcttcagaagggctccaagaggctggggaccatagcactgtggagcactgaggatctgggaggagtcagtcagggtgagggcagtttgggatttgggggagacagggtttggaaggtggtgatgagagacaaatgaactgaaggtcggagagagagctggcagctcagcaaaggaggaagccagtggggaacccaccatgagcttcctgaccgcctggccctcccacagggagccctcaagtccctgccaaggccccctctgtctcccaggtgttgggaagggtcccagccctcccctgcctcgcctcctgtggggtaagaagagagcagatacaacagctgtttctgcccccacctctcctgccagccttagtctctgccacccccaccctgccttgccaagagctcaggtcccaggggagtctgggggtggcagggcaaagctcccatgatatggggaagcagagatgtagggtgctgtgccccttcccaactcgacctccacaggacctcccctttctcctcctcccatttttggcccagacctcttgactcctctttccccccattcttacctctttgtttccccatctcccctgcccccaagtcctctcagaactgccaccacgtaaaatcccaggctgctttagggctccaggtgacctccagctgcccctctggcatggagcaggtaatcaagctaccagcacccctccctcaagcaccccttatcccctcatcagccacagcttgggttccatctcccccatgtctctgtgacaactgcttctcaggtccggagttcagatgacactcacaagggccccattgaagaactgggatgtcattcgatcaggggccattgtccagccccctaggcctggggaaggatggggacatctgatccgagacacctgagctgccccctctggggttgtggaaggccagactgtcccagggccaagggaaagaggccccccggcttggcagtcttctctctcaacagaccactcctttctcctttcttctcctactctctcccagccccttgaactcaaaggaccgcatgctttcagccctttctctcccccaacacacagcagccccattccccttgctcccactatccccgaatcaaccaggagtgagcagttgcagggacaacgcctgcaggtctcctctcccactccctgggaactctggctccaaggaaaaggctcagacattcctctctccccttctgccacccaccagatggaagggataattttgcagaggcaatgggagcatatcccaaagaagccaaaatgacatgttcaggagagaacagagttgaaggaccaaaaggggcccccagctgctgacaggaaactcagagtcagtgagacctccctcccccagaaggcgtacgccacccactggggctgccatcccctctaccaggctgaccgagggtaccagactgactccttgctaggggtgggcagcagaaggaaggctgtagtggacaccccagcccaccaccctcaacagcagagcttggctatgctagacaggcaaggtccagggtaaaaatagagccagaggaagcatggcccagtcctgtgaccacccctgcctgccccaccctcctcaatccctgcctgggcagccactgcagacatctaccacaggcctctggagccagcccagctccaactgctctctctccatgccccaaccctgattccctctggctggggtacagactgagggacacagagaacaggcctgcacttaggtctcttggggtttccctcacattgtaaaatctcagggaaagatcaattgcagtagggctctaatcccacagctatttgagctgtcagccagggccagtcctgagggttcccctcacctagaccccaggtactccgggcctggtcctcagctcacttccatgatgggggtgggtaggtgcactgctgcaatgggctctgagctggagacggcgatggagaccctcatcaacgtgttccacgcccactcgggcaaagagggggacaagtacaagctgagcaagaaggagctgaaagagctgctgcagacggagctctctggcttcctggatgcccagaaggatgtggatgctgtggacaaggtgatgaaggagctagacgagaatggagacggggaggtggacttccaggagtatgtggtgcttgtggctgctctcacagtggcctgtaacaatttcttctgggagaacagttgagcagacagccacattgggcagcgcccttcccctccaccctcccagacctgcctcttccccctgcttccacctcaccccacttatccctctccataaccccacccttgcccaccccacccccacccccaccaagggcgcaagagtagcggtccaagcctgcaactcatctttcattaaaggcttctctctcaccagc

SEQ ID NO: 313 - DNA, 3267 bp, Homo sapiens
gtttccggatggaggagctgagactgaccagcaccacgtttgcgctgacgggagactcagcacacaaccaagccatggtccactggtctggccacaacagcagcgtgattctcattttgacaaagctctatgactataacctggggagcatcacagagagctcgctttggaggtcaaccgattatggaacaacctatgagaagctgaatgataaagttggtttgaaaaccattttgagctatctctatgtgtgtcctaccaacaagcgtaagataatgttactcacagacccggagattgagagcagtttattgatcagctcagatgaaggggcaacttatcaaaagtaccggctgaacttctacattcaaagcttgctttttcaccccaaacaagaagactggattctggcatacagtcaagaccaaaagttatacagctctgctgaatttgggagaagatggcagcttatccaagaaggggttgtaccaaacaggttctactggtctgtgatggggtcaaataaagaaccagaccttgtgcatcttgaggccagaactgtggatggtcattcacattatctaacttgccgaatgcagaactgtacagaggccaacaggaatcagccttttccaggctacattgacccagactctttgattgttcaggatcattatgtgtttgttcagctgacatcaggagggcggccacattactacgtgtcctaccgaaggaatgcatttgcccaaatgaagcttccgaaatatgctttgcccaaggacatgcatgttatcagcaccgatgagaatcaggtgttcgcagcggtccaagaatggaaccagaatgacacgtacaacctctacatctcagacacacgtggtgtctacttcaccctggccttggagaatgtccagagcagcagaggccctgagggcaacatcatgatcgacctctatgaggtagcagggataaagggaatgttcttggctaacaagaagattgacaaccaagtgaagactttcatcacatataacaaaggcagagactggcgtttgctgcaggcgccggacacggatctaaggggggaccccgtgcactgcttgctgccctattgctcactacaccttcacctgaaggtctctgagaatccctacacatcagggatcattgccagcaaagacacagctccaagcatcatagtggcatcaggtaatataggttctgaattgtcagacactgacatcagcatgtttgtctcttcagatgcagggaacacctggagacagatctttgaagaagagcacagtgttttgtacctggatcaaggtggagtcctggttgctatgaaacacacatctctcccaattcgacatctttggttgagttttgatgaagggagatcttggagcaaatacagtttcacatctattccactttttgtggatggggttctgggtgagcctggagaagagactctcatcatgacagtgtttggacacttcagccaccgctctgaatggcagctggtcaaagtagattacaagtccatttttgatagacggtgtgccgaagaggactacagaccttggcagctgcacagccagggggaagcatgtatcatgggagcaaaaaggatatataagaagcgaaaatcagagcggaagtgtatgcaaggaaaatatgcaggagctatggaatctgaaccctgtgtctgcactgaggctgattttgattgcgactatggttatgagcgacacagcaatggccagtgcctgccggcattttggttcaatccatcctctctgtcaaaggattgcagcttgggacagagttacctcaatagtactgggtacaggaaggtggtttccaataattgcactgatggcgtaagggaacagtacactgccaaaccgcagaagtgcccagggaaagccccgcgggggctgcggatagtcacggctgatggaaagctgacagcggaacaaggacacaacgtcactctcatggtgcaattagaagagggtgatgttcagcggacactcatccaagtggactttggcgatggtatcgcggtgtcttacgtcaatctcagctccatggaagatgggatcaaacacgtctatcagaacgtgggcattttccgtgtgaccgtgcaggtggacaacagtctgggttctgacagcgccgtcctgtacttacatgtaacttgtcccttggagcacgtgcacctgtctcttccctttgtcaccacaaagaacaaagaggtcaatgcgacggcagtgctgtggcccagccaagtgggcaccctcacttatgtgtggtggtacggaaacaacacggagcctttgatcaccttggagggaagcatatccttcagatttacttcagaaggaatgaataccatcacagtgcaggtctcagctgggaatgccatcctacaagacacaaagaccatcgcagtatatgaggaattccggtctcttcgcttgtccttttctccaaacctggatgactgcaacccggacatccctgagtggaggagggacatcggtcgagtcatcaaaaaatccctggtggaagccacaggggttccaggccagcacatcctggtggcggtgctccctggcttacccaccactgctgaactctttgtcctaccctatcaggatccagctggagaaaacaaaaggtcaactgatgacctggagcagatatcagaattgctgatccacacgctcaaccaaaactcagtacacttcgagctgaagccaggagtccgagtccttgtccatgctgctcacttaacagcggcccccctggtggacctcactccaacccacagtggatctgccatgctgatgctgctctcagtggtgtttgtggggctggcagtgttcgtcatctacaagtttaaaaggagagtagctttaccctcccctccctccccttctactcaacctggtgactcatctctccgattgcaaagagcaagacacgccactccgccttcaacgccaaagcggggatctgctggggcacagtatgcaatttaaggaaaacccccaaaggctacaggcgacctgctgatcaggaaagaatttcgctcttgtcaagtacatcatccttcatgaccactaactttgtgttttttttctttcctttgttgttctgtttcctattttgccaggaagtatttccatagttgctgagaatcaaagcacaaaagaaatccctacctatgtaaatgtttgaatggaggacgccagt

SEQ ID NO: 314 - DNA, 2137 bp, Homo sapiens
agcagtgtgccatgttgtgagccactaagaggcccacacagtaaggaactggggtggtcaacagtctgcaaggaagtgagttctgccagccttcaggtcagtgagcttggaagcagatcctcttccgcatggagccgtgctgtgacggcagccacagctgacaccttgcagcctgtgagagaccccgggacaaaggactcagagggcccaaaagtctgcgaccagatcctggtgcacagaaactgtgagacactcagtgttgcctcaagccattaggaccgggacagcttgttacacgcagtagataactaatacaggagaggttccggccatggggagctgcattctgagtacagaaggagcatggtgcaggcaattgaaaaggcaaagaagccagaaacctggagcttcacgagcaaggggaagaagagtaggggataaggggagaaagggttttaggggccaggtgctggatttggggtttaacctaaaagctaatagaagccaccaaagggttgaagcaggtagcagggaggcagtctctaatttgcatgttgcatttaaaagatcaccctggacaccatacagagaagagattagaagggcagaaggagcagggagacaggaggctgtgagagtcatctgtgcctgagatgctgatggcctggtccagggtgctggcagtggtagccagggagagggagatagcaggaagctgatcctcaggttccaacagtccttgtctgtgttttggctcaaaccccaggccactgagatactgtgtgggttcaggttgatgccaacaatgccgaaattacaccattctcatcacagaagttttcgatgctttctgaaaagcaggagtgctaaccctatctgactagagagaaaaccaggccctgggaaatagagcattttgcaatcatttgagacccctccgatctgccagaagcccatgctctggaagctgcacacttcatttcatgaaaggtcactctaggctctccttggccccagtccctgacagttgctaaatcatctattattacccgaaaaaccaaagctgagcctccacagggaaagaaacaatgaaagtcaaaagttgggggcagaaaccgctcagacctgggcaggctggaacattcccctagtgcaagccataggtaaaaaccaaccacagcagctatagaattaatactgtcttctcaccccccaccttttccctgtgctttctcacacaccacaataaagagcatctgtgttttcccagccctcgtggtgcgaagtatgctccaagatgacacattccctatagatgctcatgtatcagttgttttttaatgccgcactgctgtgtaacaaacaaccacaagccctcagtggcatagacagtgagtacacaatgctcctatgtctgggtggtcagggggccactctaatctggactgagcctgctcaatacctgtgggtcatctggctacctgctggggtgactggggccaccaggctctgctctgtgtgtctctcctccttcattacactagcacaggcttgttttcatggtgatcctgaggtgcaagagaggacaagcttaattgcacaagcgcttttcaagcctctgcttgttccatgggtgctagcatctcattggccaaagcaagtcatgtggccacgtccaggtgtgaagaactgggggccttttgcaatgctcctggtagacacaggcacctgatgatctcagatctttaacagcacaatcatttcagtgctgatcactgtcatttacggagctggcactgtgcctggttagtttactttaactcaatggctcccagtggggggtgattttgtcccccaggagacatctggagatatttttggttatcacaactgaatggggaagatgcttctggcatagggtgggtagaggccacggttgctgctaaacactcttcagtacagaggacggccctcacagcaaagacttacctggccccaagtgtcagtattgccaaggctggccgggtacagtggcttgtgcctgtggtcctagtattttgggaggccgagatgggagggtcatggagccggggagtgcgagactagcctgcgcaacagaacgagacctcatctctac

SEQ ID NO: 315 - DNA, 2643 bp, Homo sapiens
gcttccaggtgctcacatccttccagctcccaaatgcgccgctattcctcagacgcccgcgcctcaggctcttctcttgtcccttagaccctctttctgtctcttggaccccttcctatcccctgaacaccgcttctctgccccttcccagtctctcagctcagcttcctgaccctgaaacatggaccctcacatgctgtgtctttgacccctgcttcttggcccttggattcctactccccccgccgtcgatcctatgttctgtcccttggattttcactgcctttcccagaatcgtcttttttttttttttttttttgagacaggttcttgctctgtcgcccaggcaggagagcagtgtgcgatcttggctcattgcaacttccacctcctgggttcaagcaattctcctgcctcagcctctcgagtagctgggattacaggagcctgccaccacactgggctaattttttttttttttttttgacagagtctcgctctgtttcccaggctggagtgcagtgacatgatctgggctcactgcaacctccgcctactgggttcaagctattctcctgcctcagcctcctgagtagctgggactacaggcgggtgtcaccacatctggctgatttttgtatttttagtagagacagggtttcaccatactggtcaggctggtcttgaactcgacctcaggtgatccacccttggcctcctaaagtactcggattacaggtgtgagccaccacgcccggccccagctaatttttgtatttttggtagacacgggtttcagcatgttggccaggctggtcttgaactcctgacctcaggtgatctgcctgccttggcctcccaaagtgctgggattacaggcgtgagccaccatgcccagccagaaaccccaataacttttgcaccaatctaatatttttagcagagacagggttttgccatgttgcccaggctggtctcgaactcctgacctcaggtgatctgcccacctcggcctcccaaagtgctgggattacaggcgtgagccaccatgcccggccagaaaccccaataacttgcaccaatctaatatttttagcagagacagggttttgccatgttgcccaggctagtctcaaactcctgacctcaggtgatctgcctacctcggcctcccaaagtgctgggattacaggcatgagccaccgcgcccggtcgagaatctccttcttgttccttgaaccctcttcctgtccctcaacctcctttctccataacttcacttgttttccctggaacccctgttctgtgcgctcaaatttgaattcccctttcctggatgttttcttcctgtctatgaaactccattctgtgctcttgaactccaaatcttgccttgaaccatgtcatttctatatgaccctccaatcttcaatctctgtctctggaatcccctcaaaccccactttctgttccttggactttattcttcaatttccttctcctatggcccagttcctaacccttgtaccacacatcctgtccattgcatgtgccgcttttcctcagtcgctattgaattcctccttcatactgcttcagtttcctcatctccagcctgcattgcgcagttcatccttcatgtccactcacccacaggtgcatacccaccttcaagtgattgaggagagggtgaatcagagcctgggcctgcttgaccagaacccccacctggctcaggagctgcggccccaaatccgtgagtgtctattaccctggctcccattacagatctctgagggcagatcttgactcctaaatgttgggcccccccaatttcatttattcctctataacaaacagcccagaccttagcagtgaaaatcaacaatgatttttctttgttcatgattctgccatccggtctgcgctcagcagagtggttctttcagtggtcttgccagtggtcaagcatgcagctgtatttagctagcagatcatctaggggctgggagtctagcacaaatggacctttctctctctccaaggaagcgcaaggcctctcttctccgtggagcttctccatgtggtctcatcagcagggtagctagattccctacatggtggtttatgctctctaagacatcacagtggaagttgctaggtcttaaggcttgggcccacattctatttgttaaagcaagttacaaattcagtccagattcaagggaaggaacctatatgcataccggaaagtgtgacctattgcagcccccacatctattgtgtctttctcctggatatctcacacataaccctgattctcctagtatttaagaaagctatcatcttgaggcgcggtggctcacgcctataatcccagcactttaggaggccgaggcgggtggatcacttgaggtcaggagttcgagaccagcctggccaacatggtgaaaccccgtctttactaaaaatacaaaaatcagccgggcatgatgtcgcttgcctgtaatcccagctacttaggaggctgaggcaagagaattgcttgaacccgggaggtggaggttgcagtgagctgagatcgcatcattgcactccagctgggcaacaagagtgagactctgtctcaaaaaaaaaaaaaac

SEQ ID NO: 316 - DNA, 3061 bp, Homo sapiens
caatcaggatgctggggctcggagatgatgggcggccgcctcctcactggagggattcctggagaagctgcagtgtggggatgctctagaccgagtactgcccccagtgtctttccacctcctcctgcagcagcggcagcggcagcagcagttagcagcggcaacttgaggctgcaccccgggcaagtccccagggtggtgctcagccgagaggggggcttggcgccccgaaggggtgtgtgtagggtgggggcgaccagctgggaccagctggtggccctggaaaacctcccacacacccacacccacacaccccttttgtgttgcaggctgcccctccaagagcggaggcagcgagagtacgcgtgtgcctcgcgccggtccacgcggggagagcactggggaccgagacccggcaccacctcccggtccgccctccagggaaaacgggaaaactagcaagagctagcaagaactagcaagagcttgaacaaacgcctggactcagattggaagactgctcatttgtctactgcctcattcctggaaattgcactggaactgtctgattaagaaaaacagaataattctgaaagaaagaaaacaaagaaaaacatactccagaattcctaatagaacacttcacctgaacctaaaatggtgagcgagagtcaccatgaggccctggcagccccgcctgtcaccactgtcgcgactgttctgccaagcaacgccacagagccagccagtcctggagaaggaaaggaagatgcattttctaagctgaaggagaagtttatgaatgagttgcataaaattccattgccaccgtgggccttaattgcaatagccatagtcgcagtccttttagtcctgacctgctgcttttgtatctgtaagaaatgtttgttcaaaaagaaaaacaagaagaagggaaaggaaaaaggagggaagaatgccattaacatgaaagatgtaaaagacttagggaagacgatgaaagatcaggccctcaaggatgatgatgctgaaactggattgacagatggagaagaaaaagaagaacccaaagaagaggagaaactgggaaaacttcagtattcactggattatgatttccaaaataaccagctgctggtagggatcattcaggctgccgaactgcccgccttggacatggggggcacatctgatccttacgtgaaagtgtttctgctacctgataagaagaagaaatttgagacaaaagtccaccgaaaaacccttaatcctgtcttcaatgagcaatttactttcaaggtaccatactcggaattgggtggcaaaaccctagtgatggctgtatatgattttgatcgtttctctaagcatgacatcattggagaatttaaagtccctatgaacacagtggattttggccatgtaactgaggaatggcgtgacctgcaaagtgctgagaaggaagagcaagagaaattgggtgatatctgcttctcccttcgctacgtacctactgctggtaagctgactgttgtcattctggaggcaaagaacctgaagaagatggatgtgggtggcttatccgatccttatgtgaagattcatctgatgcagaatggtaagaggctgaagaagaaaaagacaacaattaaaaagaacacacttaacccctactacaatgagtcattcagctttgaagtaccttttgaacaaatccagaaagtgcaggtggtggtaactgttttggactatgacaagattggcaagaacgatgccatcggcaaagtctttgtgggctacaacagcaccggcgcggagctgcgacactggtcagacatgctggccaaccccaggcgacctattgcccagtggcacaccctgcaggtagaggaggaagttgatgccatgctggccgtcaagaagtaaaggaaagaagaagcctttctgcatttgcccatatagtgctctttagccagtatctgtaaatacctcagtaatatgggtcctttcatttttccagccatgcattcctaacacaattcagtggtacttggaatcctgttttaatttgcacaaatttaaatgtagagagcccctaagtccttcatcataccactgccctccaaatctactcttcttttaagcaatatgatgtgtagatagagcatgaatgaaattatttattgtatcacactgttgtatataccagtatgctaaagatttatttctagtttgtgtatttgtatgttgtaagcgtttcctaatctgtgtatatctagatgtttttaataagatgttctattttaaactatgtaaattgactgagatataggagagctgataatatattatacggtaaatatagtatcgtctgcattccagcaaaaatatcaactcgtaaggcactagtacagttaaactgacatcttaaaggacaacttaaacctgagctttctattgaatcatttgagtaccaagataaacttacaccacatacttggtgggtgaatccaattttgtagaattcctacacaggcaaaatagcatgatctgagcagcagcatccaggctgacctcaaggaagcatagccacaaaacagaatagcacctgtctgtacatatttacaaagctaaaataatggcttcactcttatatttgaggaagcaactgaacaggagtcaatgatttcatattactgcatatagaataacaacaaggtgttccgtgtgtgtgtgtgtgtgtgcacatttgtttggggatgggggagaagaagctaaggggagaagtcaacatttatgaaatattgcctgactatttaaaaagaaaaaagtagctctccattatcacctttatacaaaatgtacatcctgtgaattctgttccagatttcacacctacaataattccaaaaggtttgcacattagagtttgtaacaaaatattttattatataaaaccaggttagaaggaatgcaggatatttttaacacaacaatctgtgcttattacacgaaatcactttgtggtaaacagacagtattgtaatcccatcaaaagatg

SEQ ID NO: 317 - DNA, 1811 bp, Homo sapiens
aaatcatatatagaaaggatgttgtattaaacgagaaaaactcatttctctcaagtaccagtcactcattgtggagactgctcttgaggtcactgtgcccaggcctcttctgtcttgagccagtccatctctggggtgtggccctagcttacccccatgaccacaggaagaccatgagctggtcctttaaggatgcaacctgggagttgccccgaggactgtgctcacattctgttggccaaaactcggttacgtgaccacacctagctgcaagggaggctgggaaatgtagtccttagtctgggggcatgtgcctggctgacaatggggcttcagtgctgtgggagaggaggagctggtggctgccaggggatggacagctgtctctaccaacctggcctcacagtggtcacgctccaggacataaatgtcccctctgcagcaaagacttcctgggtgtggaggggactggggtcccacaccctggtcttcacaagatggtctcctaccccggaaggcaccatgcggcccacgcttcagtgtgaagacaccacctgtgtgttaatgggcccgacaccaacctgggtgcagggcaggtattcagcaaacagtgaatggacaccagggagctggctactatagtgacctcctgaggtcgcagggctaccaaacagtgcacggcatttgcaccccagctcaggcgtcccggcagggattctgcattgtctgcctttgaaaaaagggtgggagagttaggacaggaattttctctgtttccctctctctctccttctccccccttctccccctctctttttccctttctcttttcctccctctctgtccctccctctcttttcctctctatctccctatctgctttgctctctgtctctctgtcctatttttctccatcactttttgtccttgtctctttttctcgttctctgtcactccgtttctgcttttgttcccccttctctctctctccccaacccccctgtttctctatctcttcacctgtggattcctgaaacagacccagggcatgatgttgtggaaggcaggccccagaggcgtccaggtgacaccgtgtgggcatttgtaaagcaggaggccccagcaggtggagcaggaggactcacccccctgcagtgggtggtcaagaagagctgcctttcctaagcccctctctcctccagccacccctcacctggggcctgctgagagggacaaggtggattggggcttgctgtggggctggtgctgaggcaggggtgggtggccccccagcccctatttcctcctctccaaacccagccatcccagttaattatttgcccagcagggcagcttgactggctggtgtcttgctgagcaataagcagctgaataagggtgcaattgctggaggcgggggcgcagctgcagacctgggcggtcacttagtctgggacagctgcagcggccacagcgaaagccatgcagcctgccccatgcctggctttgtcgcgacagctgctggaacagacgggtgtggtggctcatgcttgtaatctcagccctttgggaggccaaagcaggcggatcacttgaggtcaggagttagagaccagcctggccaacatggcaagatcccctctctactgaaaatacaaaaaaattcagccgggtatggtggcaggcacctgtaatcccagctactcaggaagctgaggcatgagaatcacttgaacccaggaggcggaggttgcactgagccaagatcaagccactgcactccagcctgggtgacagagtaagactgtctc

SEQ ID NO: 318 - DNA, 2949 bp, Homo sapiens
attgcgcatgcgcgcgcccgggcggcgcgggatctgggtctggggatgtggtaccggctgctggcggcggccggcagtagagcggtggccaggccgctggccttgctgtggcgatgtggtggcccaggaggcggcaggacggccaagaccagcgcgagggccctgggcaaggcccgacagtggttatggccagtgagaatgtgcggtgttgcattgcagaagaagctaggaaagctcatctggcctcctgttccagtgcttccaggggatccacgttcagaagctgactctgcaggcaagaccgacgttattttcctggtggctgtgttcaaaaccacccaaagagactggtgaactagagaatgctgagtctggaggagacggaggcaggagaggagggaagcaggataacgttgcctggtggaggcggatgcagaaggggggacttcccctgggatgacgaggatttccgcagtctggcccttttgggggcaggcgttgccatgggatttttctacctctattttcgagatcctggaagagaaatcacgtggaagcactttgtacagtattacctggccagaggtctggtggaccggctggaagtcgtgaacaaacaatctgtgcgtgttattcctgcccctgggacctcttctgaaggagccatgctcactggtcctcctggtaccggcaagacccttcttgccaaagcaactgcaggggaggccactgtgcccttcatcactgtgaacgggtctgagttcctggaaatgtttattggcgttgggccagcaaggggttcaactctgccaccaacgtcgtggtgttggctggcaccaaccgccctgacgtcctggacccggccctcatgcggcctggccggtttcatcgccagatttacactggtcccccttacattaaaggcaggtcctccatctttaaggtccacctgcgcccactgaagctggacaagagcctcaataaggacaccctggcgaggaagctggcagtgctcaccccaggcttccctgatgtctgtttacataccaaagttaaaaagctggaatgttaccaagactgctttcttctgcccatagacggggatgactcagcactacccctcaacagagatgactttgatgactctgcccctcagcagggcttactaagcactaccccttaacagggatgactccacactgcccctcaacagggatgactcagcagagatgactcagcactgtcccttagcagggatgacacagcaaggatgattcagcactgcccctcagcaaggatgactcagcactgccgctcaacagacatgactcagggatggcttagtactgcccctcagcagggatgactcagcaccgcctctcaacagggatgactcagcagggatgactcagcaccgcccctcaacaggcatgactctgcagagatgactcagcactgtcccttagcagggatgacacagcaaggatgactcagcactgcccctcagcaaggatgactcagcactgccgctcaacagggatgactcagggatggcttagtactgcccctcaacagggatgactcagcagggatgactcagcaccgcccctcaacaggcatgactctgcagagatgacttagtactgcccctcagcagggatgactcagtactgcccctcagcagggatgactcagcactgcccctcaacagggatgactcagcagggatgactcagcactgtcccttagcagtgatgacacagcaaggatgactcagcactgcccctcagcaaggatgactcagcactgccgctcaacagacatgactcagggatggcttagtactgcccctcagcagggatgactcagcaccgcccctcaacagggatgactcagcaccgcccctcaacagggatgactcggcagggatgactcagcactgtcccttagcagcgatgacacagcaaggatgactcagcactgcccctcaccaaggatgactcagcactgccgctcaacagacatgactcagggatggcttagtactgcccctcagcagggatgactcagcagggatgactcagcaccacccctcaacagggatgactcagcagggatgactcagcactgcccctcaacagggatgactgcagggatgactcagcactgcccctcagcagggatgactcagcactgcccctcagcagggatgactcagcagggatgactcagcaccgcccctcaacaggcatgactctgcagagatgactcagcactgcccctcagcagggatggctcagcagggatgactcagcattgcccctcaacagggatgactcagcagactcagcagggatgactcagcactgcccctcaacagacatgactcagcagggatgactcagcaccacccctcagcaaggatgactcagcagggatgattcagcagagataactcggggatgactctgattgtccttcagcagggatgagtctgttttgctccgatggaagcatctgtagtgtccatcagcaggtgaatggccaaagtggtatatactgtagtcacattcagctataaaaaggaataaagtatcgatgcatgccacaacatgggtgaacctagaaaatactgatctaaatgcaagaagccaggcacaaaaggccacatagtatatgttcccatttatgtgaaatgtgcagaataataataaaaatgtatagaatagcaaatctgtagggacagacatgaggtgagtggttgccagaagtggaaatgggagttaactataaattgcacagggtaccttacagagatgatggaaatgtcctaaaactagattatggcaatagttgcactacgtgatcagtttattaaaaatcgttgatgtgtgtgtgtaaaatgggtggattttatggtttataaattataccttaataaaggttaac

SEQ ID NO: 319 - DNA, 3049 bp, Homo sapiens
agtgggtggggagtgttgttaaccggaggggcagccgcagtcgcgcggattgagcgggctcgcggcgctgggttcctggtctccgggccagggcaatgttccgcacggcagtgatgatggcggccagcctggcgctgaccagggctgtggtggctcacgcctactacctcaaacaccagttctaccccactgtggtgtacctgaccaagtccagccccagcatggcagtcctgtacatccaggcctttgtccttgtcttccttctgggcaaggtgatgggcaaggtgttctttgggcaactgagggcagcagagatggagcaccttctggaacgttcctggtacgccgtcacagagacttgtctggccttcaccgtttttcgggatgacttcagcccccgctttgttgcactcttcactcttcttctcttcctcaaatgtttccactggctggctgaggaccgtgtggactttatggaacgcagccccaacatctcctggctctttcactgccgcattgtctctcttatgttcctcctgggcatcctggacttcctcttcgtcagccacgcctatcacagcatcctgacccgtggggcctctgtgcagctggtgtttggctttgagtatgccatcctgatgacgatggtgctcaccatcttcatcaagtatgtgctgcactccgtggacctccagagtgagaacccctgggacaacaaggctgtgtacatgctctacacagagctgtttacaggcttcatcaaggttctgctgtacatggccttcatgaccatcatgatcaaggtgcacaccttcccactctttgccatccggcccatgtacctggccatgagacagttcaagaaagctgtgacagatgccatcatgtctcgccgagccatccgcaacatgaacaccctgtatccagatgccaccccagaggagctccaggcaatggacaatgtctgcatcatctgccgagaagagatggtgactggtgccaagagactgccctgcaaccacattttccataccagctgcctgcgctcctggttccagcggcagcagacctgccccacctgccgtatggatgtccttcgtgcatcgctgccagcgcagtcaccaccacccccggagcctgcggatcaggggccaccccctgccccccaccccccaccactcttgcctcagccccccaacttcccccagggcctcctgcctccttttcctccaggcatgttcccactgtggccccccatgggcccctttccacctgtcccgcctccccccagctcaggagaggctgtggctcctccatccaccagtgcagcagccctttctcggcccagtggagcagctacaaccacagctgctggcaccagtgctactgctgcttctgccacagcatctggcccaggctctggctctgccccagaggctggccctgcccctggtttccccttccctcctccctggatgggtatgcccctgcctccaccctttgccttccccccaatgcctgtgccccctgcgggctttgctgggctgaccccagaggagctacgagctctggagggccatgagcggcagcacctggaggcccggctgcagagcctgcgtaacatccacacactgctggacgccgccatgctgcagatcaaccagtacctcaccgtgctggcctccttggggccccccggcctgccacttcagtcaactccactgaggagactgccactacagttgttgctgctgcctcctccaccagcatccctagctcagaggccacgaccccaaccccaggagcctccccaccagcccctgaaatggaaaggcctccagctcctgagtcagtgggcacagaggagatgcctgaggatggagagcccgatgcagcagagctccgccggcgccgcctgcagaagctggagtctcctgttgcccactgacactgccccagcccagccccagcctctgctcttttgagcagccctcgctggaacatgtcctgccaccaagtgccagctccctctctgtctgcaccagggagtagtacccccagctctgagaaagaggcggcatcccctaggccaagtggaaagaggctggggttcccatttgactccagtcccaggcagccatggggatctcgggtcagttccagccttcctctccaactcttcagccctgtgttctgctggggccatgaaggcagaaggtttagcctctgagaagccctcttcttcccccacccctttccaggagaaggggctgcccctccaagccctacttgtatgtgcggagtcacactgcagtgccgaacagtattagctcccgttcccaagtgtggactccagaggggctggaggcaagctatgaacttgctcgctggcccacccctaagactggtacccatttccttttcttaccctgatctccccagaagcctcttgtggtggtggctgtgccccctatgccctgtggcatttctgcgtcttactggcaaccacacaactcagggaaaggaatgcctgggagtgggggtgcaggcgggcagcactgagggaccctgccccgcccctccccccaggcccctttcccctgcagcttctcaagtgagactgacctgtctcacccagcagccactgcccagccgcactccaggcaagggccagtgcgcctgctcctgaccactgcaatcccagcgcccaaggaaggccacttctcaactggcagaacttctgaagtttagaattggaattacttccttactagtgtcttttggcttaaattttgtcttttgaagttgaatgcttaatcccgggaaagaggaacaggagtgccagactcctggtctttccagtttagaaaaggctctgtgccaaggagggaccacaggagctgggacctgcctgcccctgtcttttccccttggttttgtgttacaagagttgttggagacagtttcagatgattatttaatttgtaaatattgtacaaattttaatagcttaaattgtatatacagccaaataaaaacttgcattaac

SEQ ID NO: 320 - DNA, 2303 bp, Homo sapiens
aaggatctgcttagaaaccaaagctccagccgagtgtttcttttcccctacatttttagtgattcccttctgttgatgcctttgaaagctcggagaaataaatacgtttattgttatgctgttagaaaacaagttcatgcttgtcctctaaagataagtggtcttttcattctactttttgttttgtagtaagagccataaaatttgcaatcgcaagtttatgtcgttatacttagttacccaaggggtagttttaagcatttttattcatatgaatatttgaatataaatgtgtgttcaaatatatagaatcgttcttatattccacatttttaatatttaaactattcacaatatcttttaatgatgtttaaagaacggcagtgtagagatactgttgtcagatttgtgaggtgagcatacgttgatattgccagtttcgcttttgtttatcaattcaataagcactgctttttaaaacacgtgttgaagcttcaggtttgcacagaagttcattttcaggaattcctaactaataaagggtatcagacacgttcttacagttttgaacataaatactgcagttagcatatgtagtgggatatttgtgtggtgaaagtgcctccatatttcatatcttttctttgaaacaagattctgttcagtatgcattaagtggtagttattttttaacttcctgttacatacgtaaatttcataaggaaaggaaatttggggagtcgttacagcttttctccctttaatcacagcgtacctgtccattgctcacattgttttcagaaaaaaaaagttgtatctcagctggatatctgacttgactttagtaatgggcctagaaactataaactgaacaaagcttataatgcacaaaaacaggataagtacatttgggggacaatatcttactggcaagtaactggagtttcaccaggcgtgtagcaggtgggatcaattttctaaaacggaagatgatctaagatgcatattttataggcgttctcctaagcagtgctaattctacatgttttaattgctggtagatgcgtttccagaacgaggatgccatttacagcgagtgttaaaaaaaacgttggatgatgaaatacacattgcagaaaaaggatgaagttgaccagtgaaaagttgcccaagaaccccttttatgcctctgtatctcagtatgctgctaaaaaccaaaaatttttccagtggaaaaaggaaaagactgattacacccatgctaatttggtggataaggcattgcagctcttgaaggaaagaatactgaaaggagacactctggcatatttcctacgaggtcaactatattttgaagagggatggtatgaagaagcattagaacagtttgaagaaatcaaggagaaagaccatcaagcaacttaccagctaggagtgatgtactatgatgggctggggaccactctagacgctgagaaaggggtggactatatgaagaaaattcttgattctccatgtcccaaagcaagacacttaaaatttgcagctgcttacaacctcggaagagcttattatgaaggaaaaggtgttaaacgatcaaatgaggaagctgaaagactgtggcttatcgcagcagacaatggaaatcccaaagctagtgtgaaggctcaaagtatgctcgggctgtattactcaaccaaggagcccaaggagttagaaaaggcattttactggcattccgaagcatgtggcaatgggaatctggagtcccagggtgcacttgggctcatgtacttgtatggacaaggcatccggcaggatacggaagctgccctgcagtgcttaagagaagcagcagaacgcggaaacgtctatgctcaagggaatctcgtggagtattactataagatgaaattttttacaaagtgtgttgcattttccaaaaggatcgctgactatgatgaggttcacgacatccccatgatcgcccaggtcacagactgtctcccggagttcatcggcagaggcatggcaatggcatccttctaccacgcaaggtgtcttcagcttggcttgggcatcaccagggatgaaacaaccgctaaacactattattctaaagcttgtcgtctgaatcccgcattggcagatgaacttcactccttacttattcgtcaaagaatttagaccacaatgtatttcaacaaagatcatcaatgctaacacctcacaatgtgtgtatttttacagtagctatgtttggttattttgcacatcacaaattacactatcctgggtatttt

SEQ ID NO: 321 - DNA, 2161 bp, Homo sapiens
acgccgtgccttacagcgaccggcagggactcggccgtccgcgagcccagccgcccgccccgctccggccaggatgttggaggcttctctatctgagatgtgcacagaaacccagacaggaccagtcggcactgtgtgctgcgtgctgcctcctgaccagtctgtgtgacaccgtcggggctcttctggccagacagctcacaatccaggttttcactggtgcctacctagcagctattgacttagtgaactttatgttcattctcttcccagtctgtggatccaaattcaagtctaattcagatcgggaagcccgagagaggaagaggaggcggcagctcagggccagtgtgtttgccctggccctgccgctgagcctgggcccgtgctgggctctgtgggttgctgtcccgaaggcttcagccaccatccgggggccacagcggaggctgctagcgagcctgctgcaggaaaatactgagatcctcggctacctgctgggtagcgttgctgcctttggctcctgggcttctcggatcccccctctctccagaattatggagtctcgctgtgttgcccaggctggagtgcagtggcgtgatcttggctcactgcaaccctcgcctcccaatttcaagcgattctcctgcctcagcctcccgagtagctgggactacagctgccagtggagctgtaggagctgctagtggctcctggtgtcccttgatgcatggcagtgttgtttacatttctgccttgcccttcatgtggccttcttccctttgtattattttcctttcgtgtgtgatgaagagcaagatgagacaggccttaggatttgccaaggaagccagagagagccctgacacccaagcccttttgacctgtgcagagaaagaggaagaaaaccaggagaatttggattgggtgcctctcaccacactgtcacactgcaagtcactgaggacaatgacagcaatcagtcgctacatggagctgaccatcgagcctgtgcagcaggcaggctgcagtgccaccaggctgccaggtgacgggcagacgagcgccggagatgcgtccctgcaggaccccccgtcgtaccctcccgttcaggtcatccgggcccgggtgtcttccggcagctcctctgaggtctcctccatcaactccgacctggagcagaagtattgggaggccctaaactcggagcaggaccctgaagatgtgaacctcgaaggcagcaaagaaaatgtggagctactgggatcccaggtgcaccaggactctgtgaggacagcacacctgagtgatgatgattaacaccttctggagccagctcatcagctcagagcccagggtcaggagttcgttcagtaacgcagcgggaatcaatctgcactgacaccgcggcaggaactgaagctgccctggcaagtgaggaaccaggagccgtcactgagtgtggctgggctacatcatagctcatcacggagctacgactttgggtactgcggacagacctggataggcccagcattcgttctgaagatcacagttcacagaagcttttgcttcgtaaagataatccaaaggatctcagacccgctcttccttttcccttcattcccttgagagtcagccatgaacggaatacctgctaggttccaggaatgagctcacctaacagatagcaaatgtgtctggttagatctcagcagagcccattctgcaagacctggctgagccagatgagagggtgggccctgtgctggggggccttgggtcacacacaggaaccgagacctggcttccaccccccagtcacccacttgggttatctgctggaagttatcgataggactgtgtggccaaccaagtgcttgtgagatcactgacactgcaaaaacaaagcaaactgctccgggtaccaggacttcctccaacctggcaagggtgtgcgctgaggcggggcttgcaggtgagggggctgtatgcttcaggaactaactaaatgcatgcagaaggtaagaggcatgatgggaggtgttcaagcacagcaatcccatttgggagttattttgatactgcgatgagtaagggtaagggcgcatggaatggggctaaggtgggagtgaacactggggtgaataaattttaaatc

SEQ ID NO: 322 - DNA, 3179 bp, Homo sapiens
attgtcctatccttgaccatctggctaagactcagggacccacagcagccgctcccccactggctgtctgggaaaaggcccacattgccgggcacacaccagggtggccagggattggtcactgcctgaatgtccccggaccgatgcccgtgtgcccttgggcagccttcccctcggacaggctgtccaggctgggaaaccctgagccagagggattaagaagaaaggacagagtcgactgtccccttggctaatttgtgcttcatttagtgtaattttgctcagtggtcaaaacatagaggtgatgacaccgagggtccagacatgtcccatctccagggccaacctcctgcagatccccagccccgcccagccctgcctgctgcgccctgggcctgcctctgccctcacagccatcctgtacattcctgtgtctcagtggcgggggatagggggtgggggaagggtctccgatacaccagggggtgcggggaccctcagcatgggtgcccaggcagctctctatggaaatgcaggattgggtcaggaccccagagctgtgcagggccctctgtccccagcccaagtcctgagtccctcttgccagcctctgctgctccgcgtgtggtaggagctaccagtctggggtccgggctgggcgcattcatgatgcctgcctggggtctgagcaaatcctccccacggggtctgagcaagtcctccccacggggtctgagcaaatcctccccacggggtctgagcatgtcctccccacggggtctgagcaaatcctccccacggggtctgagcaagtcctccccatggggcctgagcaaatcctccccacggggtctgagcatgtcctccccacggggtctgagcaaatcctccccacggggtctgagcaaatcctccccatggggtctgagcaaatccttcctatgccgtctgagcaagtcctccccatgggttctgagcatgtcctccccacagggtctgagcaagtcctccccacggggtctgagcaagtcctccccacggggtctgagcatgtcctccccacggggtctgagcaagtcctccccacggggtctgatcatgtcctccccacggggtctgagcatgtcctctccacggggtctgagcaagtcctccccatggggtctgagcatgtcctccccacggggtctgagcaagtcctccccacggggtctatgtcctccccacggggtctgagcatgtcctccccatgggttctgagcaagtcctccccatggggtctgagcaagtcctccccacggggtctgagcaaatcctccccatggggtctgagcaaatccttcctatgccgtctgagcacatcctccccaagctgtgaccgagtgtccctcctgcaggtggaggatgttgctaggatgcaccttgaaggcaccccagcctcgccggagcgccccctcctcgtagcctggggtgtggctgggtggtctggggtcctgggtgccttgtgatgctggccccagggtccactcagcaccatcctggtgtcgtcatcagctggaggcttcccggggcctgtgctgggggtggagagcagggagaggcagcagggttctcctcagggtggggttgctgggaagcaccatcccacctgtcagactggccttgactgtagacagcccaggtgacctggaaggacagacggaccccaggtgatgagaaaggaccagagtctgacctctcacccctcctaagctctgaactcccgttggcttgcctgacctccaagtcctcctggggctgaaccctctacagatgcccctcctgggccctggggtgggcccggtttagctctccattgtggctgaaacccccagggcttcagtgctggcttgaagagggggtggggctccccaggcctggggattggcagttttttcctcccctcttcccaaactttcagactggaccacttaagaataatgaggtccaggtggttccgcttgagcctggatcctcactggctgtgggactgagcttcccctgccggtcccacctcccaccgggagcagctaatgacagccagaggctggagggtgaagctccccttggctgtcaggcgggccgcagggcaggggctgggcaggccaagggcgccactctcctgcccaggccagggcacccgatcactgcaccacaccccttgtggccgtctgtccagccagggccctgctgcaggtgcttcccgtgggactgtagggagaacaatcaagacttctgcctccttggtcgagcagggctgcctccccatctcatctactggcaaggaggctgggcaccttcagggagcttcagtttgggaagagggaggaggtctgaggtggatggtggcgatggctgcgcagcagtgagaatggaccgagtgccactgatgtgtgtgctccatggctccgtggctccgtggctcagtggctcagtggctcaatggctataatggctagttttgttacatattttcaccataataaaacaaaacatgtccaaggtgctacaaggagggaggagcccctggagcacccgcctgccatctcccatctgccaggcagcatccctccactggctctctgggaggggttcgaggcctccagcctccctgtggcccccatctgcctccaggagatttgttccctctctcctgccccgaaaccctcgaggcagccctgctcttggtcactgcagaggaagtggcccaggcttggcccaggccagctgtggcctctggaggcaagatgtggggactcacagtgttcgaaggccacacccccccgagcacatgggctccagtgcctctgaggcaaagagcaggcagcaccgtgcgcacagcagtgggagacacagcacagccaccagggcagcccccaggcagacggcgggcctagagagggcgggatgacacaagaaaggttctcctttggagacggcgaggtcaggcaggtgggagagggttcacggtgcttgaggtgcagagagaggatggtggaatggaaaacgtagggtgacttgtcggggacaggcccagggccacaactcgggcaggcctattgcccgagttttgggtcccatcctggcaggcaggggagagaattctgaattttttaatgaaacggatagttgagggctgg

SEQ ID NO: 323 - DNA, 2765 bp, Homo sapiens
ggcggcagcgcccggcgcccgggctcacctcggccatgagcagcgcagccggcccagacccgtcggaggcgcccgaagagcggcatttcctcagcaccgcggaggcagccgccctggagcgggagctgctggaggattatcgctttgggcggcagcagctcgtggagctgtgcggtcatgctagtgccgtggctgtgaccaaggtggggaaactgaagctcagaggtggcgaggggcctgccctgggtcagagggggatggaagcagagctgcaacccaggtgtgtctggctctggagtaaacccccacacctcgaggggccaggaggatgacacaagggtgatagcaataatcatactatggagtgcttcaccgtgcagccagcagtgctgggcatcagtttcctctgcaacagcataataaatggtactgacgagtcagtccctaaacgtgaacgcctcagaaaactgtcccatacagtcgaggctctagcgtgactgcctcctcttcctcccctgccctcctcatccccctcgcctttctcctccttcctcctcctcctgccccctcctcttaccctcctcctcctttctctctccctcctcctccccttccgcccctttcttctctcctttctccttcctctccctcctcctccccctcctcctgttctccttcctccttcccacttaccctacctcctccccatcctcctcctccccattctctccctcctcacccctcctcctctttttcttcttattaccacggtatactttttaaaaactcaatgtttttcttcatgtggacttaaatgtttgtatttccaaatgaaatagatcccgggtgaggcgcccaaaggagaaggaaaatcaaaaccccagaaagaaacccagtagtcactactcgcctggcgctcagtggccaactgtctggtttttgcactgaaagccccttgtctgtccagaagcccctcagtcccagtcttgggtcttgggctctgggcccggtgtggctgggatcgcaggcatgttcatggcaggtcaggactgcgctaagcctttggggaggatacttgaaaggggagtaatctgctgtctgtgtggttggagcttaaagtacagctggggctcaagagacacccagagtgcctgtcaggcggtggcactgtcatcgcatttgataaaggccaaactgagtctgggagagaaggggctggggccacgcagaatcagggcagggctggggccaaaatgcctggagagacagagtctgagagatacagagatggccagagacagatggagagagacagataacagagagatacagagacagccagagacaaatggagagagagacaaatggagaaagagagccagagacatacagaaagacagagacactagagtctgagagatacagacagacacagagacagccagagacagatggagagagacagagacacaaagagagccagagacacagagagtctgagagatacagacagacacagagacggccagagacggagagagacagagacagacagagacgcagagagtctgagagatacagaaacagccagagacaggtggggagagagacatgaagagagccagagacatacagagagacagagacacacagagagacagagacacggagagtctgagagatacagagagacacagagacagccagagagagacagagaggccccagggcatcgtggctaaggttgggctcccctactccacagcctccaggaggggctgaggtctggaaacatgggcgggggtgggcccgcggtgagaaaggtggaagaatgtctgcaactcaggcggagaataaacaaaccgcactccgggcgacgggcagtggctggatgcacgtttttcctgcaccgacctggcagagcctgagaccgggcctctgcatctccagcggggaaactgaggccccaagaggcccaacccctcatccagaacagctcacctcctgtcctatcctgttgcctccaggcccaagccccatcccttcccctactccgggcctcagtttcctctccaggcaaggaggaatctggactgtgcctgtgcctttgctgtgtcccctaccaccaggcgttcccgttgcccgctctctcccggaagcagaggacggtgctggtcgtgtgtggcccggagcagaacggggcagtggggctggtctgtgcccggcacctgcgggtgtttgagtatgaacccaccatcttctaccccacacgctcgctggacctgctgcatcgggacctgaccacccagtgcgagaagatggacatccccttcctgagctacctgcccactgaggtgcagctcattaacgaagcctatgggctggtggtggatgccgtactgggccccggcgtggagccgggcgaggtcgggggcccctgcacccgcgcgctggccacgctcaagctgctgtccatccccctcgtgagcctggacatcccctcaggctgggacgcagagaccggcagcgattcggaggacgggctgcggcctgacgtgctggtgtctctcgcggcgcccaagcgctgcgctggccgcttctccgggcgccaccacttcgtggccggcaggttcgtgcccgatgacgtgcgccgcaagttcgctctgcgcctgccgggatacacgggcaccgactgcgtcgcggcactgtgaccgccacccgcggccacaccgcagggaccctcgccaataaacagccctcccacc

SEQ ID NO: 324 - DNA, 2850 bp, Homo sapiens
gagaacaaccgggtgaagttctacatgcagacggaggtgtctgagctgcggggccaggagggaaaggtgggcccttctcccttctccctgctgctttctgtcctctgtcccctgagcctgggagctgggtccacctgtttatccacccactccccacagctgaaggaggttgtgctgaagagcagcaaggtcgtgcgggctgacgtctgcgtggtgggcattggtgagttggtgtgtgggcaggcaggcacaaagcagcccagccgtctgcacatgctcacatgtggccttgggctagtcccttcccctcccagagcctcagtttccaccacatctgtcaaatgggaacccccaaccgcccccactttacggagctgttggggaaggtatgtaccgggctcagcccaggcctggcacagtggatgctcccagtgcccgctgcccagtaacactcatctccatgccctgcgagagttgacatagacgagactcgaactggctcctgctccagctgaagtgccaatttgggtaggggccaagatgggaggtggtagcacctgcaggggctgaggaggtatggcatgctgtccctccacttaagggcctcatggagcacttcttggagaaggtgatatctgaggtcttgcgggaggcaccgggtctgtgggagaccgggtagtggggaccagggtgcatgaaggcctcaggtagacagcccctggaggatcagtctggggctggcacatcaagcgcatgctgtagggtgtggagagtgactacgcagaagggagggacaggggagtggacacaggcttccgtcctgtcaggtgcagtgcccgccacaggcttcctgaggcaaagcggcatcggtttggattcccgaggcttcatccctgtcaacaagatgatgcagaccaatgtcccaggcgtgtttgcagctggcgatgctgtcaccttcccccttgcctggaggaacaaccgcaaagtgaacattccacattggcagatggctcatgctcaggggcgcgtggcagcccagaacatgttggcgcaggaggcggagatgagcactgtgccctacctctggaccgccatgtttggcaagagcctgcgctacgcgggctacggagaaggcttcgacgacgtcatcatccagggggatctggaggagctgaagtttgtggctttttacactaagtgagagcaccggggtgcagcttggcgcgaagcagcgggagctcagtcgggaagggggattcatcccaggcaaaatcccagaacaagagcccagccctgagccccgctgaggagtgctggagcttccttaggaaagcccgaagcttgtgcacggtcaagccgcgatgtgcaaagcagggagggctgggtgctcaggccattcttgttgccctggggtaggtccttccctgggccccagatggacagcagtgcatcagggttttcaaaaaggggctgctgccttgcagtcctcaggcttggccatcctctccttgcagaggcgacgaggtgatcgccgtggccagcatgaactacgatcccattgtgtccaaggtcgctgaggtgctggcctcaggccgtgccatccggaagcgggaggtggagtgagtgtgggtgtgggaagcctgggggtgggagtagttccctggagtactggctaaggtgcctatgacagccagccgcccccacaaccctccagggcctttcccctcttggtttgcatcgcctgaggcttacaggactacagggaggtgtggggcaaggatcatggtttgagagcaggctggttatgtgttcatggtggatggaagggatagagatgtgtgtccccaggcagggccagtgctgtgggaaggggtcagggcccaatgcatgggcaatcaccaggcgtgggacacctaactggacatagttgtgctgagcctggcagaagctaggtgggaaatgcagctactgatgccctgggtatgccctccacatagatggtgggggtggttctaggtttcactcaacaccagccagttcccttatcctggtgtggtgtcaatgagattcaccctctgcgagagagctcccagggactggggacagcctggaggccactgggaggctatgagacaggggcaggcttcaggctggaaacaatggaggaccagaaggggacatgataaatgacatgctctctccttggccttctctccgtttctctctcttgccttcgtgaaggctgtttgtgctgcacagcaagtacgtgtgtccttcatgttgaccgttctgagcctttcccatgtcagcccagaccctccacccaatggtcttatctccctctgtccaagtacacctccctgctgggcactagggtctggcacagaacagaccccctgctgtcctcaagggccagctgttcagggtgcccagagtggagagcctgttttcttctgtcttgacccctcctcccctcactcctgcaggactggcgacatgtcctggcttacggggaaaggatcctgagctcacatgcagtagacttgggcaggcaaagggggcaccaagggcacaggccaagccttgggggcaggtgccaatctccagtcccaggatcccccagggcagaacctgagccctcccagtgcttgccttcagccacctggctcccctcctgggaggcctctgctggatccagaagatgctcaaccctcaaggcctctgctgccactgacagctggcactggaggcaggacaagccctgcctcttctccctctattgggactggtcccctgaagaaccctgcaacatgttagacattaccgtaaaattaaaacgcacaaatttgc

SEQ ID NO: 325 - DNA, 4466 bp, Homo sapiens
agatgcctcacctctaggggatgctgattctgggatgcctttttcgtctcctaggctcctcaaggccaactgcgctgggaagagggggtgtccgacagcaggagggctgtttttttgaactacaatttgccagcatacagcagagcagcaagaagataacagggcggggggcacgggattagcccaaacaaaacacactcaagaacgcgagtctgtggttcaacacgaggcagaaaacagctgggccgggtgcggggcttctccctcgcgtgtatccgctcactgcactcgctgccctggccgcgggcgccgcgcagggtgctgatgtccaggagggatctagacctcccgcggcgctcgggctagtggacgcaggtggtcccaaatgctgggaccaagctaggaaccaagcggaagctcggattgctcggcatcgggcctcgtcgttattctaccgtgagggaaactgagaccgagggcacggcagggagtcgcccgccgtctcaccagcgtgaggggttgcgccgggccccgaaaactggtttgcgccgcccggcatcgggatccgggacctctgcccgccgggcgctgcctgcgcgttcctggaactgggctgggcggagaaatcagggcccgcagagaggcattcttgccgccttccccgccgcccggggccgcaggggggcctggccaaggcttccagcacagaggagcttcggggaggctggattgcgcctgtgtctaaaaataaacaggttcctgcgtgaagaccagctgggagcccactgcctgctgccacctccaactccggccccctcaccatgcactccctggacgagccgctcgacctgaagctgagtatcaccaagctccgggcggcaagagagaagcgggagaggacgctgggtgtggtccggccccgtgctctgcacagggagctgggcctggtggatgacagccccacacctggctctccaggctccccgccctcaggcttcctgctgaactccaagttccccgagaaggtggagggacgcttttcagcagcccctctcgtggacctcagcctgtcaccaccatctgggctggactcccccaatggcagcagctcgctgtcccccgagcgccagggcaacggggacctgcctccagtgcccagtgcctcggacttccagccactgcgctatttggatggtgtccccagctccttccagttcttcctgcccctcggctccgggggggccctgcacctgcctgcctcctccttccttacccctcccaaggacaagtgcctctcgccagacctgcccctgcccaagcagctggtgtgtcgctgggccaagtgtaaccagctctttgagctcctgcaagacctggtggaccatgtcaacgattaccatgtcaagcccgagaaggatgcggggtactgctgccactgggagggctgcgcccgccatggccgaggtttcaacgccaggtacaagatgctcatccacatccgcacacacaccaacgagaagccacaccgctgtccgacctgcagcaagagcttctcccgcctggagaacctgaagatccacaaccggtcgcacacaggtgagaagccctacgtctgcccctacgagggctgcaacaagcgctattccaactccagtgaccgctttaagcacacgcgcacccactacgtggacaagccctactactgcaagatgcccggctgccacaagcgctacacggaccccagctcactgcgcaagcacatcaaggcccatggccactttgtgtcccacgagcagcaagagctcctgcagctgcgcccaccccccaagccgccactgcccgcccccgacggcggcccctatgtcagtggggcccagatcatcatccccaacccagctgccctctttggaggccctggcctgcccggcttacccctacccctggcccccggcccccttgacctcagtgccctggcctgtggcaacggtgggggcagtgggggtggggggggcatgggccctgggctgccaggccccgtcctgcctctcaatctggccaagaacccgctgctgccctcgccctttggggctggcggactgggcttgcctgtggtctccctccttgctggcgcagctggtggcaaggccgagggggagaaggggcgtgggtcggtgcccaccagggccctgggcatggagggccacaagacgccccttgaaaggacggagagcagctgctcccggccaagccccgatggactccccctgctgccaggcaccgtgctggacctgtccacgggcgtcaactcagctgccagcagcccagaggcgttggcccctggctgggtggtcatcccgccgggctcggtgctgctcaaaccggctgtggtgaactgagcccatcctgcggacagttgtggtgcccccccggcagctcccggcactgcccccgacgaacggaaactcttctgtgaaatagcaataatgtcctactgcccgggcagccccagcccagcccgccgggagcaaggatggtgctaggtcattcatggctggcctcccagcccccgggtggggacctggcctgtcatgcagggagagctgtgctcctgggtgctgaagcctcgctcctgtctgtcccccaccacctggccctcagcttctgagaggctttcccctgcccgacctcctcccgtttccctctcccaccctggcacctccctcacctagtgaccacccatggcaagttgccctctcccagcagagggggtgggtggggtggcatctgccctccctgctagcaccaggctcccccttcctgagaggagcccccagggaccagaggcctgcccttccctcctaggcttacccagcccctgccctgggggctccttggacccctttccctctgaccctgcctccagagggaaagcaagacagatgcaggcccctgcaaagccccaggtagaagcatgccccccaggacaaggcgcctcccactagttaggaggaggcccgctctgcagccgccgtcctcaccccaggccaggcctgcagtaccagacgggatagctggccactccacccctgcaccccagggtctcctccctctaccttttggggcaccctgggagcgtgggaagcaggtccgagggcccctgagctggcaaggggaggtgccaggccagctgtggtgccaagatactgagtgacctgggccctggctcagggagcatgcggggccaggcccagcgccccgtcttcctccttctacccccgctgggcctggcctgggcagcgccccctgcagaggcctttgggtccttggtcctgtaacaggaagggggaggctggctggggacgaccgaccacaggctgggacacagctcctggtctgggggctccaagtgacagcatgcaggggagggggctcccagtcagtgctgtgttgggagctttctggaggctgtggactgaaggccttgagggaagcagtggctggaggagggtgctggacccatgacacgttgcttcctctggcttttccctgctgggccgctttctcagaggcacttccccacccctaacacccagtgggcccccccaggttctgtgccactcagagggaccctggcaggggccagaaccacttaagggtggtgctggagggccttgtgccccagtcccatcccaggacgccctgagggatggacgcagccatgcaccccccatctggggcctctccctgctccctctcccacctggcagctgggagttctggcttctaggcctgccctgtcaccaggcctctgagtggccaggcccttccacctccccatctgtaaaacgaggcagctgcccggacagccttggggtccttagtggccctgcaggtcctctggcagctctgctgaccccaccctctcccggactgcccttctgtcccagaggggtcaccctgacccggcccaccttgccactgggctttggactccagccctgacagggcccagccacactggctctgcccctcgaaggggctatgagcaaggtaggagggagctggtctcctttcttcgggccccacccaggccctgagcaccccccacccctgtgagggccccaggccttaagtccctggcggggtcatgggtttgcgacttgagcagagcggaggaacagggcactggaaggccgacgagctcagcatgcgactcggtgacggaccaggctcggcagggccggtgtactttttgtggttgtcattggtgtgttgttgcacattccaggacgtcagtattttaacaggttctaagtgcctttctatcgtagcttatgttttcctcctcttggctccattgctgttagcatagagttttaaaaaaagagataagctaatgactataacaatatattcctccatgggagaggaagtttataaagaaacaataaaagtgagttgcaaag

SEQ ID NO: 326 - DNA, 4442 bp, Homo sapiens
tagtgaaaaaaaaatgtctttaagtcccttttgtatgttattagtatagccacttagctcttttttgattattgtttgcatggtatcttttttcaccctttaactttcattgtatctctgaatctaaagtgtgtttcttgtaaacagcatatagtgggatcatgtttcttatctgtcctgctggtctctgccgtgaatctaaagtgtgtttcttgtaaacagcatatagtaggatagtgtttctcatctgtctttctggtctctgctctgaatcaaaagtgtgtttcttgtagacagcacatagtgggatcatgtttttcatctgccctgctggtctctgctgtttgagagggatgtttaatccatttacattcagtgtgattactgagaaagttggatttgtatctgccatttctaaatttgtttactatattgtcttttttgtctttcttcctttatttctccattacttttttgtgttaaatggacatttaattctcttgtaacattgtaatttccttgtctgttttactgggttttttttaaaagtaactttcttagcagctgctctgagtattacagtaacaacgtaaaaccaatcaagtgttcagatgaacttaatataatgtacaaaaaccttcacttcaagtagctttgtttcctctcagcttcttggtgctgtatttgtcatataaatgctaccttttagattgtaagtccgtcagcagtcttgtaattattgctttatgcagttgtcttttaaatcacatagaagaagaaaagatgtacaaacagaaatgagtttctgctgtctctgttgctggctttgcagttgtcttttttggtgctctttgtgtggatttgagtgtggtgtcttggacttcagcctcaagtatttcttgtaggacagatcttctagcaatgaattctctttgtttttgtttatctgagaatgttgtaatttttccttctcttctgaagaataattgtgctggatatggctgacttggttggccctctttttctttcagtcctctatagatgtcattccactgcctctggcatctgtggtttccatggcgggagcaccgcaccatgtctcagtctctttttagcttctgactgtttgactgtggtgtgtctaattgtggatctttcagtgtgtcctacctgcagttctttgagcttcttggatatagaggttaatatttcttgtagtctgattgtttacatcttctcttcacttattgatcttctgcctagttatattgatattgaatgtgggtattgaatccttcggttttgtcagcttcatgttcagccagtgactggacaggggacccctttaagtgctttgcaccagtaactctcatggttctgctgacacacagttgatgtgtggtgagtatgccttcagcgctccattgtggttctgcaaatttgggaaattttaggttgtcgtttctcgaaatattttatgtccatgttctcttcccccacttggactccagctacgtgtgttgatgtggagctgggcacagccttggaggcctccttgactttcctttattccggaattttttcttcttctcagaatgggtcatctcagttgacctatcttcaaggtcacagatgcttttgccaaacaaaacctgatgtcaagctgctctagtgaatttttcatttcagttattgtacttttctactccaaacttccatttggctctctcctataatttctgtatctttactcatattctttgtttagtgaaacattctcatactttaattctgtagacacagtttcctttagttatttgaacatatgtgtagaagctgatttaaagtacttgtctaagccgggcgtggtggtgtgcacctgtaatcccagctacttgggaggcagaggcaggagaattgcttggacccgggaggcagaggttgcagtgagccaggatcaagccattgtactccagcctgggccacagagcgagacgctttcaaaactagatagatagatagattagatagatagatagatagatagatagatagatagatagatagataggataagataagatagataggtgacttgtctactaagttcaacatcagggcttattcaggggaagttcctattgatgaccttttttcccatgtcagagccaaggaaataacatactctttctttgtggtctcatatatatgtattttttgaagactggacactttaataatgtgctgtgcaactctggaaatcagataccctctccacgagtttattgttgttctgttgctgttaccttttgtttagtgtgtgttctggactaatttgaagtgtccacctcatcagcttcatgttcagccagtgactggacagaggacccctttaagtgctttgcaccagtaactctcacggttctgccgacacgcagttgatgcatggtgagtgtgccttcagcgctccatcgcggttctgctgacacgcagttgatatgtggtcagtgctccagcaggcagctgccaactgtgcctttgccttcacttcttacttgcacacagccacaaagccagccagaggtgagggccagggcagctcaggttcctctcgggcacacacacagctctgtgcctgtgtgggcacagccttccatgcctccaggagtgtggcagagcttctcagcggccactgtgggcatctcgttcctcagatcttcctttcatgagttatgtagttgaattatcaatctttcttggcttctaagttttgtgttctacttagaatgctcttcccccttaaagattatatttgaaatgttttccatgttttcttctagtacttttatgggtttcattttcatattgaaatcattgatctacttctagtttttgatacaaaatgtgagccaggaaacccagtttttaaatttcaaatagctgtccaggtgtccctgcacctcttatgcatgagccctcgctttgtgccaatgtggagtgcccgcctgctcacacgtgcccatgtggagtgcccgcctgctcatgtgcccatgtggagtgcccgcctgctcacacatgtcgatgcggagtgcccgcctgctcacacatgcccatgtggagtgcccgcctgctcacacgtgcccatgtggagtgcccgcctgctcacacacgtgtccatgtggagtgcccacctgctcatgtgcccatgtggagtgcccacctgctcacatgtgccgatgtggagtgccacctgctcacacacgtgcccatgtggagtgcccgcctgctcacgtgcccatgtggagtgcccgcctgctcacacgtgccgatgcggagtgcccgcctgctcacacgtgcccatgcggagtgcccgcctgctcacacgtgcccatgcggagtgcccgcctgctcacacgtgcccatgcggagtgcccgcctgctcacacgtgccgacgtggagtgcccgcctgctcacacgtgcccatgtggagtgcccgcctgctcacacgtgccaacgtggagtgcccgcctgatcacacgtgcccatgtggagtgctcgcctgctcacacgtgccgatgtggagtgcctgcctgctcacacgtgcccatgtggagtgttcgcctgctcacacgtgccgatgcggagtgcccgcctgctcacacgtgccgatgcggagtgcccgcctgctcacacgtgcccatgtggagtgcccgcctgctcacgtgccgatgtggagtgcccgcctgctcacacgtgcccatgtggagtgcccgcctgctcacgtgccgatgtggggtgcccgcctgctcacatgtgccgatgtggagtgcccgcctgctcacacgtgcccatgaggagtgcccgcctgctcacacgtgccgacgtggagtgcccgcctgctcacgtgcccatatggagtgcccgcctgctcacacgtgccattgtggagtgcccgcctgctcacacacatgccgatgtggagtgcccgcctgctcacacgtgcccatgtggagtgcccgcctgctcacacgtgcccatgtggagtgcccgcctgctcacacacgtgcccatgtggagtgcccgcctgctcacacgtgcccatgtggagtgcctgcctgctcacacacgtgcccatgtggagtgcccgcctgctcacacaaagccctggcatggtggttctgtaggtttcctgtcctgccggccgagtcagacgctgttaccgtacattctactcatggtggctttttaatacgtttttatgtcaaggatcccttttatatttctctgcacctcgagataacgtaggaatattagggatgagatggaagaggagagggtgtttttgtaaaattgaattcaggactgatttgttagcctggtgcttttcgtatcagaccttttaatgaattttcatggatgctgattaaaagacaaacctgtg

SEQ ID NO: 327 - DNA, 4298 bp, Homo sapiens
gttgtctaggctaatctcgaacttcttcttagcgatctttccaccttggcctcccaaaatgctggaattacaggtctgaggcaccacacctgggttccatgtgctttctgcacacacttgggaggcaggtgggagaccctggatccagagcttgtgggtgatgctggctttctcctgccctggggatcaagacaggcaccagcgcccaagggcacagcctgtgccacccgctgcggatttgcagccgtgcagaagcagggctgggaggccctctgcagatgtgtctgtcttagtgaggcctccccagggctgtgtgggcgctgggccaagcacttccataccacaagctggtcacagttcagaccaagcagtgcaaggcacatctgggtgccaggcacagtggtgccccatggggtggccccactcctggcctggctcatgcctcccgtgggggcagcagagcaactggctcagggcgggatgtggtcagacctggaggcggagtgctatgggtgccacgctccttcccaggccctcacccctccttctccacccaggagtcgttcacgcctactgaggagcatgtgttggtggtgcgcctgctgctgaagcacctgcacgcctttgccaacagcctgaagccagagcaggcctcaccctccgcccactcccacgccaccagccccctggaggagttcaaacgggctgctgtcccgaggttcgtccagcagaaactctacctcttcttgcagcattgctttggccactggcccctggacgcatcgttcagagctgtgagtgttggccccgtcacacgtgtgcctgtgtcctctgtgtgccttgaggtgggaggtcctttggggcagataaaggaggagagcaagtgttatcacagaggccttggcaaggagggggtcttggagggccacattgttctttctgtttgagtttccaaagccagccctcaggaaagccctgccctgtcccacctgtctggtgcagggcaggttcctacccttacctgaccagggagtactctgccccctgggctgggaaaagcccaccctggcttctggagggccagcaagagccaaacctcacagggctgtgcatgtctctcctgcgccctctggaggaagtgagaagagtcagtcccacccagctgccgcctggtatctgggctccaggccaccgagtatttggcccccagccacggagcccttagcacacacctcccccacaggtcctggagatgtggctgagctacctgcagccgtggcggtacgcgcctgacaagcaggctccgggcagcgactcccagccccggtgtgtgtcggagaaatgggcaccctttgtccaggagaacctgctgatgtacaccaagttgtttgtgggctttctgaaccgcgcgctccgcacagacctggtcagccccaagcacgcgctcatggtgttccgagtggccaaagtctttgcccagcccaacctggctgagatgattcagaaaggtaagtcctcagcctgggccagcccggtatacgtcaacccagccagaccagggccaggcccttagctgggggtggctggtctttaagagggacccacacgcccagagtgggccccggcaaagggtgctgtggagactcctgggacacgtctgtgtggtgaggtctgaaaccggctggatcctgcctgccctgcagccaccaggcactgggtgggggatcgcaggtgtgcccacagagcgggccggcacggtccaagctgcggccccgtgaccccgctgtttctccctggcaactcgtgttggccgcttcaggaggtgagcctggtctctgccttgcattcatcctggctgggttgggcgttggtttctgtcgatcctcctgttgtttacctcctgcagacactgctaggggctctgtgagccagcagctcccccatccgccctccccatgtcagccacctactgtgtgggagatgctgccaggcagggcctcaggaggacacccctgggtcatggctccccagacacctcagagacaccccagaatcctaagggcagcagtcgggtactctgcctccgggaagtgggtgccaggttcgtctcctgccttctaggtgagcagctattcctggagccagagctggtcatcccccaccgccagcaccgactcttcacggcccccacattcactgggagcttcctgtcaccctggccaccagcggtcactgatgcctccttcaaggtgaagagccacgtctacagcctggagggccaggactgcaagtacaccccgatgtttgggcccgaggcccgcaccctggtcctgcgcctcgctcagctcatcacacaggccaaacacacagccaagtccatctccgaccagtgtgcggagagcccggctggccactccttcctctcatggctgggctttagctccatggacaccaatggctcctacacagccaacgacctggacgagatggggcaagacagtgtccggaagacagatgaatacctggagaaggccctggagtacctgcgccagatattccggctcagcgaagcgcagctcaggcagttcacactcgccttgggcaccacccaggatgagaatggaaaaaagcaactccccgactgcatcgtgggtgaggacggactcatccttacgcccctggggcggtaccagatcatcaatgggctgcgaaggtttgaaattgagtaccagggggacccggagctgcagcccatccggagctatgagatcgccggcttggtccgcacactctttaggctgtcgtctgccatcaaccacagatttgcaggacagatggcggctctgtgttcccgggatgacttcctcggcagcttctgtcgctaccacctcacagaacctgggctggccagcaggcacctgctgagccctgtggggcggaggcaggtggccggccacacccgcggccccaggctcagcctgcgcttcctgggcagttaccggacgctggtctcgctgctgctggccttcttcgtggcctctctgttctgcgtcgggcccctcccatgcacgctgctgctcaccctgggctatgtcctctacgcctctgccatgacactgctgaccgagcgggggaagctgcaccagccctgaaggtgtcagctgccttcagagcaggctggagggatttgccacacagccccacccttgggctgagaggacctgggaagcccctccaggagggaacacggtcatcctcgggcttctggagcggggttcctgcagccgcagaggcatctggaggaaacgcaaccaagaaaggaaggcaggtgggccccagcaaaggagtagctgccagggctcaacagctacgctctgtgacagcgcagagctcagcggcggcctttccctccctccgccaaggactcacggccaagccagctctcggggccttttttccactgcccatttggctactctgctgcaccaagcttgggagccagcctgccaacagccacctgggcctggcctccccactggctggccttgaggttggcagagtgggttgtggcgcttcctctctctgtgtgggaccaggacagtggcttaagtctccactccaggaaagaatcaaagtttctagagttgtgagaaaaccagagagtggctgtcctgattcttcactgtgaggggcgttcttcatgttctcccagctgttccaagactgggccgtagaattccatgtttcaggagcctaagaccctcccagagcccaggggcttcaccgcagaccccaagccattgagcacatcacccaaagcagtggccaacatcgcggacccctgtgccttgtcacagatgggtgctggtcctcaggcgttggggacactgctgggtcgatggggtcggattctgccagtttctgctctgcagccaaagatggtcagaagcattgtcacttcagtaacatcaagtgctcaaagacatggcaaccgttcagtggtacttaagtattcaaaatatacaactacagattctctgacagaaaccagcacggggtcttcaccttcattcaccccacaggcgacatgcgagggagaacagcatctcagtggtgatttccaaaccaagcctttgttttcggtgtggggttttgggggtttgctttaatgtttttgaaattgtaaatgttgggctttgtattttgatgtaaactgagcataatggcattttagggcctgtgaccaaaaatgaagcttgtaacgaccatggatctgaataaacatgtccttgcttctg

SEQ ID NO: 328 - DNA, 4619 bp, Homo sapiens
actaccttttctcttcggttggctgtagtttaaattctaaggtctcctcaagaaatgacattttcacatttcttaggcatctgtggtgccagaggagcaaacccatcgcacacgccaggtctgccatggggccctgggcggtggggattttggatgtaacgtgtctaggccgagcccgcgccgtgaaaggcctaccctgccgaaagcccgggcggcgggcgcccacaagtcagggctcggtgcggcgccgcagtcagctctgcccgcgagccgagtccgggctgctgagggggagccgcgctgggggcggcggcgtcggggcgggggcgggagccgggcggcagctccagcgcccgtgggggaggagcggcagcggcggcggctggagctgctgtggcgaccgacgcgaggcggtggcagaggagacccacccctgtccacatggacagtcgcaaaggcctccgctgatgcattcacgcctgggcggggtgggcggacggccgtagcggcggcggctgcagaacgagctaggggcctgggggcgcctgacggtcgcagagacctcgccgctccggcgcggcgggtgcggccattttacggcctgggacgaagggaggcgtgtttgtgtgctcgctttcattctcctttcttgggaacccacggctgggggaagtttctcaggcagcctgggtgggcggtggatggggagtcgtgggccgagaggaaccgggcccgggaagcgccgtcgtcgtcgtcgccggtcgcgttcccccggagaggcctgagaggctcgggccgcgggcctcgctgcccgccagcccgcggacaggcccgggcgcgcctggcctgcctttgtataggcccgtctgaacgtgggagcgcagcccgcctgacggctgagcccgaggcccgcaaccctgcggcgtctaccctcctccggcgcggcccctcatcccggcgagcacggcggcggtgtgggccatggattaagaaggaggcggcgtgggaggaggaagatggcggccggcaagagcggcggtagcgcaggggagattacttttctggaagctttggctagatcagagtctaagagagatggaggttttaaaaataattggagctttgatcatgaagaagaaagtgaaggagatacagataaagatgggacaaatctgctcagtgtggatgaagatgaggattctgaaacctcaaaaggaaaaaagttaaatcgtcgatctgaaattgttgctaatagctctggtgaattcatcttgaagacatatgtaagacgaaacaagtctgaaagttttaaaactttgaaaggcaacccaattggacttaacatgttgagcaacaataagaaattgagtgaaaatatgcaaaatacgtcattatgttctggaactgtagttcatggtagacgttttcatcatgctcatgcacagataccagtagtaaaaacagcagcccaaaggaaagaatacccacctcatgtccaaaaagttgaaattaatcctgtaaggttaagtcggctccaaggtgttgaacgtataatgaagaaaacagaagagtccgaatcacaagtggagcctgaaattaagaggaaagtacaacagaaacggcactgtagtacctatcagcctactcctcctctatctcctgcttcaaaaaaatgtttaacccatttagaggatttgcaaagaaattgcagacaagctattactttgaatgagtctactggaccattattaagaacgtcaattcatcagaattctggaggacagaagtcacaaaacacaggattaacaaccaagaagttttatggcaacaatgtggaaaaggttccaattgatattattgtgaattgtgatgacagtaaacacacttatttacagactaatggaaaagtcattttacctggggcaaaaatacccaaaatcacaaacttgaaagaaaggaaaacaagtttgtcagacctaaatgatccaatcattttgtccagtgatgatgatgatgacaacgacagaactaacagaagagaaagcatatctcctcagcctgctgattcagcatgttcttcccctgcaccatccactggaaaagtagaagcagcactaaatgaaaatacttgcagagcagagcgtgaactacgaagcattccagaagactcagagttaaatacagttacattgccaagaaaagcaagaatgaaagaccagtttggcaattctattatcaacacacctctgaaacgtcgtaaagtgttttctcaagagcctccagatgctttagctttaagctgccaaagttcctttgacagtgtcattttaaactgtcgaagtatacgagtaggaacactcttccggctgttaatagagcctgtaattttttgtttagattttatcaagatacagctagacgaaccagaccatgatcctgtagagattatattaaatacctctgatctaactaaatgtgaatggtgtaatgtccgaaaattacctgtagtgtttcttcaagcaattccagcagtttatcaaaagctgagcatccaactgcaaatgaataaggaggataaagtttggaatgattgtaaaggagtaaataaattaacaaatttagaagaacaatatataattttaatttttcaaaatggccttgatcctccggcaaatatggtatttgaaagtatcattaatgaaattggtataaagaataacatctccaatttttttgcgaaaattccctttgaagaagctaatggcagacttgttgcctgtacaagaacctatgaagagagcatcaaaggaagttgtgggcaaaaggaaaacaaaattaaaactgtatcatttgaatctaaaatacaacttagaagcaaacaagaatttcagttttttgatgaagaagaagaaactggagaaaaccacaccatcttcattggcccagtagaaaagttgatagtatatccaccacctccagctaagggaggcatctctgttaccaatgaggacctgcactgtctaaatgaaggagaatttttaaatgatgttattatagacttttatttgaaatacttggtgcttgaaaaactgaagaaggaagacgctgaccgaattcatatattcagttcttttttctataaacgccttaatcagagagagaggagaaatcatgaaacaactaatctgtcaatacagcaaaaacggcatgggagagtaaaaacatggacccggcacgtagatatttttgagaaggattttatttttgtaccccttaatgaagctgcacactggtttttggctgttgtttgtttccccggtttggaaaaaccaaagtatgaacctaatcctcattaccatgaaaatgctgtcatacagaaatgttcaactgtagaggacagttgtatttcttcttcagccagtgaaatggagagttgttcacaaaactcttctgccaagcctgtaattaagaagatgctaaacaaaaaacattgcatagctgtaattgattccaatcctgggcaggaagaaagtgaccctcgttataagagaaacatatgcagtgtaaaatacagtgtgaaaaaaataaatcatactgcgagtgaaaatgaagaattcaataaaggagaatctacatcccagaaagttgctgataggactaaaagtgagaatggcctacagaatgaaagtttaagttccacacatcatacagatggcttaagcaaaatcagactaaactatagcgatgaatcacctgaagctggtaaaatgcttgaagatgaactcgtcgacttctcagaagatcaggataaccaggatgatagcagtgacgatggattcctcgctgatgacaactgcagttcagaaataggacagtggcatttaaagcctactatctgtaaacaaccttgtatcctacttatggactcactccgaggcccttctcggtcaaatgttgtcaaaattttaagagagtatttagaagtggaatgggaagttaaaaaaggaagcaaaagaagtttttccaaagatgttatgaagggctctaatccaaaagtaccacagcaaaacaacttcagtgactgtggtgtatatgtattgcagtatgtagagagcttttttgagaatccaattctcagttttgaactacctatgaatttggcaaactggtttcctccaccaagaatgagaacaaaaagagaagaaatccgaaacataattctgaagctacaggaagatcagagcaaagagaaaagaaagcataaggacacttactcaacagaagcacctttaggcgaaggaacagaacaatgtgtcaatagtatctcagattgaccatttctgttacttgtcatttctactttcagaaactaaatgactttcaaatttgggtatagacaataaagaactgaagtgctcactactcagtgatttggaaattttgatgcttgtataaatgtcagataattaatttccaaaggcgtatgtattaagtaaaagtctgtaaatatgttaatgaggccaatttttccagcatttataattatttttttcacttgttaggaagcttttgttatgtattttctgttaatagtacctaaaattgcaacttctaaaccc

SEQ ID NO: 329 - DNA, 3471 bp, Homo sapiens
gctatcaggaggagcaaaagggaaggatctgctgctgggggctcgctgggtgaccctttgccagacgaaaagagctggtcgagagagaagcgcttggcaggagctctctgcgggacctaagctccgtggctgctcgggatccctacgtccgctgctgctgaaggagcagaggggaggacgccagcggttgcttactggagcctggaggaaaatggaaacatcattccctagaaacagttgaagttgacagacctagaggttgacaaaaggacacgacactagggaatttgcattgtcatgtttcgaaataccattccaaagacctgcaaataagatcagctttgagtgaactttgacagaagatgtttcgacagttttatctctggacatgtttagcttcagggatcatcctgggctctctctttgaaatctgcttgggccagtatgatgatggtacaattctggtggacaacatgctgatcaaagggactgctggaggaccagaccccaccatagaactttctttaaaggataatgtggattactgggtgttgatggatcctgttaagcaaatgcttttcctgaacagcaccggaagagttctggatagagatccaccgatgaacatacactccattgtggtgcaggtccagtgcatcaacaaaaaagtgggcactattatctaccatgaagtgcgaatagtggtgagagacaggaatgacaactcacccactttcaagcatgaaagctactatgccacagtgaatgagctcactccagttggtaccacaatattcacaggattttcaggagacaatggagctacagatatagatgatggaccaaatggacagatagagtatgttattcagtataatccagatgatccgacatccaatgacacctttgaaattcccctaatgttgactggaaatatagtgttaaggaagaggctcaactatgaagataagactcgctactttgtcataatccaagctaatgaccgtgcccaaaatctgaatgagaggcgaaccaccaccaccactctcacagtggatgttctggatggagatgacttgggtccaatgtttcttccttgtgtccttgtgccaaacactcgtgattgccgtccactcacttatcaagctgccatacctgagttgagaactccggaagaactgaaccccattattgttacgccaccaatccaagccattgatcaggaccggaatattcaaccgccatcagataggccaggaatcctctattccatccttgttgggactcctgaggattacccacgatttttccatatgcatcctaggacagcagaacttagtctcctggagccagtaaacagagactttcaccagaaatttgatttggttattaaggctgaacaagacaatggtcatcctcttcctgcctttgccggtctacacattgaaatactggatgaaaacaatcaaagtccatattttacaatgcccagttatcaaggctatatcctggaatctgccccagtgggagcaaccatttcggacagtctcaatttgacttcacctttaagaatagtagctctggacaaggacatagaagatacaaaagacccagagcttcacctttttctgaatgactacacctcagtcttcaccgtcacacagactggtattactcgctacctcaccttacttcaaccagtggacagggaagaacagcaaacttacaccttttcgataacagcatttgatggtgtacaagaaagtgagccagtcatcgtcaatattcaagtgatggatgcaaatgataacacgccaaccttccctgaaatatcctatgatgtgtatgtttatacagacatgagacctggggacagtgtcatacagctcactgcagtcgacgcagacgaagggtcaaatggggagatcacatatgaaatccttgttggggctcagggagacttcatcatcaataaaacaacagggcttatcaccatcgctccaggggtggaaatgatagtcgggcggacttacgcactcacggtccaagcagcggataatgctcctcctgcagagcgaaggaactccatctgcactgtgtatattgaagtgcttccaccaaataatcaaagccctcctcgcttcccacagctgatgtatagccttgaaattagtgaagccatgagggttggtgctgttttattaaatctacaggcaactgatcgagagggagactcaataacatatgccattgagaatggagatcctcagagagtttttaatctttcagaaaccacggggattctaaccttagggaaagcactggacagggaaagcactgatcgctacattctgatcatcacagcttcagatggcaggccagatgggacctcaactgccacagtaaacatagtggtgacagatgtcaatgacaatgctccagtgtttgatccttatctgccaagaaatttatctgtggtggaagaagaagccaatgcctttgtgggtcaagtaaaagctatcaacaacgacagtgtgtaaaacagaccctcagagagaaccaaaaggcatcctcagacacgttaaaaacttagcagaacttgaaaaatcagtagctaacatgtacagtcaaatagaaaaaaactatctacgcacaaatgtttcagaacttcaaactatgtgcccttcagaagtaacaaatatggaaatcacatctgaacaaaacaaggggagtttgaacaatattgtcgagggaactgaaaaacaatctcacagtcaatctacttcactgtaatgttgcttttcttattttagtcgggcaaacctcttgttgatcatagtcttcaagttgaacatcaaatttgaacgtcaaagaagactctattattttaccccaaattcaatgaaatgcagttttttttctcgtttttaatttaaaaagatattaacctcatcactactaactcactcatataatagattaccttactttttaaaaactacaaagtagcataatttgttctacatttatttgaaaagtaagtaattttaatctcttttttagtgggaatatttgggcatgaaaattagatacccaacttaaaccaaaggcatgtctatcatgtggatgcagtaacatttacatttagtttttgatcgtagttttatatgaatgttccaagaaaaaagcagactgttacaaataagttaaaactgatatgattgataggttctgttttttcttgaagcctatgtatttggtaagaagaaatactaccgaagtaaaatataatgtacctagattgtaggagatgacagacataaggtatttcaaaataaatctcaggtgctataacatgtagtcatctgttttctgataagaacatcttttactctgacttgcttttatcttagtagtatgcttatggatttagtagtatgcttatggatttgataaatcttacactttttc

SEQ ID NO: 330 - DNA, 5040 bp, Homo sapiens
taaatgacttggtgccatgtgatactttttcattaaccacgaccattacaagtcttgttaacatattttgtctatagcctgcaaggaggaaaacatgattcttctctatcaccttctaattaggtatcagtaactcaggggtggccctggggctcatcaacagctccaccattgctctcagagtttggttcctgttcctgtagcttccatggcagtgattctctttacccaactcaccgcacccatggcagtgattctctttacccaactcaccgcacccatggcagtgattctctttacccaactcaccgcacccatggcagtgattctctttacccaactcaccgcacccatggcagtgattctctttacccaactcaccgcacccatggcagtgattctctttacccaactcaccgcacccatggcagtgattctctttacccaactcaccgcacccatggcagtgattctctttacccaactcaccgcacccatgacagtgattctctttacccaactcaccgcacccatgacagtgattctctttacccaactcaccgcacccatggcagtgattctctttacccaactcaccgcacccatggcagtgattctctttacccaactcaccgcacccatggcagtgattctctttacccaactcaccgcacccatggcagtgattctctttacccaactcaccgcacccatgacagtgattctctttacccaactcaccgcacccatgacagtgattctctttacccaactcaccgcacccatggcagtgattctctttacccaactcaccgcacccatgacagtgattctctttacccagttcaccgcacccatgacagtgattctctttacccagttcaccgcacccatggcagtgattctctttacccagttcaccgcacccatggcagtgattctctttacccaactcaccgcacccatgacagtgattctctttacccagttcaccgcacctctttctaactagccaggagttgactaggccacagcatcacatgttacaaagtgaaagagagagcgcccagctccacagatcatctgtgtcagccagcaggattcccaggattgtttttctcttatgaaagtagatcatcattctattatttattttttacttttttcttttgctgttttttttttaactgaattatacaagaatggaaatttacataaagtggtagttagcaaacacctttttgattcctatggacaaattgaaagcaaaattttcgtttttatattatgttgttttataaagggtcatcttttagaacagacctttttaaatattttgagagcactgaatatggtttctgaagaaataacatacattcttttaaacaagtttattctaatagtgcacattagcctccagttcttcccttctgcttcctaaagaggttcttgctacacaaacatccagtgtctgctctagttccctgccacagtgtctttaaacaaagagagtatggcatgggttggtgcagagaatgggaaatgcaaaatagacaggagagtgctgaaaatggccccactcaagcaagtcatgttgacttaccagatgtcaaaacctgttgaaaggtctaagcctgtccgcggggctttcggaagcatcctctgagggtctctgagatttaaagtccgtaccttggaattatttcaggatgttcccaccatcagccaacaaagtacaaaacagtgtgccttaaaatacacatttaagttggtatttgcatgcagtcgttgaccatgtttgttatgggccagcctgcccctgttcctaccagagctgtgctgttggaaggcaagtacgaagaaaaaaaaattacagttttaaaagactgggtctttttccagagtggttaggctgaggttttgatgcatcctccctccttctccgtcaccagaaagaggaaatggacgttcccataggctgccccttccttctccccttccacctcccacccacgtccccaccacaaccactgccagttttacacggcttcctagcaagctgctacttctgctgaaaaattagtcatctgtctagaacaaagtgaaagaaaatgaataaacgcacaaactcgtaggttcaaactagccttctgaggtccctctgccagaggaagagaagaaacttctacctcctcgtcttcctttttctcctggtctccaggtcattctggcctttacttaaacatccccactttgctctgtgtgacttgaacattgggaatgtaataatgaccacttttgaaaatgtaaaacagaaaacaatattacaaatatttttgtcagattctatacccaggtaagatagataaagacaaataatttcccttctctgtgtaacttttaaagtgttgtacaagttaaagtatgagtgaaatactgaagaacaaggcagttattaaaaacctctgatgacattgggcatgtgggtatttgctttatttttatgcttctattcaatatgctacattcaaaaaaactgtaatgggtgattaaaaacttgtatctgagtccagtatcttttgtcccagagtcgttatgttatgtgttaaaggatgtctgtctccctgttgtcaagtccattcttgtatttatttaatgaattttgcaatctgtaaaatggagggtttggatgatctctgaggcccttaacagctctgcgttcattttgaacagattctcgagctggacttggttaaaatagacaccgcgcccggcctgtgtattgtattcttaatgttcagaccagtcaccaacaaacgaattttattctgctatttagtagtaagatcaggctcagcatggagaagattctttgtagtttgggttttcagcgttttatttttgttcctcaatgtaaaaatgttacaggatgtgtatatgtgaatatgactgagatgatcatatgaattctatactcaaatctgcatttctgatccactgactttgtttttctgttttcctttcctgcttacactttggacaggacaatctttgttccccttccgacatccttcagctaaacctcagcgttaaaagaactgttgaaacgctcctttctcttggggcacactcagaagaatccagttttgtctgtctctctctgcagcttctgggttttgtggcattttactgtactgtgatgttaactctctgtgtgctttattactggctcttccccgctcgctgaaagattgcactccggtgactttctgcctcattcctgtgcttggtaaaggaggtttgtttctcatccagaattatttacataagtgctttttctccctgctggccctcaaagagctaacccataaaggaggtaaatcctttctttatatttgcagatgagcaccccctcacattagtaaacatttacgattgctaacaaagagtaaaagaccagcattttttctcctggtcatccgtccattctcctggcctgtggccttgtttctcttaccataaatgctgaagcatttttactaatacagttctgaacttgtacttcgaatatgacatgtagagctttatttccaagtcacacaatacaactcccatctggccatttttccgtgcctcagcacaagtgttgaattgtggagtgactgaacctttgcagcagctgctcacgaggagaaccgtcgtgccttttctggttttggccgcacccggttacttagatttctgctttgaactgtgtcctgagatcctgaatccccgctttgtcggtaggcacaggtccatataagcatttgcggtctggacatttcaaaggtattggccataattttaataattttagtttggtcagaatgttcagtttgaagatcacccacattccctagactgctcttctgagcccagtctatacgctgtatgtgctgcacacgagcagatgggctggagctggcctctcagggtgggcaccttccagattgtgtttgttatgtgtgactgaggttcactcccagcattctgtttaaaattggaatttatgtgatttctaacatattcaaaccttcttaatagtgaaacagtagcagaagtattagggaagcagtccctgttctgtgctcaaggcagtgaatattgtctagctctttcagaatgcgtagcacttagctgctagacgttaatgctggaaactataattgcggttagattctagtttcataagtggtgtttctgaatattcaggaaccttctgaactctgttaacaaaattgggataaaggatgaactcaagtgtgaagagagattgtgaggagcataatatccggtttagaattcagcctgagggaggagcataacatctgggtgtagaattcagcctgaggggctcactggtttggttttcttccatatgaaatgggacagctattttcacaggtcaaaagactgttcactattaatgctgaaacactcaacactgtgatgatgaaaacttcagttttctgtgtcagtaggtgcctttcagactttggggaattgggttggttatatttttaagatgtctcagagttgaaacacctgttaaaaaacacacacaggctctcatgtggtttaggggttgtaattgtacattctcttgagaacacacggcactccctctagtccagctgggaggtgagggtgccccagaaagcacaggcttctgagtgtgaacaccggccgcgcaggtcctagggcgctgctgagaggaagagaccagggaatcagccttggagaaagcacgtctcttccgacagcaaaacactgggcaggttcattttaagtaccatttatctagacttgcagttgcactcaaagtatttctacaaagttgctagtttttttagatcaaaagattacagttacctcattttatcaaaataagtattaaataaaaagtaagcacaagtaccaataactgcctcaaaaatacttgttatatattttattgtaactggttttataaaatttcctagtaatatcgtctcaatg

SEQ ID NO: 331 - DNA, 4327 bp, Homo sapiens
cttcctagcggccagcggctgcctctgcagaccccagagtcagtccaggttcgcctccacaattccttcttcagactgtacttgacttaaaagagaaacatccttgttctctctacttgggtgtcatttcttggaagactctcatggatactgctcttctgaagaaagtgacctttgataccaaacaggaaaataaaaggatcccgatttctctttgcttcccctgtaagcctcctagaagcaggaggcttggtgaaacagcctaccaatgtttttactcccacaaagttttaaaaagaccagacatccttatttgggaagcaggtgatctcagtgataaaggagcgtgtgtccctttattgttttaactgcctaacagtcggtccccactcagcctcctgtccctgtgcagaggtggggaaatgtctcactctgtggatcttaggtgtgcccgtggcactgagggctgctgcaggctggggactctgcagacctcatgccttctgcctatcagcacccccgtcctgctagcactctactctacagaggacagcttgtcctatctgcccgggtaccagctccgacatgggggacagacctctccaggcccctgctggcctgctgcccacccctgtcccaggcctccgtgcacctgactgaggaagtttctcttgttctctccagccaagaacctacacggaggaggaactgaatgccaagctgacccggcgtgtgcaaaaggcagctcggagacaggccaagcaggaggagcttaagcggctgcatcgagcccagatcatccagcggcagctgcagcaggtggaggagaggcagcggcggctggaggaaaggggcgtggctgtggagaaggcgctccggggcgaagcaggcatgggcaagaaggacgaccccaagctgatgcaggagtggttcaagctagtgcaggagaagaacgccatggtgcgctacgagtcggagctgatgatctttgcccgggagctggagctggaagaccggcagagtcgactgcagcaggagctccgggaacgcatggcagtggaagatcaccttaagactgaggaggagctgtcagaagagaagcagattctcaatgagatgctggaggtggtggagcagagagactcactggcggcgctgctggaggagcagcggctccgggagagagaggaggacaaggacctggaggctgccatgctgtccaagggcttcagccttaactggtcctgagctcccacccaacgctccattttctgttggcatccgcctggccaggcagtggcatccaaaccacccggagccgcgatctgaggaggcctggcacctccttggagtttacgctcagatgcccgtgtgctgcttggaaagtggtcgagtcccgcgtgcagtggggagccccaggtgacagtggttatctgagacggctccacctcctgggaggaggcccacctggacctcccactcagaggagcagcacggcgtgtatggcatgacgcaggggaccaccccgcgcgctccctgaggatgtgctggctgtgccccttttttccactggcacatttggtaagagagggaagctgctccccgtcagaaccacagtgcgccgtgcgaggggcactgtcttcttcatgctccctggagcaccaccaaagaaacgtaaacaataccccacgaaagcagggtcaggggtcagggtgcgatcgagacccaggatgggggcgtccagtcatgcccaccccagcatcacaggagacatggaggtgcgggcaggctcctgaattattatgcaaattaggaggacgcaggaggggtctgccctccagccgaacaccacacactggaccctaagtggccaaatgcctgggccgcttgctggctgtggcctgaggcttgtgggttgctgcattttgcttgtagttcacaaccattttgacactggaaaatgctgactttgggggacaggatgaggccctacattctaagcccccagttggcagacaggcattgtccctgttccacatttatgtcgggacaggagatgaccttttcctccgtgtttttcctgtgtttgcacgttgaaatgaagctgacaacctggcaagacgctcagccgcttcaaaccctttttgtcaattaacttattttttaatacttgaaaagaagtaacttcgtttgtgtatctttactagaggaactgatcacctgcgcccgggtgcgggagccacagcggcatctggtgcgtcctacgcgacctggtccggggctgcccggtgctcctcacgtgcatctatttattagcctttctcttcgtatcactggcctggctggcatcagggagctgcccagaacccctgtgtgggtcctcctcacagctttctgtcccctcctccacccggtgcctgcctcaccctggcgctagaccatctggaccactcatgtgatgagggtgcatttccgttctgttttgggccaggccaacagcagagctgccactctcaccctcccagtgagaattccggctctgcagaactcgcccttgtctcagtttgggggccagggcatcaccttcctccgcacatatgttaaagaaggtttcaggatgggccctcatccacacaggccaagagggtgcaaggtgggaccccggaatcatgtggctggtgagaattccctcctcccagcctaagattcacccagacggaaacgcgagtgctgcagtggatgctgggatgcaggctggtgcctctcaagcagatcagcgactccccccttccttccgaaggcgacgggcacctgccttgtgccggatcttcatggggacataaagggcgagccccgaatcactagctcctatagccaaactgttcctttctcacggttccgcaccagcctggctgtgtacagctcatcaagccactgagctaatcggggtggggtgcttgtccatcaaagcagtcagcacatagcccagcgaggagccatccggaccagacccgcctgccaggggcgctccagccgcctgccgcctccgtgggctggggccagctgggagcagaggcctggcccctccaaggcgtcccgcagtggagcaggctgagtggctgtgctgaccttgggctttccatgggaaccacactgtgcttcaacttgaacattcatcccagctgcaaaggagcaaagaacctgtgtcatccttgtctgtccagaagctgccatctctctcccatgcacatccgggagataacgccgctagtggccgccacagcgctgattctccacctgttctcacgtgaggcaaaggtctccttttcttttctctttacttaaaaaaggggagaggagggtttctagattccatcttcaaaccccagtcgtcccataaaattggacgtgggaaaagaccttcactgcctgcgtggcctttcccagacctctcctcgaatgccacaaaaccggtccagccccggcagagccgccttcggcccttgtagctcctgctggccccacaacagggaaacagtttgcaaagtggcttggaaggagtgtggcctagggatctgctgtaagtggccagacgtagcaggagagcccagtgtcaccttctggtcctggtcagccttaacactgtggcatcctccacagcacacacggcagcctgcagtctggaaggtggacccgagcctttgcagagaggcgccgcagagccgcaggcctgcgccccagccttctgctcccgactgtgaggacacccagttctagtagagcactttttttaaagctcccattttgtaaccactagtttgcggttgacttgagtactctggtgacttcctgcgtcaagcgttctcaagctgtgagaatgtgcgcagctccaggcaggttttctctcggagagttaagtcttcccttgaaggcagggaagcaggatggatacacatatatcacacgcataaaacaccaggtgcgggagcagcccagactcaaggctgactaaactggaggctgaataccgtggaggtccacatgcagcttccctggagggcaggccggaggcgctcccgcccctgggcttgaggatgctgcaccccgtgggcttccaggcctgcccagatgatgccttcaggcctctgtccctggcggccatcctcaggccgattttgaccagcaatgatagactcttcttaaccctttcaaaataaatttttcagtgggacagaaaggagagttaaaaaacatttttttaaaggtggtaacatctgacccacaaagggaatgggtctgttttatgcaaaataaaagtttttcaaat

SEQ ID NO: 332 - DNA, 3516 bp, Homo sapiens
cttggatttcagagggttcaagtgacccgctcggcctccccccgtcctggggttgcaggcgcgagtgacccgcctgccttggcctctccccatcctggggttgcaggcatgagcccctgtgcctggccttgaccttctagaatgacgcggagacttttgagcctgttggctctgcctgctcttttcccagttcacgtactcttatctggagtttggtcctgtccgttctaaatcctgcaaattggacattaaaaaaactaaaagtaagaggatctccctgtgttgcccaggctggtctcaaactcctgggctaaagggatctgcctgccgcagcctcccagcatgccgggattacaggcacaagccccagtgcccggccaaattggacgttattacttcctttccaaaagagtggtttacattttcctccccacacacggttcgtgcctccaccccggtcccgcgttccctgctgtcctgactgcgtctttaagcttcatcccgttggtccggcctgttggcgatgtgcttggggcaggaggccttgcccgtgcccgccccccaactctgattgtgtctgtctttccttggtgccactttgtttgggtcttttctgcccaggacatggcccacctggacctagagctctgtgacatttctgtgaagcctccgtctacctttgggactcagcagaggtgtgtttagaattcactctgcgttttgggggtccccatgcatgctgaggtgctgttccctgcccacccgtgtccgatccgtcttggcctccccgacctcagggtgcctaggaccccccgacctctttgggtatttggtttctggctcaggaagagcagctgccgggtcctggaggaggggcctgggaagcgctggcaggcgtcactcctgcgacctcccacccctccctgcatggctcctgcgagggtcaccgcgtgagtccgggggctgctgtcctcacgcctcagacctgattctggggaccgcggtgaaggcgtggcaggcgggcatcactcccttcccccgcctccatcgctgcctctctctgggtctgcgtcctcttctcacagggacagcagtcgttgactctccctgatccaggagggtctctccagatccttccctaacagcagaggcccggctcgtggggagggactgggactcaaggcttcttcaccagcctgaggttggtgctggggctcggcggcggctgtgagaatcctgtgctggagaaagcgtctctcggccggcctgtctggggcgtctgtgcctctcctggatgggtctcagtttggccccgtccatccatcccaggagctgcggtggagcagacagggaggggtgccccaggaaccacagccccgtcactcctgtcttcctttaagtgaaccggtcgtgtagatggaggttgttcagaaagggataagatgggacggcagctgggcctcatcccgcagtgagcgcgacgcagaggctgccgggcttgtggcaggggcttcggccagggcagagtcgggcctcacgtgcagggggctgagtgtgggcctcaacactggacttggccactgactgcagtgagccccaagatggggcaggaggtggtgtttctgtcctggagacccagggtggcttgggtccttgggatgtgtggggacctcggggtgagggcccgttggggccgggtgggcacggcaggagagcgggggccacacacccagaggcagtgccgtgtcccggctgggagggttcctgggaagctctgctcagccccagtctcagtcatttctagaaactgtgttttcctccctgtgacgtcacacgtgaaggaaacggaaaagggcagtgagtccttcgccccgcggcgccgtgcgcacgtcagccttcagggtgattccgctcctccagaggggcaggcgcgggtgtggggggtggggcccaggcccatcctgaggggtcccaggcatgaggggctctgagctgtgtcctggggtggtctgggccatggggaggttctggatcatgtcttgagaggtctgggctgtgtggggggtccaggccatgtcctgggggtctgggctgtgtctgtggggagtcagggccatccatgtattgggggtctggggcaggggggggtccaggctgtcttggggagtccgggctgtgtggaggggtccaagctatgcctttggggatcaggcctgtgggaggctctgggttatgtcttggcgggggtccaggctgtgtcttaggggctgggccatgttctggggacgtgtgaatcctggagggtggggccccggtctcgcgggtggctgtgtccctcgagttcaggcagcacctctcggaactttctggatttgcgtgctggcgtctgtcggcctcgatacccacaggctgcgcccctctcagcacaggaagtcctggagaacctgaaggaccgctggtaccaggcggacagcccccctgcagacctgctgctgacggaggaggagttcctgtcgttcctccaccccgagcacagccggggaatgctcaggttcatggtgaaggagatcgtccgggacctggaccaggacggtgacaagcagctctctgtgcccgagttcatctccctgcccgtgggcactgtggagaaccagcagggccaggacattgacgacaactgggtgaaagacagaaaaaaggagtttgaggagctcattgactccaaccacgacggcatcgtgaccgccgaggagctggagagctacatggaccccatgaacgagtacaacgcgctgaacgaggccaagcagatgatcgccgtcgccgacgagaaccagaaccaccacctggagcccgaggaggtgctcaagtacagcgagttcttcacgggcagcaagctggtggactacgcgcgcagcgtgcacgaggagttttgagcgcccggccgcgccccgcgccgccccccacgcaccaccggggcggcctcgcgggtgactccgggctccgtggctgtcccggaccccacctcttccctgccgcccgccaccggccgaccgaccgcggctgccccagttgatgagcggcgtgtcccctctgcagcgcgcaccccggcggggctttggctgtgacgcggtcggggcgcggggctgggctgtggccccgcggcgccgcctcctccctggtccctcgaaatcgtggcatctcacttctgagaacgaaatctcgcttcagtcactctgccgaaggcgctgacggcatcgcggccggaacctctgggcccggcccctcccagggccgccgctccgtgggaaaaaacagctcctccatttccttgaaaactgaacgattattaaaaatagattaaacttcgctggaaatgagtagccaggaagttcaggggagggtgccgggtccttcccgggcctggcgtgtcggagccacccaggtcccgcagctgccgctgagaaaatgcaaatatttgttgtgacaagaatcacatacatttactttaaatat

SEQ ID NO: 333 - DNA, 3388 bp, Homo sapiens
ggcttccggcggagtgctgggttgtcgctcgcagccgtcatggcagcggaggagaaggaccctctgagctattttgcggcatacgggagcagcagctcaggctcctcggacgaggaggataacatcgagccggaggagacgagtcgcagaaccccggatccggcgaagtcggcgggcggctgtaggaacaaggcggagaagcggctcccgggacctgacgagctgtttaggagcgtgactcgcccggcctttctctacaatccgctcaacaaacagatagactgggagaggcacgtcgtcaaggcgcctgaggagcttctccctgagaccccttccctttgacgccgaagtgcctgcggtgctgcctccaagacagtgtctgctgcagcctcctgaaggggtcagccttggcgtagtatctctgagactggattcttctttgcctccaaaggaattcaaaatatggaagtcaaattatgtaccacctcctgagacctacaccactgagaagaagcctccgcctccagagcttgacatggcaataaaatggtctaacatatatgaagacaatggtgatgatgctccacagaatgctaagaaagctaggcttctaccagaaggggaggagacgttggaatcagatgatgaaaaagatgagcatacttctaaaaagcgcaaagtagagccaggagaaccagcaaagaagaaaaagtagaaacaaatgaccagaatttctgtactgctaaacttgttgaaatgtttctttggacagattaagttgatattgtgggttattatgccacatctccatgaaaatgcatacgttaatgaactaataagtattgcctcaagaactttccactatagaattctttttttatttaaaacatgtatgtatttaaaactcaactggtgacttgtgattgtgaaattgataacacttggatgcattcttgctctcacagaattggtgacatgctttgagagttttgtcacatgttgacatgccaatgttcttataaaccttttataaaggaatatatttttaaagtaaatatattgtaatgtactgtgaacttgtagggtgcttttcaacagtctttgtacagtgtaaatagatcatggaaacaaaattacttattcaatattactattactgtataacattaacatttgaatgtttgtctgtgacaagtaccctatttgtcgtgtgacattttaagttgtaataagaagtattaccatttaaagagtgcctcctgtgttccaggtgctttgtgcatatattttctctgatccttaaacaacctagcgcaaggtattattagtattctcattttataataaagagtgcttgagtagcttgtctgatgttacacagctagtgagtggttcatttggaatttaacttgggacacttgaacctcaaaatcatcacattaaaccacctgtccaccagtcaaaatttagtcatctttcaggaatgacatcaattgtcatctcttccaggtacttttttctgttgtacctggagatccgttagtagagatcttttcctctcctgattggatgactgtacttgtcatctgtgctttatggttattcattaatttctttattaaattgtaagtttacaggacattcagttaaatttgaatttcagataaataatgttttagtatatttaatattcaggacatatacaaaaaatgtgtttatctgaaattcaaatttaactgaacatcttttatctggtaaccctacttctacatgttttctctacccagcttctattttaatgctttgcgtatagtaataataaaatgaacaagaagtagttgggaaggtgtgatcgttgagttccaaaatgcagttatttgtagcattttgaacaataaaaaggttacactctgcatcaatctttccatgaatctgaagcccttaagagataagaattacagaacagtgcacattcagtgtataagaacaagacagccaagcatggtggcttatgcttgtaatcccagcactttgggaggccaagatgggaggatagcttgaggccaagagttggagaccagcctagacaacatgataagacctcatctttacaaaaaataatttagaaagaaaaagacataatctaagtatttttttttaaatctgtttttccccattgtggaagataaaatttgaacaattacgcgagatttgtttacctaggcatgtgtatcaagtagattaaaattcataaaagtcattaagagtgattgcatcagccatggtgctttgtggaatgaaggtccataacagcatgatggcttccagtatatcatcgagtttagaaaaaccaattctatagctgcccatcctccaggtttgcaaatatatgaatcccaaaattgaagtaattgctaaagcaagaatatgtttttttaagattgtagtctttgtaatgaatttggaaatctgtggtatcatatactaaggagtggcatcaagtgacaaagcaagaccatagtatgtacatgacaccaaacacaaccaaatcaagttatatttgtgaagttgtgattcccaagctctggagaaatctaaaatttggatgcatgtgttggtggagcaaatatctcagaagttactgaaatattgcaaggttcttaagttagcatgaaagcaaacttttttctctctttcctgggagatgtgcagagtatgttgtatgaggaggaagacaggacttagggaagaggctaaatattttggagcaagtctgactcagccatttgtatctcctggttggaaaacggactgtcatatcactctacattcatcatcacattagagaatagattattttcccctttagagatgtcctgggaacgtgtttgcacaagtgtccatgtgggtactgaggtgaagtttggttgagctagtggaaacctagtggggaaaagtcttaaaaatccatatacataagaaaaatcatctgtccaagtatctttcattttagagaatcgagtcacttgatacttctgattgtttcctgcactttaagttaagcctgggcaacatgttgagatcctgatctggtttggctgtgtccccaaccaaatctcacttgaattgtaattcccacaattcccacgtgtcatgggtggtgactgaattatgggggtgggtctttccggtgctgttcttatgatagtgaatgagtcttacgagatctgatggttttaaaaaccatcagtgcagggagttgccctgcacaagctctctgcctgctgccctccacataagatgtgtcttgctcctcttgccttctgccatgattgtgaggcttcctcagccatgtggaactgtaagtccaattaaacctgtttcttgc

SEQ ID NO: 334 - DNA, 3392 bp, Homo sapiens
tctgaagcagagccttcagtttatggttgccctgctgttaagcctcaagttgctcttttttttttttttttttctgagacaggtcttctctgtcacccaggccagagtggagtggcatgatcgcagctcactgcaacctccacctcttgggttcaagtgattctcctgactcagcctccctagcagctgggattacaggggcccaccactgtgcccagctaatttttgcatttttagtagagacgaggtttcaccatcttggccagggtggtcttgaactcctgacctcaggtgatccacccgccttggcctcccaaagtaatgggattacaggcttgagccaccgtacccggccaagttgctcattctatccatattctttgaatcattttatatatacacacacacacacaaacacactatatgttacatgcattttaatttactttgacaattatctcacaggttctgtctagttagtactagttagtatccttccccattgagttagtatttgatcttataacatggtccaggaaaagaaaggtaagttttgctaagtacctgttacatcatgacaattgtgagagttggtatgggatctgctctttgtgcagtgtcacttatcacctgtcttccacctctgcttagctctgtgacaaccaacagagcctctaagagatggctgctgatgagtccttctatcgcaggctgcagcagtcctgaaggttgatggagggccatgctattcaaacagcaggcgtggctgagacagaagctcctggtgctgggaagccttgccgttgggagtctcctgtatctagtcgccagagttgggagcccgcactcaggctgaattcccacttcgcgccctgcagtttaagcgtggcctgctgcacgagttccggaagggcaacgcttccaaggagcaggttcgcctccatgacctggtccagcagctccccaaggccattatcattggggtgaggaaaggaggcacaagggccctgcttgaaatgctgaacctacatccggcagtagtcaaagcctctcaagaaatccacttttttgataatgatgagaattatggtaagggcattgagtggtataggaaaaagatgcctttttcctaccctcagcaaatcacaattgaaaagagcccagcatattttatcacagaggaggttccagaaaggatttacaaaatgaactcatccatcaagttgttgatcattgtcagggagccaaccacaagagctatttctgattatactcaggtgctagaggggaaggagaggaagaacaaaacttattacaagtttgagaagctggccatagaccctaatacatgcgaagtgaacacaaaatacaaagcagtaagaaccagcatctacaccaaacatctggaaaggtggttgaaatactttccaattgagcaatttcatgtcgtcgatggagatcgcctcatcacggaacctctgccagaacttcagctcgtggagaagttcctaaatctgcctccaaggataagtcaatacaatttatacttcaatgctaccagagggttttactgcttgcggtttaatattatctttaataagtgcctggcgggcagcaaggggcgcattcatccagaggtggacccctctgtcattactaaattgcgcaaattctttcatccttttaatcaaaaattttaccagatcactgggaggacattgaactggccctaaaataatatgtcatacaacactatgtgttgtgcctggagacacacaatgtctcctgtagattaaaatatgcacttttcctaggcagagctatccaagtcatttttccatgtatatttgtacatacgcagtgtgtgaccaaatataagatcagttctttttctactgaaaatttacgaaaaaaaaaaaattgctgtctgcatagtcgcatcttttaagctatttacaaaagagaagaggtggtggtattgggggaaagtgacttcagctattctcaaagagttagtcttcctttgattcagaatttgtcacccgccattttcatagatttaagccaaaagataaatgtgtgaaaatgtaccaatggctgcgaagcttcaggaagtagaggatccagtgatgcattttttttttcctaagggaaagctggctctttaattcagatgctgaattggtgccatgaaaacagaaaatgctattttcttattatttaaaagaacgtcttatctcataaaattgacattgttccaaagttcttgtggtgattttgcactattgttttctcgtatggaccatggtgtcacttgtagcatgtcaatcacacattggaaagtcaagtccttttacttccatgttgtatgtcaacagagagaaatgtcatgtacataatgtatattgttgtaaatactggtttcacactaagtaattctattttgtaaactgaatatggctatttaatttattgtgaaaattaaatttattgtggtatttaaaaatggaatggattaaaattactctatgtgcaattttttttttttactcattttgttttacgtgccccctgctggcttccaaaatggaagctgtttacgtgcatatgagagcacttggaaagatgtgcttccctgctggatttctgtacccctgtgaaaatgtatttatgaagtgaggttgagtatattaaaaaagaaaaacctcaaccatctggaaatcaagtataatagccacctcaaagaaccctagtgctgctctgctacaactttgtaacaattaatttactcgcagttgctgctgctcaggaagagagacaaggaatattttaacagaatcaaggcatagaagaatcaccattttatttgaacctctaatcagagtcagaccagtagagaaattaaataagattagaaaactctgtactgaaagctgctgatgcttcaaaaatgaaaacaagatctcacaactctccctgttagttgaaaatatatcaatttgctctgaaaggattcagctgcctagtgttgccattactaacataaacatatggctcatatttccatccagagaaattaatgctaaattggtgcctcgctaacatcagatacactgtattatgcttaaatatattcagtaaaatgtggaaaggggtattaacaacgacaacaaaaagatggattttttttttctcacaatcacagttgctaatccagtgggagatgtttgagagagttttgttcaacatcacagtgagagtgcctagggaaatcagaaaattacaatggattcccctttgattgtaataagtgttgattttctccatgagttgtttatcctgtctagtgatttgatggtgaacttttctaaataaatagccctttcccctcc

SEQ ID NO: 335 - DNA, 4088 bp, Homo sapiens
agctagcgctgcgaagcccaggccgcgcggactccccagagacttgccgccgcctgcgcctttgccgctgcagccatccctcttactccttgcctttcgtccccgtcgtctcctctgccgccgtgccgcagccgcaccagcatcgacaacagctaagtggccgattcggggacttggggtcggggttggggcggacgcaaggcacgaacagcaccctcgagcccgccatctctacgtcagccgccactgctgcagtaacccttctagggcgagagaggaaagcactgtggagaggcacacgctgtcccagtgctcacggttagagttcgagcgtttctgccaaaaccttggtgagagccttgcacttggagaagggagcacagaccaggtctttgagatcgcaaaaaatatatatatcatattgcatagtgttgactttttgtcagtttaatcgaccagggcagcagctttccccaagccctcttaatccctgagctatgtctcctccaaccgtgcctccgatgggggtagatggcgtgtccgcatacctgatgaagaaaaggcacacccacaggaagcaacggcgcaagcccactttcctcactcgtaggaacatcgtgggctgccgcattcaacacggctggaaggaaggcaacgagccagtggagcagtggaagggtactgtgctcgagcaggtttccgtgaagcccactctttacatcattaaatatgatggcaaagatagtgtgtatggactagaactgcaccgcgataagagagttttagcgctagagatccttcctgagagagtgccaactcctcgtatcgattcacgactggcagattccctgattggcaaggcagtggagcatgtgtttgaaggtgaacatggtaccaaggatgaatggaagggtatggtcctggcgcgagctcctgtgatggatacttggttttacatcacctacgagaaagatcctgttctctatatgtacacgctgcttgatgactacaaagatggtgacttacgcattattccagattccaactactatttccctacagcagaacaggagcctggagaggtggtcgacagtctcgtgggcaagcaggtggagcatgccaaagatgacgggtccaagagaactggcatttttatacatcaagtggtggcgaagtcatctgtttacttcattaagtttgatgatgatattcacatttatgtctatggtttggtgaaaactccttaaattctttgtgctctttagagaagttgtggatctgttagatgtgaattattttgtgttctcgtagttgtgaacgcagagaagagtttaggtgtcagaaattcaggaaagtggataaattttattgtgccaacaaatcttaccttgactagtttcacaattttgcctcaagtgtactttgctacttttgatattgccttgttctgtaacttaacagttaaattgggtgctaatagaaaattaaaaagtgtttgcaaccattggaacaatgcaaaaatagattaagaaaaattaatggtgtaaacccacaccccgtccttaccccttcctttccttaccttgtttcttcccagaaaacaagtgttgaggatgcgaagtacatccttccacctattttccccatcttcatgcagaaagtatgttctagtagtttctgtaaaaatggcaagccacatgcttttctcacttgacatgtagatgatatctcttcttatcagtagcttcagtctttcttgctctctctggctctctctggccctcactcttactctcttgcactcttgctctccccctccctcccttactctaacagctgaatacacagtacttgttgatgtaccaaaaaggcattcaaccatttcgttattgatcgtcttttatttcctttttttattttttttcaaaataacactgctgtaatacatactggtgcttttatttatataggttggattcccagaaatactatgtaggcatatgtttcagaaatattacaagattactatccaaaatgaaagcgcccgttccagcgtcctctccagcactctttaatgcttgaaaatatgaaaggctaaaaattgcattgtattgcttgttagtttaattgccttttgtctgagttcaaagaggtttgttgttgttgctgtccttgtttctgtttggatttttctctgatttgcctgttcttaccctttgctcatgtatctattgatgtttttcattataaatttgtagaaattcttactacatagtgcatattaatcatttgtagctctaatgtgttatgacgttttcatcttgactttattgatgatatattttcctttaaaatttttaaactttttaggtagacccttatctcttttatagattttggtttcctttttttatcacatggatgcccccacccaaagtcatacaaatattcacctacattttcttctaataactttattatttttaatgtttaaatgtttgatccatctgaaatttatttttgtatatggtgtaagatggggatccagctataacattttgttcacattggatacctgattgtgacatttatttaaaatgttacccattttcaaatttctgagccaatatcatgatttaattatagtggcttcatcgtaagttttagaatccgataaagcaagtcccacttcattagttttttttttctttatataatatgtcctagacattcattttttcatgtgaaaaaatgaaatgcagaattttaataaaattctaattatgatggctgacatcacaattaaaatcctgcatttttgtttagagggctctttaataatattaaatcttagcactcaagagtcttcgtacatcattgaaatcttttggtcttgttattggaatattcttcacgtaagtatatcatagctaactgaatttatttctaagtatttttacagttttatttcatattttgacattgtgaattggtttttttcttctcatttgtaattagctatttttgacaatatagacaacctatagatttttgtatttttatcttctgtctaatgagcttatttaatcattgaaattacagtagatttttaagaatataatattttgggttttctagatatgaaattatttcacctgaacatatagatcattttatttcctcttaatgtttatactgattactgttacattagctggatttttcaaaacaatgttgaagagtgatgacagacgtgactgtcttgttcttaattttcatggaagtaagaatgcaaaatattaatagggaatagtattccctattagtatgacatttacttttggttattagtaggtagtcattaacatgtttaagagtttccgctattcctgttttatagtgttattgctagaagtggttcctgaattttataaaatgccttttcagcatctattgataaaattgtatgattttttttctctttaatttgttgatgtaatgaattagaatggtaggcatttgatgtggaaccaaacttgtatttctggaacaaatactacttggtcattgtgaaataatgatttgctacatgagtggattttatttaccagtatttaatttagaattattgcattttcattccaaagtaaaattgtattttgtccttctgatgctatctttatcaagttttgttattgaagttgtgctagctttaaaaaaatatgaatatgtgagttttcaatttttttcctgtggtctggaataatttaaatagcattagaattatttgtttgttaaaagttagctaggacaaagtgtaaaacaatctaatcctgatgacacttttaatagtagatttttaatcagctttgtgatttctttaatagttattggtttattcaggctttttattaaaaaggtatatacattctctgtgacatacaaagttaaaagttctctattattgctgattgtactggttgttgcttgttgactgtactattcagatggctttatgcttttgtgtattttatgtcacctagatctaattctgaaaacattgtaataaaataattagctataatggt

SEQ ID NO: 336 - DNA, 3658 bp, Homo sapiens
atgtagcagaacttagacactcaacagggcactgctccagagggaggagggaatggggggtggagaggcaccatgagcacttatttactaaacaccttctcattgtcccagggagaatcagcaggacctctgagcaaggtgccccgagaaagtgaaaggaatgatgacctcttaagaaatgttttattcccttcctgacgaaatgtggggaaggagcagtctgcctttctgggttccttccctttactcactaaccactggctctgtcacacctccaggcttcgctgaggcagtccactccaactggagcccctgcccaacctccttgtcaccctcggttcctgtgggacacgcctcccctggctcccaggcaatacggtcactgcccctcccacccaggaccctgccctccgggacagctccgggacagcaccgggccagcctcttgcttgaactcgccacttgtcctgactgcagttctgaggggtaaaggtgtgtcctattcaacccactgaactcacatgtgatgggtacacatgataaaggaatgcccgctggtggcacaggaaactgagggtcctgtgcctgagcgatgtgactccaggcttcccaggatcagatccgctgggcacctccctgagtgaccacaggcacgccgaggacatactcatccatcactgctccttctcctccctctgcacctgctgccttgacccctgtgtcatccttggccccgcccccactatcccttcttgtctgtcatcaaatcccatctctcccacatcccgtgttgtgcaggtccccatcatctccctggccctctccaggtgccataacaccctccaaacacactgctgcctcccctcctgccgtcctgctgctctccagacagcagccaccaggccctttgtgtacacacttgggatgtcatgccctggctgaaagcccgccagtggcttccctgccttgggaatgtactctccttaaagaggctcacagggccttcacgattccaccagagattggaactggtgggcccagggccagatggaaatagattttatttgaccttgtggagtactgtaaacgttcagattagcagcttaaacacaaagctcaaggtactggatttaataatcgaatttcccactgctcccaaaaaacaggaagctttggcaaccctaggctatagcagagtagctacaattgagtagcagcagactccagggtgacccagtccaccatcctctattggctgttacacccagaccattgtactcactggtgccaagtcccaatagatatttgtttgcaaccctagtctacctctccagcttcatttcttgccttacgtcctttcagctgctactttcaactccagccacaatgagctacttccacgtccttgcatgtgattccctcctgtctcttttgcatgtgttattccttctatctggaatacccctcctctccctgctccttgcttggccaactcctaataattttcaagttcagatcagggagctcctcttacaggaagcctgctttgatttgtgctccccctagcccctgctccatgtcctactcctgttgagtattcaccactcttgtggttgcctctttacttgtctgtctacctccttaggagttccaagatggcaggaacaggggcttctcatttgctgtgaagcctctaacccctagcatggaggctagctcaataatattgccagaagcaacacattctacctgggcttccacttttctccttgtaaagtaaagctctagtatcctaagaacacccaccttcctggatgaaacaaggaccagaagtcccaaatgtgcctctcacagtcctgttttattattattattattttgagacagagtctcactctgttgccaaagctggagtacagtggcgcgatcttggctcactgcaatctccaactcctgggctgaagccatcctcccacctcagcttcccaagtagctgggacataggtgcatgccgccacacctggttaatttttgtattttttgtagagacagggtttcagcatgttgcccaggctggtcttgaactcctgggctcaagcaatttgcccgcttcggtcccccaaagtgttgggattacaggcctgagccactatgcccagccctttgtttttaaaatctgaattagtgccaatatttaaaaatctggaaacacaaaatgcgtcacttcttacttggattgaaaaaaatataaacatttggcaaggcaggagctggaatagtgcatggcaacactcacccggctgagtcacagcctacctcgcaaatggggctgtacgtgctttcctgtttccgcaagtacccatcagcccttcactgatttacgttgcctgcttggttcctggaggcagccagttccagaccctgccctagcctggcctttggggtagaaatgaccatcccaacaggacaggaatttcctgggaggggagggagtctggctctgacttcctttagaccacctgggggaagagacccctttgcttatagccttccccactgtgtacacacactatgagatttttaatcttgggacagtcctgagcagctatcatctgccaaaacatgacctgccaccaggaccacgcatgaacagcagatgcgaaaataagcagccactcctgccctgattttcctaacatttaaccagtagagcacttatatttttgtcagctgtcccctgggagagcagggagtcagagatccatttcctggaaatcactcccgggccagatcacataaccctttttctgtgtctgagatcctttcaccactgccaccttctctggatcccatcttagtgctgggatgcggggaagtgagaaaacaggtacagtcgttccttggggtaggttccaggacaatgcccctcactccccatccctcggataccaacatccacagctgcttatgtcccttacataaagtggcataatatttgcatataacttatgcacattcttctgtatactttaaatcatctctagattacttacaatacctaatgcaatgtaaatgctaaacaaagttatattttatttttatttgaatttttgttgttttttttaatttttatttttaaatattttctgtctacagttggttggatccatggatgtgaaacctggggataggaaaggcatactgtatcccctgccttgtagcagctcacaatataatggggaatggttccctgccagcgaacatgctgtgtttcgttcaatcattcaaaacatttgagtgtccactgtgtgccagacgtgctggtccctctgctgtgcacatcatcctccttggtgtgatgctccttcgaggctcagttcagatgctacttctctgcttggcttttccagactgcatgatacccaggctgcctggctgggtcttcccatgtattccacccctgacctgtactgcccctgttgccaagctatttatcaaattatgtgattaatatctgggtattttcttacactggacctcactcataagggcaggagctctgtcccgttcacacacgatccttccccgccacggcactgcccagcacacatatgctagcaaaaattatttgactgaataaatcagtggttttccaagg

SEQ ID NO: 337 - DNA, 3686 bp, Homo sapiens
attctcgtcttcacccctggccactcctggagttgaaaaccaggttcgctcccggggacggtagggggttcctaacgcaaaggaatgcacagggagaatcggacgtgtttgcgccagctcgtcgcccatcagaaatagggaaaggggtaggaaggccccaggtttcaaatatatttatatgaaagctgccgttaagaggacgttggaagctgaggctgatcagataggagctcctggcttcagttctggctcggaagctcggatacactgcgcttgaacgccacagcgtttcacccaagaaagaaaatgttttatggcagaataaatgggcgtaacttcgccgcatcctcgctgccggttgctttcgctgcaacaccgctgatgctgtttctaccgaacccacaactgatttgcagtttccccatttccagccgaaatcacataaccgggctgatgccacctggtaaactcaagttagagaacctatttcacatgtgcaccaggctcggggaccagttctacaaggaagccattgagcactgccggagttacaactcacggctgtgtgcagagcgcagcgtgcgtcttcccttcctggactcacagactggggtggcccagaacaactgctacatctggatggagaagaggcaccgaggcccaggccttgccccgggccagctgtatacataccctgcccgctgctggcgcaagaagagacgattgcacccacctgaagatccaaaactgcggctgctggagataaaacctgaagtggagcttcccctgaagaaggatgggttcacctcagagagcaccacgctggaagccttgctccgtggcgagggggttgagaagaaggtggatgccagggaggaggaaagcatccaggaaatacagagggttttggaaaatgatgaaaatgtagaagaagggaatgaagaagaggatttggaagaggatattcccaagcgaaagaacaggactagaggacgggctcgcggctctgcagggggcaggaggaggcacgacgccgcctctcaggaagaccacgacaaaccttacgtctgtgacatctgtggcaagcgccacaagaaccgaccggggctcagctactactatgctcacactcacctggccagcgaggagggggatgaagctcaagaccaggagactcggtccccacccaaccacagaaatgagaaccacaggccccagaaaggaccggatggaacagtcattcccaataactactgtgacttctgcttggggggctccaacatgaacaagaagagtgggcggcctgaagagctggtgtcctgcgcagactgtggacgctctgctcatttgggaggagaaggcaggaaggagaaggaggcagcggccgcagcacgtaccacggaggacttattcggttccacgtcagaaagtgacacgtcaactttccacggctttgatgaggacgatttggaagagcctcgctcctgtcgaggacgccgcagtggccggggttcgcccacagcagataaaaagggcagttgctaaacccacggaacagactctctgggcaattagccatccccctctgactttggtcattgtgctggttctgatatatattttttttaatgaaaggcaactttagattttccctctatccttgcttttttcccttcacctcccacgtgtccctccatccctccccccacccctctgttttgggtatgtacaacagaagcacaaactactgaaacaaaacaaaacagcagaatgagcgttcttccgagagatggcatcgtgatgcgctatttattttccatagaaataggaagttagacggattgtctcttttctgaggggagggggtctttttgacaggagcagagttgatgtcctcaattttcatatttattggcaaaaggaagagaagaggaactttgggttggaaacaaagaaccaataacattaaaacattattatttatatattctagctgttattagaatcagactttttttgcgagagagagagagagagagagagaagggaaatcaaagaaatcgaagcaatatcctgtttagaggcaagccgcccggtggggagaatttcctcaatgggagacggttgcactattctgtgccccacggagtttgcggctccccgcggcagacccctccctcattctcctccctgacctttccatcttcctctctgcttgcgagaaaatgtcagtagttccagagaagtcggggtgcctatgcctggcctccctccacacctgggccctgaccagccgcctcctgggctcctcctcctccgtcagtagagctgctgttttgttattgctggtttttcctcactttcctcctggcaaagaacgacttccaaatgcagggatggaatataagcagaacgtcatgggctcagcagtgactccaccacccgaggccgaggccgtgcttctggaagatagaaggagacatcatcgtgtgtttcccctccccttgcccctgttaagaaacgtatcaatacccattggatgatcaaggctaccgtatttcttctatttttttttatagtgcctgccaggcactttgttttatgtttccaatagcacttcctgaaataaaccaaagcaacactgctcaaggcccctggggcgatggagaaggccacccacctcactgacagtcccaagaatgaccggctgcgaggtcctagtcaaaagtcaacattatgacctggggactccagcatccttcaagcaagccatttccgaagaaggtgaaaagaagccaggatgattggcacctcctcctcctcctcctcttcttcctcttcccttgcccagccccctcctgtgcgtgtgtttcagacaacacaggagccagcacaggagtggaaaatcctgcagcgcaactcagctcagcccacagaagccttgggaatggcctcagtttgtgcaataagaagattttttttttctttttaaatcttcattatattttctttgattgtctgtgagaaagtacccaggtccgcctggaattactctacagtagaaataactgaacacaaacaaactgatggaaaaaaagagttaactattttatttatttcaatatttaaaaggaaaaaagtgctgacatggcacagtatttttgtttaaagtacctcctacttcaaaagttaagcgcaattttgtgaagacatgaaatcataagagtacttaatgtaaaataaaagactgcatattaactctaaagaaaaatgccccacattttaaataagaaaataaagatcaactctgctctctcaggctttttaaaaagccattcatgtatgtgctttaggtatttttatttctgcgagttggatgtggtaagtgaggagtgctcagtttttttttcctccttcaaaagtctattgaaagtgttggtgatgttaaatgattgtgtgttaagatttgactgaaataacttagccacaaatcagcagtttcccccaccctcattgccccctcaccccaggcaagccccttttatctgaatgtcagaagcagcctgcctcctagttatcatgtctgatgaggtctagctcaggaaggaattccatctattgatggaatatatcccctcaagttcaatagattcgaacacagagagctttgtttaaaataatgcagc

SEQ ID NO: 338 - DNA, 3977 bp, Homo sapiens
aaggctgaataatatttcattgtacatatatgccatattttgcttatccatttatctgtttgggttgctgtttggaatctctttgagaccctgctttcagtgttttgggtgtatactcagaagtggaattgctggagcatatggtaattctattgaatttttttgaggaactgccatactgttttctatagtggctgtaccagtttacattcctgcagtgcacaagggttctaatttattcacatccttgtcaacgcttgttattttcttcttcttctttttttttttttttttttgagatggagtcttgctctgtcacccaggctggagtgcagtgtcgtgatctcggctcactgcaagctccgcctcccaggttcacaccattctcatgcttcagcctcccgagtagctgggactacaggctcccgccaccacgcccagctaatttttttttgtatttttagtagagacggggtttcaccgtgttagccaggatggtctcgatctcccaaccttgtgatccacccgcctcggcctcccaaagtgctgggattacaggcgtgagccaccgcgcctggccaacgcttgttattttctgttttgttttgttttttttttgagagagggtcttgctctgtcacccaggctggagtgcagtggtgcgatcatggttcactgcagcctcgacctcctgggctcaaatgattctcccatctcagcctcccaaggagctaggaccacaggcacaggctgccacacttggccaattttaaaaattatttttggtagagacacatctctaccaaaattccatttcgctgtgctgcccaggctggtctcaaaactcctaggctcaagccattctcccacctcagcctctcaacagtactgggattacaggcatgagccatgcatcccctcattttctgttactttgatagtagttatcctaataggtgtgaggtggtaactcattgtagttttgatttgtatttccctaatgattagtgatggttgagcatcttttcatgtgcttattagcaatttatttatctttattgaaaaaagtctagtcagatcctttgcccattaaaaaaattatgttgtctttttattactgagttgtaagagttcttcatatattctagatgcaagtcccttatcagatatatgattttcagatatgttctttccattctctaggttgacttttcacttttttgaaacttttattttggattcagtaagtacatgtgcaggtttgttataagggtatattttgtgattctgaggtttggggcacgattgaacccatcacccaggtagtgagcatagtacccaataggtatgttttcaaccttttctcccctccctcccgcttcttatagtccccactgtcttttgttcccatctttctgtccatgtggactcagtatttagctcccacttatgagaacatgtggtatttggttttctgtttctgtgttaactcacttaggatactggcctccagctgcatccatgttgctgcagaggacatgatttcattcttttttatggctgcataatacttcatggtttgtatatgccacattaaaaaaaatctaatccactgttggtgggtacctaggttgattccatgtctttgctattggacttttcacttttttgatagtgtcctttgaagtacaaaggttttaaattttgaagtccaatttatctgttttttctttggttgcttctgcttttggtgttatatttaacctaatccaagctcacaaagatttactcctatattttcttctaagagttttatagttttagccctgggatttaggcctgtgatccaatatgaattaatttgagggtgtgatgtgagaaaagcattcaaactgcattgtttgcatgtggatatccagttgttccaacaccatttgttgaaaagacaattctttctttaataaattgtcttggcatccttgttgtaaatcacttgactgtaaatgtgagggttatttctgggttctcagttctgttccactgatctacatgtctatcctgtagactacattgtcttgattcagctgtagctttgtagtatgttttgaaatcaggatgtgtgagtcctccaactttgttcttttcttcaagattgtttttcgctagtctgggtttcttgaatttccatatgaatttaagatcagcttgtccatttctgcaaagagggcaactgggattttgataggaattgtgttcattcatcaacatgaaacatattttcatttatttaggtctttaatttccacagtgttttgtagttttcagagtatatgctttatacttcttttgttaaatagattaagtattttattcttttttggtgtttttgtaaatgaaattgttttcttaatttcatttttagattgttcattgctaatgtgtatagagatacaattgatttttgtatattctgtcttttggaagagtttgtgatctgttaccaatttttcattaaatgtttgatggaattcatcagcaaagccatctctgcctgggcctttcttttctttttaacttaaaaaaaatggagacagggtcttgctctgttgctgaggctggagtgcagtggcacgatcagggctcactgcagccttgaccacctgggctcaagtgatcctcctgcctcagactcccactgtggtagattttttttgtttgtttttggagacagggcctcactctgttgaccaggctgtagagcagtggtgcaatcatggttcactgcagccttgatctcccaggctcaagtgatcctcccacctcagcctcccaggtagctgggactataggagtgcacccctatacacctgtctattttttttcttttttttttttttgagacagagttttgctcttgttgcccaggctgaggtgcaatggcgtgatcttggctcacagcaacctccgcctcccgggtttaagccattctcctgcctcaacctccagagtagctgggattacaggcatgtgccaccatgcctggctaattttgtatttttagtagagacagggttgttccatgttggtcaggctagtctcgaactctggacctcaggtgatccgcccgcctcggcctcccaaagtgctgggattccaggcataagccaccacgcccagcctatgtatttttttttcgtttgtagaggtgaggtctcactaggttgcccaggctggtcttgaactcctaggctcaagcaattctcctgccttggcctcccaaagtgctgggattacaggcatgagctaccacatccagctgtagtagttttaaaaattactaattcaatttctgcataaacttttgtactattcaaatttatttatttatttagagacagagtttcactttgtcacccagaggttgcagtgagccgagattgcacccctgcactccaggctgggcaacagtacgagactctgttccaaaaaaagtaaaaaagaacagcctttttaggccacagtgacctgcgcaatgtttatatgctttgacctactaactttctcctaactaaatatttgattttaggagagtgtttaaataaattacagtatgtctatatgatgaaatgttattttgccattaaaattttgtttacaaagataatttttattgacataaaaataactttaatgtaatttatgttgaaaaagctgaatacaagtctttatatagagtaatatttgagctgtgttcaaaaatacataggaaaagactgataaaatgaaatatggcaaaatgttaatagttttccctggaataggataataggcaattttaaaacagactcctttaaaaaaacaaacaaacaaaaaaaacatagacttctttatatcttttgagctccctcccttttattatgtaatgaatatgtgttgcttttgtaataggaaaataataaagttaaaatttcaactgc

SEQ ID NO: 339 - DNA, 3032 bp, Homo sapiens
aaccaagatgtcacttccaccagaaaacctccctggccttctatcacctgctcccagaatgccagtgccttcctgtgtttccatttccacaccgggttaccacccctcacctgccactgcactgtcagtcctgacatggcagggtccacgtctgtctccattaccgctttactcctaaccgcagcgtagcagggtccacgttaccacctacaaggacacagggcccccgagtaaggggtgtagtgcacatgaagcccacgttgcgtggctccctcccagctcccatgcccccggcacttgcgtcaggtcctcacaggcccaccagggatgggcaagcagctaagaacagtgcttcacgtacatgaccgtggcgcacgacagccaggaccaccatctgccgcagagacgctaacggacccttcctcacctcttgctgcaccaacgttggcaacaacaccgagcccagcacccgtggctgtggacccctctgccgcgctgaggggcctcgatgcgctgagaagcccagagcctgatgacagagctcttgagacctcagggacaccaaggaagacgtgcagtgacttggagccgcctcccactgctgcaactcattttgagttctttaaagaaacataaaagcaaataggagtttaagaagcaacaaagtgaaggtgctaatccccagagcccgctgtggaggccttgactgctggccactttgaggtcctgcagagaagggctgtgccagagaaaaaaagcttcgaggtgagcatgaaaacagcgaaggccacagcagtggggtctataccaccgaggatgctggctccagagccaagataaccagcccctgcccacgagcacaagcagtttaaagcgaccacttttgaaatgggcaccatcaaacttccctgttgaaaacaaaaattatgtaatctgagaaagcaatctggcaaaacttacttgaagccccaaaaaattctattaatttattagacattacctactaaggaaatgaagcatgcccacaaaaatatgtattcccaaaagttttgttgcaagttttttttttgtttttgtttaatttgagacaggagacacagtttcgctcttgttgcccaggctgaagtacagtggtaccatcctgcaacctctgcctcctgagttcaagtgattctcctgcctccgcatcccgagtagctgggattacaggcgcacgccaacacacccagctaatttttgtatttttagtacagacagggtttcaccatgttggccaggctggtctcaaacttctgacctcaaatgatccgcccttcttggcctcccaaactgctgggcttacaggcgtgtgttgtaagtttttttacaataacaaaaattataaaatgcacaaccataaactgactaagtaaaatatgcaatatttaaaagaagcaccatactatggatattaaacatgccacagctgtgtgtggtggctcatgcctgtaatcccggcacgttgggaggccaaggtgggagggatcccttgagtccaggagtctcaagcaacgagaccatcctgggcaagatggtgacagaccctgtttctacaaaaaaatttaaaattaaaaaattagggtgtgttggcgcgtgcatacagttccagcgactccagaggctgaggcaggaggatcacttgaggtcaggagttcaaggttgcagtgagctacaatggcaccactgtactccagtctgggtgacagaatgagattgtctctaaaataaataaataattaattaacttaagtaaattaaggaaaaaagaatcagtctggcttcaatgaagacttctgctgctcgaaataaacaggacaaagatgccagggctcggatggaactatttctctgaaatcgatttactacaacatggaaaatcatatgaaagtcatcaatcataggaaaaaaatgtcaattgagtcaaagcagaagaaagaacggaaaggataaaaatgaaaactgcaacagactaaagtcattgttggagaaaggctaggagaaaggctatttttaaaaaagacttaatagttaaaaaaattaaatccctgaaataggagacaatgaagcaaaacagcgagctttggaggggaatacagaaaggaagagagctttcactaaaaacagccacatgccagacacggcccaggtgctttactccccctaacagcatgcgatggcacaggttcccctttccagattaagaaactgaggctgaactgaggaaccgctctttccagtgcacaggtaggagtcccaagccttgggttcgcttcaaggtggggaagctgaataggaatcatccccaaagcggggctaaagtaagcctggactggcagcacctcaggcttctggaaacaacaaatgcaaatcctctctgacaaaaaccttcctcagttggcctacagagtccccacaggttagggggaatttggagataatttaagctattgtttcccaagatatctaaagatatcccaagagaaaggatttctctcctacatatctggagaggtacaagctatgttccatccttgagaaaactgaaaacgttgttaattcattttctgtagggcttaattagctcacaaaaccttagttgagaaaaggaggatgtgatgtttaatactgagcgtcaacttgattggattgaaggatacaaagtattgatgctgggtgtgtctgtgagcatgctgccaaaagagattaacatttgagtcagtgggctgcggaaggcagacccacccttcctctggtgggcaccatctaatcagctgccagcgaatgtcaaccagacaaatgtgaaaaggagacaacgggcctcacctcccagcctatatctttctcccgtgctggacgcttcctgccctcgaacatcggactccaagttcagctttgagactcgggctggctctccttgctcctcagcttgcagacggcctattgtgggaccttgtgatcatgtaagttaatacttaataaactcccatacatat

SEQ ID NO: 340 - DNA, 3989 bp, Homo sapiens
aaattatacagagatctggaagtctcaaaagcaatccttttatcctaaaatggatagctcagcatctagctcacctatctctctgcgtccatgacagactgaggtcctgtgtgctttatcctaatttacactcctgaattatcttcggtgagcctcattttcctcatccttcattgtcagacacctccatttcattgttttcgacacggagatggctcacgacatcctcaaggtctgggacgggccggtggacagtgacatcctgctgaaggagtggagtggctccgcccttccggaggacatccacagcaccttcaactcactcaccctgcagttcgacagcgacttcttcatcagcaagtctggcttctccatccagttctccacctcaattgcagccacctgtaacgatccaggtatgccccaaaatggcacccgctatggagacagcagagaggctggagacaccgtcacattccagtgtgaccctggctatcagctccaaggacaagccaaaatcacctgtgtgcagctgaataaccggttcttttggcaaccagaccctcctacatgcatagctgcttgtggagggaatctgacgggcccagcaggtattattttgtcacccaactacccacagccgtatcctcctgggaaggaatgtgactggagagtaaaagtgaacccggactttgtcatcgccttgatattcaaaagtttcaacatggagcccagctatgacttcctacacatctatgaaggggaagattccaacagccccctcattgggagttaccagggctctcaggccccagaaagaatagagagtagcggaaacagcctgtttctggcatttcggagtgatgcctccgtgggcctttcagggttcgccattgaatttaaagagaaaccacgggaagcttgttttgacccaggaaatataatgaatgggacaagagttggaacagacttcaagcttggctccaccatcacctaccagtgtgactctggctataagattcttgacccctcatccatcacctgtgtgattggggctgatgggaaaccctcctgggaccaagtgctgccctcctgcaatgctccctgtggaggccagtacacgggatcagaaggggtagttttatcaccaaactacccccataattacacagctggtcaaatatgcctctattccatcacggtaccaaaggaattcgtggtctttggacagtttgcctatttccagacagccctgaatgatttggcagaattatttgatggaacccatgcacaggccagacttctcagctcactctcggggtctcactcaggggaaacattgcccttggctacgtcaaatcaaattctgctccgattcagtgcaaagagcggtgcctctgcccgcggcttccacttcgtgtatcaagctgttcctcgtaccagtgacacccaatgcagctctgtccccgagcccagatacggaaggagaattggttctgagttttctgccggctccatcgtccgattcgagtgcaacccgggatacctgcttcagggttccacggcgctccactgccagtccgtgcccaacgccttggcacagtggaacgacacgatccccagctgtgtggtaccctgcagtggcaatttcactcaacgaagaggtacaatcctgtcccccggctaccctgagccatacggaaacaacttgaactgtatatggaagatcatagttacggagggctcgggaattcagatccaagtgatcagttttgccacggagcagaactgggactcccttgagatccacgatggtggggatgtgaccgcacccagactgggaagcttctcaggcaccacagtaccggcactgctgaacagtacttccaaccaactctacctgcatttccagtctgacattagtgtggcagctgctggtttccacctggaatacaaaactgtaggtcttgctgcatgccaagaaccagccctccccagcaacagcatcaaaatcggagatcggtacatggtgaacgacgtgctctccttccagtgcgagcccgggtacaccctgcagggccgttcccacatttcctgtatgccagggaccgttcgccgttggaactatccgtctcccctgtgcattgcaacctgtggagggacgctgagcaccttgggtggtgtgatcctgagccccggcttcccaggttcttaccccaacaacttagactgcacctggaggatctcattacccatcggctatggtgcacatattcagtttctgaatttttctaccgaagctaatcatgacttccttgaaattcaaaatggaccttaccacaccagccccatgattggacaatttagcggcacggatctccccgcggccctgctgagcacaacgcatgaaaccttcatccacttttatagtgaccattcgcaaaaccggcaaggatttaaacttgcttaccaaggaggatctggaaacattggtcctgctttcccatgtcttgacaccccattccaagccagatgtcaaggagaagaaaggactttcaattaaaaaaaaaacaaaaactcgaaacaacatgttttttattgtacgccattaatttcctatcactgagatataaaaataaataatacaaataaatgagaacatgaatttgagctattttattttcttgtagggtatcatatctgacagaggtgacacttaattagatagtttgtcagtgtttgccattttataaaattgataaattgataagatgacacttaactctgatatgtaagtcaaataaacattcctaggttctacttgagatttagaagctaagcttataattaataactcctaagaagatgcataaatcatacagagaattcttgtcattttcaatgatgtctgtgctgtacaccttattcttaaagtttgtcatttatttatgaccatgtaaaggtcagagatgttactatagacgtagctgtcttgaagttaaatgacttattaagaactttggtaaaatcaagccatgcactctatttctaagtcaagaattgaaaaattgataatagcatgaagatatttatcaactaactagatattagcgggaaaatagacattagggggattactgcatggtctcgttgcacttatgatttaaaaacttgatgtgaataatagttatttttttcagatctaaacaaaggattcctttataaaagataaaattctctgtgttattttacttttgttggtattgccttgggcttattgatacttagattttcataatactcataaaaattttgccatgttaaagattttagtgacttccttttcttttaggttttgcaatttggagaagttaagtccctccctccctcccttctttccttccctccctccctctttccttccttccttctttccttcccttccttccttccttccttccttccttccttccttcattcctccctccctccctctcattccttccctccctcctttccttcctttgttctttagtatcttcctctctttcttttctgtgttataaagcatattgctgcattctaatgcataaacttttttgggaaagaaaacttattcaatgccaaaatctcaaagataattttaatgctttaggcatagcaagtaaaaatgtcttttattttcaaagttccactgtttttcttcttccttttgctatgtgtgccaaacaccatttttaaagataatcgaatgtgttaaatctgtttattcttcatcacaatcataaaactgctgaattttatgtgaaatgattttcttagaaaataggctatagtttgttataccaatttttcccctttagaagaacaagcaattaagccacctccaggcacaatgaacatctgaacaattcattctgaattatgtgagcatgcaaactgttgcttgtatacaaaccataatttgtacataaagttgatatgcttct

SEQ ID NO: 341 - DNA, 3668 bp, Homo sapiens
gactggactgcgtcgcgctcgggggccgcgccgggtagcgtttctttttagtgcctgaggcagctctggctcggagagccttttgctagccccacggggacctctgtgcacggatggacccgcccggacctggcgggaagcggcctggcaggcggcggccccggcggcatcagcagagacaggacggggccgacgccgcgggcccctgaggcgtgcgtgcccaccgggcccggcggcggcaccatgatgccgggcgagacccattcggcggcgcccgggacggcggcggacctgtcgcgatgtcagggctgcgcctctctgcagcagaatttgaatgaatatgttgaagcattaattaccttgaaacaaaaaattatcaatacagataatttgttaacagaatatcagaagaaatgtgatgagctgcagtttgcaagaagagagaatagtaatctgcatcaccaagtggaagagatgcttcaaaaaatttctcctctacagaaatgtcaggaagaactgggatctttaaaagcagagctagaagagaaaaagagttctttaaagttgtatcaggatactcatcaggaatatgctcgtgtaaaggaagaatgcttgaagagtgatgctcagaagaagaaactagaagctaaggtgaagaagctgcaagaggctgctgtcaagcaaactcaggacttcaagcaactgagaaatgaaaagaaaatacttgaaaaggaatttaagaagacacaggaaaggcttgacgaattttctaaacagaaaaatgaaaaggagttgagacatattggaacacaaatttcaagtgattcatatggaagcatagataaaagaaaagtgaaactgcttctgaaggaactctggctctgtgtaaacacaacacacagactacctggtgaaggcagcaggtgtgtcccagaaaaacctgccaaagcaatcaccagctccagagtgcctggggaagatggtacgctacctccaacacagggcagccctctcaggacctcaaatgtgcagacatgcctcacaaaactgtccatggagataaaggaggactttttatgtcaaaatgtggaaaaacagagctccagtggaacaaattgtagttctgaccatgtttttaatgagaatggaaatcttgaggttttagtacaaagtcatcgtgacggtggtagtactgaatttgttgatcatgatcatttttttgatgaagatcttcaagctgcaattgacttcttcaaacttccccctcctcttctgtcaccagtgccctcgccccctccgatgtcatcacctcacccgggttccttaccgtcttcatttgcacctgaaacctactttggagaatatacagattccagcgataatgactcagtccagcttagaaattctgctgagtctgtttcagaagatgatacaactgaatcacagaattattttggctcattgagaaaaaataaaggaagtggcacatgggaggaaaagcccaaatcacatgaagctatccaagctctgaatacatgggaagtaaataaagtgacaacttctggactcgagactttcacagcaacactgagagaatcttctgccacacactccttagttggtgaaaaacactggtccacagcatctcgatccatgagtgatagaaaaagagacattttgcatgagacaaaaacacaaatggaggttagggagatggataagtcagtacaaactgagaagaccattcataaactcactcgaggtctatgcattgagagattgtctgccagccctgcacaagagaaggaagctgcccctgggaagtctgagttgtgttcttctccccttggcaaaaggccattaaatgaactcatggaatctgaaggaaaaaccgtattgtctaaaatgatgggatcgcccaaatcagagtttactaagtggacacgaattaatgaaatcacttctgaaccagaccgtatcacagtttctggccattttcacagactatctagagaattggaaaaggaaaaagaagatactcaagggttcactttaggagaatcacctgaatcagaagatgatgactcaggtgatggaatggatgtagcagggcttgacattgaaaccagtttttcttcctcttctaccttggtagcattgtctgttggcagtaatccccagtcttcttctgggttagactgtggtaatgatacagatattactactaaagtattctctactgaaccgcatcattcagaacataaattgcaaactaaaactttaaacacattacatctgcagtctgagccaccggagtgttctataggaggaaacaacttggagaatagcttgtgtgccttgagccctgaattgggagcatctaattttaatgatcagaagagcagtgggatagaatatacaaaagtagtaaaaggcttgaccaaaatacattcacttcctcggtcagtatttatgaaagctacaaaagatgggcaatgtgaaagtcaagatccaagaattgagctcacactaaataagccagatttcacatcattaataggttctcaggctgccttgatcaagagtggtttgggttttgttaaaagtacttcatggcaccatagtgatttattaaggaaaggtggcgaagaaagtctgagagccaaatcagaacatgaacagaagactagccatcagttacaaaaggcaatgccattcctacaaaatagaggaccaacacccaagcctgatcttcttagagaaaataacaatcctgtagaattcaagaccactgcatcggtgttgcctaatcaagtatcagttatcacaaaacagacaagacctgaaaaggttcagagtgccaaattggaacacttgaggccacatagggttgagcctaccttagtaacagaaaatagtggcaacaaaaccggtatgtcaactatagcaaaatgtgatggggaaagagatgatacaacacaaaacatcacggaggtggctgctgtgaaaagcatttcaccagaagtttctgcctctaggagaaaattagattttaattctccaggtggttcttcaccagtagaaaattctgattgttccacaaatagcagattatctttctctcctgaaaatatcctcatccaaaaccaagacattgtgagagaagctgcagtgcagggagatgggcagaagcaaaggcagcctcaggccacagatctggactccagtgggacacatggcagtgagatgcttccagccacagaagtgactgtgtcaggagggttttctgttgaagaaaccagctgtggagacacagggagatctggtggtgaggccctggctgttgcaaatgattctaccagcacaccacaaaatgctaatggactttggaaattgaaatctacaactcccggtggtgctttgcctgagtgttttggcaccacagacactactttttcttcagcattttgcagaaaacatggagagacacaggatacctcccaaagtagcctgcatctgagccgcctgggctacacacctgtttgccgggctctgcactccctgcttctgcgtctgctggcccaagaccagggccaaggtgctcccctgctggagcccgcaccctaagcatcctgctgccttcccacaacattaaactctccttcctc

SEQ ID NO: 342 - DNA, 3409 bp, Homo sapiens
tggccccactctcaggtggactggtggcgttggaggtgacagctctgaagttgtatagcgtggccccactctcgggtggactggtggtattggaggtgacatttctgaagttgcgtagtgtggccccactctcaggtggactggtggtattggaggtgacagctctgaagttgcgtagtgtggccctgctgtcaggtggactggtggcattggaggtgacaactctggagttgtatagtgtggccctgatgtcagatggactggtggcattggaggtgacgtctctgaagttgtgtagtgaggccttgctgtcaggtggactggtggcattggaggtgacagctctgaagttgtgtagtgtgaccctggcgtcaggtggactggtggcattggaggtgacagctctgaagttgtgtagtgtggccctgatgtcagatggactggtggcattggaggtgacgtctctgaagttgtgtagtgtggccttgctgtcaggtggactggtggcattggaggtgacgtctctgaagttgtgtagtgtggcctcgctgtcagttggactggtggcattggaggtgacgtctctgaagttgtgtagtgtggccttgctgtcaggtggactggtggtatcattctttgggtgtggtcagtggctgcatgttcagctgggaggctggccactctgatgtttccacaacagggttgttcttgtggaggtctttgctgtaaaacaaccatcctaggcagtgggcttctcttggactcttcccaggagcatttgcctgacgtgagagcttgctctgtgtactgaagaagagattcccctgctaggattggccacacgtgactccagagagacatgggtctgtccgtgtcacatggcttgagtgacttccccatccacatgtgggtagtgaacatctgtgtcctctgtacttgctccagttttcacttgaccagcgtcctccctcactgtcagtcctgtgatgtcggtggcttcatccttggcctggcaccttacctggatggctctggctagatctcagggcgttagtacacaatcaacaagaattcttgctttcctgttaggctgggagactggggccgctgtagtcagcttgtttccacatagagattgggaatgaggccatcgcccagaaagagcagctgagctgaaaggcagagagaaagcgaactctgatcctgtctttagagcccctgaatccagctgtgcctggcgtgacagtcctaccctggactttttggtaataggggcagtcattccgccagcctcccctgctcctgttatcaagcttgattagttttctatagctcatgtgttctatggcaaattattatgtctttcctggatacaggcctgttcgtccttgtaaagggcgattatttctgtggaattgtctttccaagtacagtgtctgctcctgtgctgtaaagcttttcctcctacctcccctcttactggatgctccactgtcataactgttcatggccaccatagcgtagtcctgttcaatagcaatggattttaaagccacgagctctcctcggcatccccatttaattaatctgcagtcagcccagggagagagggagaaggaatagaccattgctggtggccatcaaaataatcagcagcaagggcaggagactgagtgggaggaacttgacagatgagggaggcttgggagcaatttaaaaagtttgttctcagaaacaagcaaaaaattgggaagtcatcagcctgtctggtgtgtcgtgtctttgctgctgtgtgatgtgctcagggattcctggctccacacccacatgtgcttcgtgctctcactggggtgtcagtttccctggggtgagtgcagcgattcccgattccactcctgcgtgtgctttgtgctctggggtgttagttgccctggggtgagcccagtgattcccagctccacacccatgtgcgctttgtgctctcactggggtgtcagtttccctgggatgagtccagcaatccccgattccacacctgcgtgtgttttgtgctctggctgggatgtcagtttccccggccttccaaagaatggggcagggcattttcgaaggctgattcagtgaagatggagagtcgtgggctaaatgattcctagagcccacagtgtttcaggggagcttgcagggtaactttttattctttttttctgaaccattgcaggcttctgaaccattgcaggcatccctatgtgcacggcctgctgtttccactcccactgtgcacagaggcaaagatgtcttgtttgaggcagtcttcggttgcaaggaataacaatccaccaaagctggctctgtgtgtgtatgtgtcccaagtggaataaacatggaacctcataaatcccgtcactctgctgtttaccgttcatggttttccagtcctgactttttgatgatggccttcagtgcttgtgatctggctcttccctaagttccaacctcatctcccaccaccctccctcttgctgtctccaccccacccacactggcctttaggctgatcctcaaacatgccaggctggctcctgcctcaggctctttgcacgtgctgcccctatgcagggacgctcttccctggtctctgtgtggctggttccaccttgccatgcctgtctccattcagataccacctcctcttgactgccctgtcttaccttgtgctgcctccctcattctatctccgacttttcatcacagcacttatcaggccctcaaggtatcttggtcattgattttcttgcttgtttcttcccggtgttccaccttgcactgtacagcccacaagagcagggatgttggcatgtcttttcccctgctgtgttgaaagtgcctgcacagtgcttgatccatgacacgtgctctataaatgtttataacataaatgaatataaataaaataggagctgttggatctcatggccttgagttgattccagatctgttgcagctgtggagagcctagtagtggacaaattcatagacctttcttctagtgccacccaaataatgtgcatcacccccatgtaactgcatctttcagttgtgcctccagctggattctcctgatcgtgtgtggtttttgcttttagtgaccacgattatcatgtgaccttgaccctgccctggttgtgtcattcagagctcttgtgatgacaggagtcatacaatctgatttaatctgtcttaagccaaatacaagagaagtccaggagtatctgccttcagggatggtttgatccaggggctgcaacaatatcatgggaagttttttctttctttcttcagtttctcaactccaatttttttcattgctgggagtgatgtgctggtaaatgtctaacaaatagctttc

SEQ ID NO: 343 - DNA, 4228 bp, Homo sapiens
gctgtcgccttggattgaaggccattgatttgtatgtatttgtcccagcgctggaggctgccccagccgccgcgccggtgccgccgctgccagtggagttgcctccccgcttccctagggtggttcggctccaccaaacatgtcggctcctgtcgggccccggggccgcctggctcccatcccggcggcctctcagccgcctctgcagcccgagatgcctgacctcagccacctcacggaggaggagaggaaaatcatcctggccgtcatggataggcagaagaaagaagaggagaaggagcagtccgtgctcaaaaaactgcatcagcagtttgaaatgtataaagagcaggtaaagaagatgggagaagaatcacagcaacagcaagaacagaagggtgatgcgccaacctgtggtatctgccacaaaacaaagtttgctgatggatgtggccataactgttcatattgccaaacaaagttctgtgctcgttgtggaggtcgagtgtcattacgctcaaacaaggttatgtgggtatgtaatttgtgccgaaaacaacaagaaatcctcactaaatcaggagcatggttttataatagtggatctaatacaccacagcaacctgatcaaaaggttcttcgagggctaagaaatgaggaggcacctcaggagaagaaaccaaaactacatgagcagacccagttccaaggaccctcaggtgacttatctgtacctgcagtggagaaaagtcgatctcatgggctcacaagacagcattctattaaaaatgggtcaggcgtgaagcatcacattgccagtgacatagcttcagacaggaaaagaagcccatctgtgtccagagatcagaatagaagatacgaccaaagggaagaaagagaggaatattcacagtatgctacttcggataccgcaatgcctagatctccatcagattatgctgataggcgatctcaacatgaacctcagttttatgaagactctgatcatttaagttatagggactccaacaggagaagtcataggcattccaaagaatatattgtagatgatgaggatgtggaaagcagagatgaatacgaaaggcaaaggagagaggaagagtaccagtcacgctaccgaagtgatccgaatttggcccgttatccagtaaagccacaaccctatgaagaacaaatgcggatccatgctgaagtgtcccgagcacggcatgagagaaggcatagtgatgtttctttggcaaatgctgatctggaagattccaggatttctatgctaaggatggatcgaccatcaaggcaaagatctatatcagaacgtagagctgccatggaaaatcagcgatcttattcaatggaaagaactcgagaggctcagggaccaagttcttatgcacaaaggaccacaaaccatagtcctcctacccccaggaggagtccactacccatagatagaccagacttgaggcgtactgactcactacggaaacagcaccacttagatcctagctctgctgtaagaaaaacaaaacgggaaaaaatggaaacaatgttaaggaatgattctctcagttcagaccagtcagagtcagtgagacctccaccaccaaagcctcataaatcaaagaaaggcggtaaaatgcgccagatttcgttgagcagttcagaggaggaattggcttccacgcctgaatatacaagttgtgatgatgttgagattgaaagtgagagtgtaagtgaaaaaggagacatggattacaactggttggatcatacgtcttggcatagcagtgaggcatccccaatgtctttgcaccctgtaacctggcaaccatctaaagatggagatcgtttaattggtcgcattttattaaataagcgtctaaaagatggaagtgtacctcgagattcaggagcaatgcttggcttgaaggttgtaggaggaaagatgactgaatcaggtcggctttgtgcatttattactaaagtaaaaaaaggaagtttagctgatactgtaggacatcttagaccaggtgatgaagtattagaatggaatggaagactactgcaaggagccacatttgaggaagtgtacaacatcattctagaatccaaacctgaaccacaagtagaacttgtagtttcaaggcctattggagatataccgcgaatacctgatagcacacatgcacaactggagtccagttctagctcctttgaatctcaaaaaatggatcgtccttctatttctgttacctctcccatgagtcctggaatgttgagggatgtcccacagttcttatcaggacaactttcaagccaaagccttagtagaagaacaacgccttttgttcctagggttcagataaaactatggtttgacaaggttggtcaccaattaatagttacaattttgggagcaaaagatctcccttccagggaagatgggaggccaaggaatccttatgttaaaatttactttcttccagacagaagtgataaaaacaagagaagaactaaaacagtaaagaaaacattggaacccaaatggaaccaaacattcatttattctccagtccaccgaagagaatttcgggaacgaatgctagagattaccctttgggatcaagctcgtgttcgagaggaagaaagtgaattcttaggcgagattttaattgaattagaaacagcattattagatgatgagccacattggtacaaacttcagacgcatgatgtctcttcattgccacttccccacccttctccatatgtgccacgaagacagctccatggagagagcccaacacggaggttgcaaaggtcaaagagaataagtgatagtgaagtctctgactatgactgtgatgatggaattggtgtagtatcagattatcgacatgatggtcgagatcttcaaagctcaacattatcagtgccagaacaagtaatgtcatcaaaccactgttcaccatcagggtctcctcatcgagtagatgttataggaaggactagatcatggtcacccagtgtccctcctccacaaagtcggaatgtggaacaggggcttcgagggacccgcactatgaccggacattataatacaattagccgaatggacagacatcgtgtcatggatgaccattattctccagatagagacagggattgtgaagcagcagatagacagccatatcacagatccagatcaacagaacaacggcctctccttgagcggaccaccacccgctccagatccactgaacgtcctgatacaaacctcatgaggtcgatgccttcattaatgactggaagatctgcccctccttcacctgccttatcgaggtctcatcctcgtactgggtctgtccagacaagcccatcaagtactccagtcgcaggacgaaggggccgacagcttccacagcttccaccaaagggaacgttggatagaaaagcaggaggtaaaaaactaaggagcactgtccaaagaagtacagaaacaggcctggccgtggaaatgaggaactggatgactcgacaggcaagccgagagtctacagatggtagcatgaacagctacagctcagaaggaaatctgattttccctggtgttcgcttggcctctgatagccagttcagtgatttcctggatggccttggccctgctcagctagtgggacgccagactctggcaacacctgcaatgggtgacattcaggtaggaatgatggacaaaaagggacagctggaggtagaaatcatccgggcccgtggccttgttgtaaaaccaggttccaagacactgccagcaccgtatgtaaaagtgtatctattagataacggagtctgcatagccaaaaagaaaacaaaagtggcaagaaaaacgctggaacccctttaccagcagctattatctttcgaagagagtccacaaggaaaagttttacagatcatcgtctggggagattatggccgcatggatcacaaatcttttatgggagtggcccagatacttttagatgaactagagctatccaatatggtgatcggatggttcaaacttttcccaccttcctccctagtagatccaaccttggcccctctgacaagaagagcttcccaatcatctctggaaagttcaactggaccttcttactctcgttcatagcagctgtaaaaaaattgttgtcacagcaaccagcgttac

SEQ ID NO: 344 - DNA, 3407 bp, Homo sapiens
ctcgggcgcgcgcgcgcgcgcgcgcgctccccgcccccagccccggagcggctcgcggccggctccgcgccgcatcgctcgggtgcagcgcagctcagcgcagcgctgcggcctttcggcagccgaacggccgcggcagttcaggacaaagaggtgtgggcaggccactgggccagctggtaacatcatggcagagaaagtgaacaactttccaccattgcccaaattcatcccgctgaagccatgtttctaccaagacttcgaggcagatattcctccccagcatgtcagcatgaccaagcgcctctactacctctggatgttgaacagcgtcacgctggccgtgaacctggtgggctgtctcgcgtggctgatcggaggcgggggagccaccaactttggcctcgcctttctctggctcatcctcttcacaccctgctcctacgtctgctggtttcggcccatttacaaggccttcaagactgacagctccttcagtttcatggcattcttctttaccttcatggctcagttggtcatcagcatcatccaggccgtgggcatcccaggctggggcgtctgcggctggattgctaccatctccttcttcggaacgaacattggctcggcggtggtgatgctaattcccactgtcatgttcacagtgatggccgtcttttccttcatcgccctcagcatggttcataaattttaccggggaagtggggggagtttcagcaaagctcaggaggagtggaccacaggggcctggaagaatccacatgtgcagcaggcagcccagaacgcagccatgggggcagcccagggtgccatgaatcagcctcagactcagtattccgccacccccaattacacgtactccaatgagatgtgaaccagccacgcctaccaggtggcagagctggggccattgggacagggggctcaagccacatcgtcatttgtggttaccaagcagggttcccccttcccttttctccttccctactttgtacaaaggaccagagttatatatatatatatatgtatatgtctgtaccccagcccccacctttcagattctgctcttggcactcagctgtgggctgcacgtggagctgtcccgtgcggtagtagctgtgtctgtgtcccctcgtgaaatagtgtgcagtggaggtctcttgtggtgctagatgtgtgtttagagctaaaccagcccccacccccaccctccacctgcccctcttgcctctggcccctctgaccctggcccagggacccctcacggggccaggggaggcatagcagaaagactggccccttcctagggttatgagctggaactgtttctactttcagtcttcctgggaagtaacagtacttagcactcttggtggtgggtgggagggtgggtacaggccagggatattcccttgctcttttgatccctccaggcctcgcctccttcagcctcctcctccctcatctgttccctgatgtcacattccctgtgcaatcttcccttgcccatggtctgtctatctctttcctatgtggcttttctttgtcttccccaaggctgagtgtcccagttttatctgctcctgagactgagcccagatccccaaatctaatctgatttacagttcaaggaagctgatggggagctgggccttacccctgatgtaggaggggcacacagctgggggtgcagagcccacctgggtacctgacccccaggggatgaaaatgcaaggatgagtctgcttgggcctgagagtttgatctgcaggggcaggctcatcttttctctcccctgccttctcctccttctctccccagagcccccttgagcccctctgcctatgtccctctgcctcctccccatgcccccagttgctgtggcttgattctgctaccctgaccccaccatgtgccaggtggcatctgccttactgccttccctgaggagctgggacatgctgggcagttgtcagatgtaaaggcacagctggagcagagggcatgtcagtaatgattggtccctggggaaggtctggctggctccagcacagtgaggcatttaggtatctctcggtgaccgttggattcctggaagcagtagctgttctgtttggatctggtaggacagggctcagagggctaggcacggagggaaggtcagaggagaaggcaggcagggcccagtgagaggggagcatgccttcccccaccctggcttgctcttggtcacagggcggttctgggcacttgaactcagggcccaagcagaagcacaggcccagtcctagctgcaagcacaatagcctgaatgggatttcaggttaggcagggtgggaggggaggctctctggctttagttttgttttgttttccaaatcaaggtaacttgctcccttctgcctacaggccttggtcttggcttgtcctcacccagtcggaactccctaccactttcaggagagtggttttaggcccgtggggctgttctgttccaagcagtgtgagaacatggctggtagaggctctagctgtgtgcggggcctgaaggggagtgggttctcgcccaaagagcatctgcccatttcccaccttcccttctcccaccagaagcttgcctgagctgtttggacaaaaatccaaaccccacttggctactctggcctggcttcagcttggaacccaatacctaggcttacaggccatcctgagccaggggcctctggaaattctcttcctgatggtcctttaggtttgggcacaaaatataattgcctctcccctctcccattttctctcttgggagcaatggtcacagtccctggtacctgaaaaggtacctaggtctaggcccttcttccctttcccttcctctcccctaccccagaactttggctccctttcccttctctctctggtagctccaggaggcctgtgatccagctccctgcctagcatccatgacctgttggatgttacctccaatcagtttcctgtcctacctgcctctttggcttggacctatatggccatgctctggctctacccttgggaagcctgatcccggtgtgtggcccagcttgttcaggccctgggatgctgcatctccaggcaactatgcactttcccggggagagaaccagtatgagaagtgggggcagggcacacattcatctttgtaggaaggtctggcctggggtcgggtgaaggagggcccaggtcagttctggggtcccagtgacctgctttgccattctcctggtgccgctgctgctccctgtttctggagctggatgttccccagctggcagttgagctgcctgagccaatgtgtctgtctttggtaactgagtgaaccataataaaggggaacatttggccctgtg

SEQ ID NO: 345 - DNA, 3860 bp, Homo sapiens
atttgacccagcaatcccattactgggcatatgcccaaaggaacataaatcattctatagaaacgtatgtttatacagtaaacacgtatgtttattgtagcaccatttacaatagcaaagacatggaaccaacccaaatgcccatcagtgatagactggataaagaaaatgtggtacatatacaccatggaatactatgcagctgtaaaaaagaatgagatcatgtcctttgcagggacatggatgaagctggaagccatcattcttggcaaactaacaaacacaggaacagaaaaccaaacaccgcatgttctcactcatacgtgggaattgaaccacaaggacacatggacacagggaggggaacatcacactcctgggcctgtcgggggctggggaataaggggagggagagcactaggacaaatacctaatgcatgcggggcttaaaacctagatgatgggttgataggtatagcaaaccaccatgggacatgtatacctatgtaacaaacctgcacattctgcacatgtgtcccagaacttaaaataaaaaataattgcatttcagattgttaactctgtttttctttaattgatgcatttgctgacctgtctgctgtatcctttgcccaaaggagatgcagaaactaccagaggccgttcagctaattgagaaggccagcatgatgtatctagaaaacggcaccccagacacagcagccatggctttggagcgagctggaaagcttatagaaaatgttgatccagagaaggctgtacagttatatcaacagacagctaatgtgtttgaaaatgaagaacgcttacgacaggcagttgaattactaggaaaagcctccagactactagtacgaggacgtaggtttgatgaggcggcactctctattcagaaagaaaaaaatatttataaggaaattgagaattatccaacttgttataagaaaacaattgctcaagtcttagttcatctacacagaaatgactatgtagctgcagaaagatgtgtccgggagagctatagcatccctgggttcaatggcagtgaagactgtgctgccctggaacagcttcttgaaggttatgaccagcaagaccaagatcaggtgtcagatgtctgcaactcaccgcttttcaagtacatggacaatgattatgctaagctgggcctgagtttggtggttccaggagggggaatcaagaagaaatcacctgcaacaccacaggccaagcctgatggtgtcactgccacggctgctgatgaagaggaagatgaatactcaggaggactatgctagtattttgcttgctgaaaagaaaagggaaacaaaggtaaaatcctgacatgccatttcaaggacttgggaatagattagggatatccgtacttcattacagtcatgattttggatcctaataaagactagtttttagttaccatcttcccaaatcactcattgtatccattacctgtgaagcatatctttttctttccataagagcttttctaagacaccagcaggaattaacagaaaatgtactgtcatgttttaatacattgattaaaaaatttgcaagccaaattatacataaattatgttctaaacaaaaggggtaataagcataggtattctctcttggacacttgtaagttactgttagtgaattgttttttacgtttcatttaataattgctgctaaaggtgatgtttactgataaatcattttaaaatttttttgttttgaaaagtaaatttatcccccatgatgttagatacatttaaattattaagtcttttcagagatgagatggggacaggaagttattttgagccttacaatattatttagcccaataaaagatgcattgaagctcttatatattatgagtttgaaaaattttgaaggtagcatattgaagtgatctataaatatcttcagtcctctctgaagtgtgggtatttcttctatctaaaaaatacatacagtgactgtcttcaaatctacttggttcttgaccaaataggagctaatgggtaatgaatacctttttgtttgtttgtttgtttgttttgttttttgtttttttttttaagggtctcactcttttgcccaggctggagtgcagtggcacaatcacggctcccaggctaatgtttttatttttaatttgtaattttttttttattttttttgttgagatggagttgctccatgttgcacaggctgttctcaaactcctaagctcaagccatctgcctgccttggcctcccaaagtgctgggattgtagacataagccacctcacccagcctatgaatatctttctaacattgtaagaatgaggtaatgtttccatcagtctaatacagatatatttcttccctccaaaacagtttattttgattgtttattttattttgattgtaactccgtcataacttgacatggaaaatgctatatactatgaaaacttagctgaaagggaagaattgttttagaaagacaatatttaaaacaccgcactgccaatatattgatcctttatagttatttcctaaaatgctgttttcgaaacattcctttttcaccctgttgtgtggcttagacccatctcgtaatctgttaattggaaagaggctacagacaccagcagtgtgcgttctgcaggtacacgctgccaaagtaattcctgctcatccatgccctgtctctgtctcttttagagtcataccttatttgagtataggttgcttaattttgctagacttcctgaaaacactaaggtggagtatcagaagtgattttagtcacagttctgcgggagagcttagaataacatcctcctttgggaggtggtcttgggtgcgtggatgttggtatacagtctttattgtaagtctgatacaaaatgctaataaatttaatgtttttcttccttaatttattggcatagttcttcaggtagcacctcatttttattaatgatattgggattaactatgaacaagctatatgtagacatttgcatttaaggacattgcagtgtttcaaagatcccatcattgcagcttgtatcctttagatccaatcggaaacttctggagtcttacattaatgctcatttgagctaattagtaatctgtttaaacagatttggcaatactttaaagatactgtagactatttatgtatagatagatcatattacccattaaagtctgggggaaaaaattttttaattttactcttcttatgtactgaaaactttttttaaaaaaggtgatgatgaagtgcattctgtagcagcagcgcagctatgctttaaaccacacaaaaggctgtgtccaggtgcagcctccttcacccttcctgcccacggtgaggattgaataaccaggacttggggatattgtttgttgtcagggttattctgtgtggtaaggaatatttgtttcacatttatacattttctttttccactcacgtaagtttctatcttgagagcatagtccaaagtgcaaaacttggtgtttacaaggaaaattgtcttccagaactccactgtcatcactttcaccaaagtggaagtttgcatgaatatgctcagaatctaatattcaatgttctgttacattgtaagtgaagtccagctacaaaatagatttaatatattgaatttatttgtacatatgcagagtacggtatttctgtatggaatctgctttattcctatttttcccaactctgatgagtagaatattaaatgtgttgttatggaaatacagattattgcttctataggaagataattatgaaaataaaacctgaaactatat

SEQ ID NO: 346 - DNA, 4520 bp, Homo sapiens
gatcccagcactctccgtgacagcgcctcctgactcagcccaggaccggcttcttctcacgacctgctggagactggacgcccacacctgacccggggcggcggcggagtacgggcctctggcgccttaggccagccgcaggtgtcggttcttaggctctccaggctcgctagctcccgccccggcttggatgggtctccctgcgccataaatgtggctgctgaggcggcggtggccgtggcccgtcgcgctgctgctgcggcgctccaagttcatctccgccccggggctctcctgccccacctcggggctgccgccacccgctccttatcccctggccctggccttgcagcgtggcgacaatggacaagatcctggagggccttgtgagttcctcgcatcccctgcccctcaagcgggtgattgtgcggaaggtggtggaatcggcggagcactggctagacgaggcgcagtgcgaggccatgtttgacctgacgacccggctcatcctggagggccaggaccctttccagcggcaggtggggcaccaggtgctggaggcctacgcacgataccaccggccagagttcgagtccttcttcaacaagaccttcgtgttgggcctccttcatcagggctaccactctctggacaggaaggatgtagccatcctggactacattcacaacggcctgaagctgattatgagctgtccgtcggtgctggatctctttagcctcctgcaggtagaggtgttacggatggtgtgtgagaggccggagccgcagctctgtgcccgactgagcgaccttctgaccgactttgtgcaatgcatccccaaggggaaattgtccatcacgttctgtcaacagctggttcgaacgataggccatttccagtgcgtgtccacccaggaaagagagctgcgggaatatgtctcccaggtgacaaaagtgagtaacttgctgcagaacatctggaaggccgagcctgccacactactgccttccctgcaagaagtttttgcaagcatctcttccacagatgcatcatttgaaccttctgtagcattggcaagccttgtgcagcatattcctcttcagatgattacagttctcatcaggagccttactacggatccaaatgtaaaagatgcaagtatgacccaagccctttgcagaatgattgactggctatcctggccattggctcagcatgtggatacatgggtaattgcactcctgaaaggactggcagctgtccagaagtttactattttgatagatgttactttgctgaaaatagaactggtttttaatcgactttggtttcctcttgtgagacctggtgctcttgcagttctttctcacatgctgcttagctttcagcattctccagaggcgttccatttgattgttcctcatgtggttaatttggttcattctttcaaaaatgatggtctgccttcaagtacagccttcttagtacaattaacagaattgatacactgtatgatgtatcattattctggatttccagatctctatgaacctattctggaggcaataaaggattttcctaagcccagtgaagagaagattaagttaattctcaatcaaagtgcctggacttctcaatccaattctttggcgtcttgcttgtctagactttctggaaaatctgaaactgggaaaactggtcttattaacctaggaaatacatgttatatgaacagtgttatacaagccttgtttatggccacagatttcaggagacaagtattatctttaaatctaaatgggtgcaattcattaatgaaaaaattacagcatctttttgcctttctggcccatacacagagggaagcatacgcacctcggatattctttgaggcttccagacctccatggtttactcccagatcacagcaagactgttctgaatacctcagatttctccttgacaggctccatgaagaagaaaagatcttgaaagttcaggcctcacacaagccttctgaaattctggaatgcagtgaaacttctttacaggaagtagctagtaaagcagcagtactaacagagacccctcgtacaagtgacggtgagaagactttaatagaaaaaatgtttggaggaaaactacgaactcacatacgttgtttgaactgcaggagtacctcacaaaaagtggaagcctttacagatctttcgcttgccttttgtccttcctcttctttggaaaacatgtctgtccaagatccagcatcatcacccagtatacaagatggtggtctaatgcaagcctctgtacccggtccttcagaagaaccagtagtttataatccaacaacagctgccttcatctgtgactcacttgtgaatgaaaaaaccataggcagtcctcctaatgagttttactgttctgaaaacacttctgtccctaacgaatctaacaagattcttgttaataaagatgtacctcagaaaccaggaggtgaaaccacaccttcagtaactgacttactaaattattttttggctccagagattcttactggtgataaccaatattattgtgaaaactgtgcctctctgcaaaatgctgagaaaactatgcaaatcacggaggaacctgaataccttattcttactctcctgagattttcatatgatcagaagtatcatgtgagaaggaaaattttagacaatgtatcactgccactggttttggagttgccagttaaaagaattacttctttctcttcattgtcagaaagttggtctgtagatgttgacttcactgatcttagtgagaaccttgctaaaaaattaaagccttcagggactgatgaagcttcctgcacaaaattggtgccctatctattaagttccgttgtggttcactctggtatatcctctgaaagtgggcattactattcttatgccagaaatatcacaagtacagactcttcatatcagatgtaccaccagtctgaggctctggcattagcatcctcccagagtcatttactagggagagatagtcccagtgcagtttttgaacaggatttggaaaataaggaaatgtcaaaagaatggtttttatttaatgacagtagagtgacatttacttcatttcagtcagtccagaaaattacgagcaggtttccaaaggacacagcttatgtgcttttgtataaaaaacagcatagtactaatggtttaagtggtaataacccaaccagtggactctggataaatggagacccacctctacagaaagaacttatggatgctataacaaaagacaataaactatatttacaggaacaagagttgaatgctcgagcccgggccctccaagctgcatctgcttcatgttcatttcggcccaatggatttgatgacaacgacccaccaggaagctgtggaccaactggtggagggggtggaggaggatttaatacagttggcagactcgtattttgatcctgagagagtccaaaatgcactggtcacgaaacgtctaatactatgactgttaaaatgtcagactataacaaatatctatcttttatttttcattagacccttatacttcaagagaacacactcagtgcttgtttttattttcttgacacatttattaacaaaatgcatcatggaaaaaaaatctacctcttaaaattccatttgcttttatggttagacatgcttgaccaaaaatgttcagaagaaaatatgtacctggtccctaattaagctgcgttaaatttggtagaagcatttaaatggtctatcttcagttttactgaacaaaaaatgtaatttatttagcattctttataaaagaattgatgctagaggtaaaaaaaaatacttgtttttaaaaaatcctttacgtcttgtgtaattaccccattattaaattcaagtccttgaaaatcaactagagattataaagtctctaaagaaggcaataacaaaatttatcaagatatagtacttttcagtttttgtttagtgtcttcagcatcactgtgtctgtatttcaagtacaaatgtttttaaaaaggattctttatacatatgtgctgaattgattttaagaaagttgcatgatcctgtaggagcaacatttttacctaaaaaatgctaactttatagtatttctaattgttcaaggattttaaaattctatttcagggagtatatcttctgtggttttgaaggaggtgagttctgtatgtgccttgcagtactgtaattcaaaaataggaatctctggctgcaaaattttaatgaaatgttaggaagtaattttcgtgctaacattaaaattataactttttgaaaggtaatagattttccagaagtaaaatctgatggttctaaatcaatcaatgtgatagttcatttttaactcttagaagaattcagaggaaattaacccagctaagtaaaaaatctgtcttgattttgttacttattcctcagaatattaaacattgatcacat

SEQ ID NO: 347 - DNA, 3710 bp, Homo sapiens
ctgtccacccatctgcgccgccgcctatgcccttgtctccaagtactagccacgggtggaagggcagggaactcgtaggatcaggccagggagcggggcagggagcggggaaggggtcaggaagccagacacctgggtcggtcactggcatggctggacctgttctggagaatggctccatttcagttgcctcttggggctaacgctccccacagaggacccacagagccagggcctgccagcaggcccaggggacttggatggcaggagtgggtctggaagcccctcacccacgcacatttccccctcctacagcctgagcccttacagccacgatggggacagcctgtctcgctcccaagaccacattccactggctgccctgccactgctggccacctcatcctcccgctaccagggcgccgtggccaccgtcattgcccgcaccaaccaggcctactcagccttcctgcgctcacctgagggtgccggcttctgtgggcaggtcgcactgattggagatggtgttggtggcatcctgggctttgatgcactctgccacagtgctaacgcgggcaccgggagtcggggcagcagccgccgtgggagcatgaacaatgagctgctctctccggagtttggcccagtgcgggaccccctggcagatggtgtggaaggcctgggtcggggcagcccagaaccctcggccttgcctccccagcgcatccccagcgacatggccagtcctgagcccgagggctctcagaacagccttcaggcagcccccgcaaccacctcctcctgggagccccggcgggcaagcacggccttctgcccacccgctgccagttccgaggcacctgacggccccagcagcactgcccgccttgacttcaaggtctctggcttcttcctcttcggctccccactgggcctggtgctggctctgcgcaaaactgtgatgcccgccctggagggtgagtcctaggggctgcgggggcgcctctagtctctgtctgccccttccttccccacctcctctggccttccctctcatccgaggcatgagcaacttccccactgtactaattcaaaggcctggctacagaaggggaacctgaggcccagaaagaagggactcgccaagggtgagtctcccaaagccactgggaggagcttcacacccgtgggatgttctgcactagaaggggtcaatcagacaccacagcagcaaatcgaagccgctgccctcttctcagccttttttttttttttgagacagagtctcgctctgtcacccagatagagtgtcagtggcctgatcttgctcactgcaacctcctgggttcaagtgattctcctacctcagcatcccaagtaactgggattacaggcacctgccaccatgcccagctaatttttgtattttttttagtagagacagggttttgccatgttggccaggctggtctcgaactcctgacctcaggtaatccacccacctctgcctcccacagtgctgggattccaggaatgagccactgaacccagctaatttttgtatttttaatggagacggggtttcaccatgttggccagactggtctcgaactcctgacctcaagtgatccatctgcttctgcctcccgcagtactgggattccaggcatgagccacggtgcccagcccctgtctcactttaagcagggccctactgacttcccagggagtgcagtttgggaagtgctggctcggggtcacaccagacatcagggtgctgctcccacaccccctacctcccagagtgcccagctgaaaccctgaccccacaatctttctctgtcttctgggtaccagcagcccagatgcgcccagcctgtgaacagatctacaacctcttccacgcggccgacccctgcgcctcacgcctcgagcccctgctggccccgaagttccaggccatcgccccactgaccgtgccccgctaccagaagttccccctgggagatggctcatccctgctgctggccgacactctgcagacgcactccagcctctttctggaggagctggagatgctggtgccctcaacacccacctctactagcggtgccttctggaagggcagtgagttggccactgaccccccggcccagccagccgcccccagcaccaccagtgaggtggttaagatcctggagcgctggtgggggaccaagcggatcgactactcgctgtaccgccccgaggcgctcaccgcctttcccaccgtcacgctgccccacctcttccacgccagctactgggagtccgccgacgtggtggcgttcatcctgcgccaggtgatcgagaaggagcggccacagctggcggaatgcgaggagccgtccatctacagcccggccttccccagggagaagtggcagcgaaaacgcacgcaggtcaagatccggaacgtcacttccaaccaccgggcgagcgacacggtggtgtgcgagggccgcccccaggtgctaagcgggcgcttcatgtacgggcccctggacgtcgtcacgctcactggagagaaggtggatgtctacatcatgacgcagccgctgtcgggcaagtggatccactttggcaccgaagtcaccaatagctcgggccgcctcaccttcccagttcccccagaacgcgcgctgggcattggtgtctaccccgtgcgcatggtggtcaggggcgaccacacctatgccgaatgctgcctgactgtggtggcccgcggcacggaggctgtggtcttcagcatcgacggctccttcaccgccagcgtctccatcatgggcagcgaccccaaggtgcgagctggcgccgtggacgtggtcaggcactggcaggactccggctacctgatcgtgtatgtcacaggccggccggatatgcagaagcaccgcgtggtggcatggctgtcgcagcacaacttcccccacggcgtcgtctccttctgcgacggcctcacccacgacccactacgccagaaggcaatgtttctgcagagcctggtgcaggaggtagaactgaacatcgtggccggttatgggtctcccaaagatgtggctgtatacgcggcgctggggctgtccccgagccagacctacatcgtgggccgtgccgtgcggaagctacaggcgcagtgccagttcctgtcagacggctatgtggcccacctgggccagctggaagcgggctcgcactcgcatgcctcctcgggacccccgagagctgccttgggcaagagcagctatggtgtggctgcccccgtggacttcctgcgcaaacagagccagctgcttcgctcgaggggccccagccaggcggagcgtgagggcccgggaacaccacccaccaccctggcacggggcaaagcacggagcatcagcctgaagctggacagcgaggagtgaggcccacaccagcctggacctgggttatttattgacacacccaaggggcccgaggggctgcgtgtgggaggctggggacccagacttttggccccagcgctggcccccccagccccacaccctatatctccgtgtgctcctcggtgttacttccctttcatatgaggggacccagcgccggggggagggaggagggcgtgggcatgggcgcagaggcttttccagtgtgtataaatccatgaaaataaacgccacctgcacccc

SEQ ID NO: 348 - DNA, 3117 bp, Homo sapiens
ggtgtctagaagcagcagtttgaatttggacgtctttggagggaggtttcttggcaaccaaagggggaggtgggaggacttgagcccagaacttggtgccatgcatcagcagagtggctggaactcctttgggctgggatggggaccgtgaaggcagcccttgggggacccagagtgctgctgtgggcatggtacccgtcttctctctgtcctacttctctgggggatgcctggggaggacctgagaaagggaactcaaatttctgtcactgattgaccagcctggagtctctgtagccctctgactgtctgccttcacttctttcttctttttgtttttttgtttgttttgttttgttttgttttttgagatggagtgcattgcccaggctggagtgcagtggtgcagtctcagctcactgcaacctctgcttccaaggttcaagcgattctcctgcctcagcctcccaagtagctgggattacagtcatgtgccaccatgcccggctaatttttgtatttttagtagagacggtttcaccatgttgggcaggctggtttcgaactcctgacctcaggtgatccacctgcctcggcctcccaaagtactgggattacaggcatgaggcaccatgcccggccgttgtttttgagacagggtctcattctgtcacccaggctgattccctgcaaccttgaacttcagtcctcccatgtcagcctcctgagtagctgggaccacaggtgtgcaccaccatgcctggctagtttttaaatttttagtctactaaaacctcatctagacctctagatgaggtcttgctgtgttgcctaggatggtctcaaactctgagactcaaggagtcgtcctgcctcggcctcctaaagtgctgggattacaggcgtcagaccctgtgcccagccttcgctcctttttaaggtttgggtcagctccgaacggagcactgcttgctcaggcctaggatgttttgttgttgttgttgttatagcacaacttacatatttcaaaatgtagtatcatttacaatatcttaggaaaagtggcagatatcttacagtatcttaagataagttgaatgagcgcttcctttccaatactttatttgttgagacagggtcttgctctgttgcctaggcgggagtgcagtgttggcttactgcaacttcaacctcctgggctcaagtgatcctcccacctcagcctcctgagtagctgggaccacaggcgtgtgccaccatgcctggctaatttttttacattttttatagagatggggtctcactatgttgcccaggctggtctcaaacccctgggctcaagcactcctctcacctcagcctcccaaaatgctgggattacagatgtgagccaccatgcctggccctctccagtactttgaggtctacaagatgtatctagaaaatttactactgtgggaaatgaagactacttaagttgaatgggggaaaaggggaagggcctggggtttttccttttgattaacttgtaacattggccttcgcgcagctgaggaagtttcatatattccatagacatcattaagcaccgacatcattaggcccaaagctcttgcaggacatctttgaatgctatatgaattctgccgttttgctagcggtgatttggctcttgggtccaccatgtcgttaggactgttaactccactcaaattaatttttgtcacaaatcttacaaaagggggggtgcttctcagtgtttaggtccacattctattttaaggctgtatatttggctttcataaattgttcttggatgcccagtgatcattcctgtccatcttgtaagtgtcttgtctccatcatcttctcaatcccagctaactttgccatctcctcctcctttctggccttcatcgagttcttacgacagtcagaaattgcgaaggacttttactccccagcccttggtggctgccatcttgtgttctttaccctccaccagtgacttcacccttgggatgtgttttacttacttttcagttgcctcttgtgggaagcaaagagcatgactcttttaaagtcagaaggattgtgcaaattgacccaggacctctgtttcacatttaatcacagaattagaagcccctattcctgtgtgcacctaagcgggcatgcacccgagctggcatgcacctcagcctgtatgcatctgagtcagcatgcaccctagctggcgtgcacctcagcctatatgcacctgagttggtgtgcacctgagctggcatgcacctcagcctgtatgcacctgagccagtgtgcaccctgtctggcttgcacctcaacctatatgcacctgagttggcatgcacctgagctggcatgcacctcagcctgtgtgcacctgagccagtgtgcaccctgtctggcttgcacctcaacctatatgcacctgagttggcatgcacctgagctggcatgcacctcagcctgtatgcacctgagccagcgtgcaccctatctggcatgcacctcagcctatatgcatctgagttggtgtgcacctgagctggcatgcacctcagcctgtatgcacctgagctggcgtgcacctgagctggcatgcatctgagccggcatgcacctgagccagtgtgtatgataaagattgtgaacatctgacatgaagcacagcaagctgttgacagtgatgttatctggagagtgtggtggggagagactttagctttttgctttttgaacttcttttattgttttatttttatacaaatacaattttctaaatctattcttgtggaagaacatgagtttttacaattgtggtaaaataaacataaaattgatcattttaaccatgtttaagggtatagtttagtggcattaagtacatccatattgttgggcagccatcaccaccctccatctcctgaggtttttcatcatcccaaatggaaactctgtacccattaaataactccccagccctgattcccctttctgtcgctgtgactgactactctagggacctcctataagtggaatcacgcagtgtttctccttttgtgtctggctaaaaataaaggtattttaaaagac

SEQ ID NO: 349 - DNA, 4383 bp, Homo sapiens
aatgcctcttaccatggaataaaccagagacagttatattttcctgtgtatggaaggaatgaacacacgcccatgatacagtggagagaaatgttaccctcccaggttaaggcaggtaacctcgctcaggaaaaggttatctgacagccaaggacataaaataaatgctgcagggcaagcagaaaacatgcatcatgcaaaccagggctgccgcctcctcacctcctttcagccagcccagcctcccagtcctctttcttgggctgagctgagatctgcctcgggtgaaacgagagatccctatggttcctcaagtgcttggatggagagccctgcctgctgtctccgggaacggagcgctccacagcctggggacattgcgagactgcccttgcctgcttctgcttctaaggtggctgcattcccaggaaccagagcctgcttttcccgagctctcctaaaaatatcctctgccggtccctatgggagaacgacagtgtgaagaagggtggtttataaactgcttaaggatttgccttttgacgttgcaaaccaaggaagaggaagatatttaggacagacgaaggtttaaacagttgtcaaattctattcaagcacttcttccccgtcacaaacgcagacggggaaatgcagatctagcccgctgctagcaaggaggcgaatgcgataccctgaaaattcccgactggaccaccttaaaaagcgacagcctcaatgcattaggaaaaacctgcgttttcgtggaacccggcggaggaattttgtatccccttcaaatattgcgtaagaggaggaagagagaagcagcgctgggctgcacctcaccacttgctgtgcaccccggaaagtggcgtccagcagcatcagcttccaggggtcggacacggagccaggcagcgggatgtagacgtaataggcggccagcgccaccagggcggtgagcaggacacaggacgacctcatcttgccccggctcggctcgccagcgggctggcaaagaggaaagggcgataccacccggagacctccggcaactttctgcccgcggcagctgctcattcacgcgtttcttataagcccaggagccaatcagaggctgcgtcgggaggaagttggagcgcggacatgccccctctacggtgtccttgcaaagtgtggcagtcactacaggtttgaggaaggctctgtcgctgctctggccgtaggcacagcgggctctggaggacactggtttgtactgcatgcgtgtgaggatggctttcctcctggaaggtctcaaacggaaaatagtttcagtgtgacgagtctctggacaaagcaagtgggtcattctgactcagagtactgagaaaggatataaaaattctgttttctggagccagacttggagtggtttgtaagttctagctgatatatggcaaaagaagatattaaattcttctggctcaagcaatgaaaggccagtagtacatctagcacccaagtcttggtttctaaatcctatgctccaataagaggaaccacggctttttgacacaacctctggagaaaaggctgataccagggctggggctgtaaagtacaagatgaacctgttgtgccagagatgcggaagtgctcaaaaaatgataggaactggtcaaaggtccacagctgccagcttgaagggtctcccagtggctgaagctgggataattttaccatcaatataaatcatcataatggataacccattgattaaaataaaactcaacaatctatattaatataaataaatgaggaaagaagaaaggcttttcttaaaatagaatgccagctagtatccatagaaaatcataaatgaatgctaaaactagagggtaaaaatttgacacagaattttggtccttcatcagaagatctctccacaaattactacaaagggaaaaaataataactttttattggagaaacgtgtggatatcacctgaaaaattctttcagagatgaacaaaccgtgtggatgccctcaagatgtgtacaactatagaacaggagatgggtacgaccatagaacaggagatgggagggtccaaccatggaccgggttccgccagtatgagccatgagccagttgaatctgaatgcaaagaacaaggaccgactggagtcacaatgcttaacggaccaatgctttctgactcagctcctctctaccctgaataaagagaccctaatagttaggcaggagtatcatcacccctgttcagcatgaagaagttacagaagatggacgttcatccttctgcaacccctaggattaagggtcctcttgtaaaagggaaagaggaggtatgtgggaagcattcaaaccagagtgactccagtttgaaaaagggctaagaaaaatgaagctggatcaccaactggcaattaaggagtgcacagcctacaattgccttgctcagttaaaaaaggccaccttttatgctagtaataatgatagcaatagtgataccttctcttttacaaagaagagaagggggacatgttgggaaaaagctgagtattgggaagaaagctgaggcagtgcttgcatgtctgacataatgtcctctggaatgtgtctagacttgctggcttcttgcttctagccctcctaggctcctaaatagattgtattcccatcatctcaagtaccagaacatgttccttataaatgctaaaccatcacagctatagatcaggcacctgcccttttgaccgccacattctcaccacctgtttctttgttggattaccaataaatagtgtgggctcccagagcttggggcctttgcagcctccccaatcgcgatggcccctggttccactttacttctcaaactgtctttttctcaaccctttgactctgccagacttcgtcacccccacgacctggtgttgggtctgatcaccccaacgacctatattttgtgctaccctcttatctcattctgtgactaagaatgcctaacctcctgggaaggcagcccagtgggtctgagccttatttttctcagtccttattcaggatggagttgctctggttcgaatgcctctgacacttagagctttgttgttgaaaactgaattatatactgtactttttcttttctcttattgaaaaatcatcctactttgttgattattttctgtaacgtcttgaggtaatttaaaattccacctgtctccatcagagagacagggactcttgtcctttttattcactgctataccatgggtgtctagaatattgcctgcacatggtaggtgcttaaataatattttgaataagttaatactatgaagcattggtaaattcactcaattttaatgaatgaattaaatatcttcaaatttaatgacaattgtctttattcagatttctgaacaatatattcagagaaataactttagagaaaaagacaagtgaagaaaaagaataagaagaaaagcaatggataaacaggaaaagagaataaaaaggaaaaattttaaactcctattaactcccccagaaatattgattttattgcttattgtttaataggtgaaccatctgactctgcatatgccttgtggtgaaaatgtttgggacataggaatgagacattttttgcatatacgtcatagtgggcattggcatacctgtggcctctcagaatcttttgaacactctttctaaatgttggtaacttcctatactgcaaatgctagctctgtaagtgggatgctataaatctcaccttcccagtctctctcatctcagaacccagcatgtccactggatcttgacttagcagaattcaagtaagatttgaccccaaaggaaaacactgcgaaaaaagattttgcagcgtctgtcaagggtgcagagtctgatcaagaggtacaaaactctcagcaacatcagaagcaaaatgtcctggtggtatagtctgtgttcgctgttcgcagaggctctgtggacagtctcatggtggctttagggagtgcaggattgtccctatgattttttgttaaaacttgctaaagttgccaggcacggtggctaatgcctgtaatcccagcactttgggaggccgagaagggtggatcgcctgaggtcaggcgttcgagaccagcctggccaacatggctaaaccccgtctctactaaaaatacaaaaaatagccaggcatagtggtacgtgcctgtaatcctagctacttgggaggctgaggcaggagaatcacttgaacccgggaggtggaggttacagtgagccgagatcatgccgttacactccagcctgggcaacagagccagactccatctcaaaaaaataaaataaaaacttgc

SEQ ID NO: 350 - DNA, 5587 bp, Homo sapiens
accactttcggccggcacctggtgaagaacatccggctggagcagccttgtagctgcaaagcgggtcagaagaagtgcacctgccaccggcctggcaagaaggagacgtggctcttctcccgcttctccaccggctggagctgcgggctgcacgccgactggacggagctcaccaactgcgtgccggccatcatggagaagaaggactgtccccgcaaccacagccacaccaggaatttctattacatcacaatgttacgggatccagtgtcacgttacctgagcgagtggaaacatgtccagagaggggccacttggaaaacctctcttcatatgtgtgatggaagaagccccaccccagatgagctgcctacctgctaccctggggatgactggtctggggtcagcttgcgggagtttatggattgcacctacaacctggctaacaatcgccaggtgcgcatgctggctgacctcagcctggtgggctgctataacttgactttcatgaacgagagtgaaagaaacaccatcctgttgcagagtgcaaagaacaacctgaagaacatggccttctttgggctcactgagttccagaggaagacacagtttctctttgagagaacattcaacctcaagttcatctcccccttcacacagttcaacatcacgcgggcttctaacgtggagatcaacgagggtgcccgccaacgcattgaggatctaaacttcctggacatgcagctttacgagtatgcaaaagatctcttccagcagcgctaccaccacaccaagcagctagagcaccagagggaccgccagaagcggcgggaggagcggaggctgcagcgagagcacagggaccaccagtggcccaaagaagatggggctgcagaagggactgtcaccgaggactacaacagccaggtggtgagatggtgacctcctgccctctcctctctcaggagggggagggtgagcaggcacattgactttctgttgaggtaccttggagaagctgagccattctgaggacatctggctgtgtgtgcttgatttggacatcttcttccttctttgtcttcatttttatccagctggagattatccgtcttgttcttttttttcttgacattttgcaattggtgatattaagtagggtaggagtgcatcccatataggccattttagaaggccaaggagagccacaccgaaaaaggagacagttcctgtgatctcctttgcaggagcatagaatagtttgggtaccaggaacccacagaggcacacatgaaaagccaaattatggcttggatgttctgctgaaactggtctatgtcatactgtctcctgttatgagaatatcagttggtataaagagagagaaagagaaaaacatttcagcccttagatgaggtcttacaccaacccccacttggctgttggctgtcatcttgaactctatttgaatgtgacttaaatcacaagtaacgtgttttgttgttgcagttgttttgaaacaaaattatcctattattgaccattgctagagacccacatcctacaaaatcctgacaccataaccttaagccatgcctttccttccatcttttagggaacggggagtggatccaggacaggggaggttgtaacccctgagaaatgaacattggtaggagcatttaagagaaaacttgcttatttgctaatgcctaaaggggtctcactttaccaattgttactttcaatgtgaggaatgaatgataaattaagagaaaaaaatatcaggaaggtcaatatatgcctaacatttctaaactggccacataaccttagatttttaaaggaatatttcagagtttaatctttttggagaagttatgttctttaatcgggtactaccagtcttgaaattttgccaccacagaaagaaagatgtttttaaaagcttggctcaaagaataggaacttagctagcatgtatacaaaatatatttgaggttactaaatgaataaaaactcggaattaggccaggagacatggaataccattcatgggatggttatcacaggagtttagaaagactctgcctcccagcatcttgaatatctccagcctgttcactgttttcttcctacatgatctttacctgttgttagactgtggccacagccagtaaatcaggccagagtgtctcaaactggacaagaaatgtgctgcattgccgagttcttattttcaccttttcataatcccaactacaataacaagaattttattgactaataagggaatatgtatggaagaaggaagagaaagcctttgtctagcatttattaggaggatcagagtgagtgggaagtttcacaacggattgatctgatcaatcccttcaaggagctgaaggcaaaatgtgtaaaacccctaaatcagattgaaaagcctatttcattgatatccaacatgtttgatgtttaagctagctttacctaagccacttctcagcctccagaatactctctctggggttgtgagtcagtcagcccacaagcattcacagagtgcttacctgccccgagggaagtccagcagctccaccagatagagatctggagatgcttctctcactgtgcttggcttcatctggggtgcaagggaaggcattatcgggtggctcccttgctccaggaactgaacgaggcccttttcataccttaaatatattctgcacaacaaatgggtattgttagtctccatttcatagatgaaaatagtgaagcccacagaaaataagtagctcctccacaggttgtaagctaggtctagctgactgcaaaggtcaagttctctttactccgtcaccatatccatatggaataagggctcgtcctacctaaagcttcctgccaataatgcaagaagccagctgcaatttcccagaagcatttgtctctaacccatgtgggtagcccgaccatgacagcaccacgctaacagtgacccagagccatactgccttgggtcagtccagccccctccacatcactgagccatcaatgagctgagagatcaatgactttttaggcagctgtgttttttaagccatatacaagagtaagttaaaaggggccaagtaaatgttgcttgttatttggtagagattaggctcacaaaatatttctccatttccagtgatttgttcctaaggtagaagggaaggaggattgcagctgggattaatgttcgtctctctctctctctctctctagcttctcatctcattgttaggatctaatgttctgcctagaatagcaggactgcaaattatccttctgcctgcccctgtgacacacacacacacacacacacacacacacaaacaatccagtgttttgtcatgtggaaaatcaaaacaagttagaaagcattcagattgtttcttttaaactcactttaaaattttggcaaggaattcatgcataactgagacttggaggcagcccctgctcacttcacgctgttccttaggcacctcgggattggtatcaaaggcttccactgccttctgctgaaggcatgatgtatgcggctccacttgagaccaggtatcaggatgttcagagggagccagctctttatgttggccccaggccagtactaagcaaattaaaaagaccgacatgggcttcctccctcatatcatttcattctaaagcagcaagcttgtcatacccatggggtcctatgttgatagaaatggagaggtagggatacagtttattctccaaaaatggactgcccacttccatgctgagtgatgctcagggaagtgatgcccgcagaaggcgtctgggcctaaggatccatggaagtcaggagcattaaatcccaaaccaaatcaactccagatatatcagtgtcaaaagcccaagaaaagacaaaaaagaaaaaaacaatccccaggggttctatgaccctattgactcctacagttctttcccttctcttggcaatggaagctccagtacccagattggagattaggatgagacaactttgtgtatatgtgcacgtgtgtggtgtgtgtgtgttttattaaggactaagatacacacttatctattctgtctccttctagcttttaggcagcctactcttggaaactggaggaaactgccctgagaattattagaatgctaataatagtaattggtaacattaacaatcagtgttagacaacagtgaggcatatcatgtgtttttattaaaaatgataaagatgtgtttcttctcatctaaaggaggtaactttgtgataattagtttgattaaaagtttgaagtatgaggactccttgttatgcctttaaggtaatttttaaaaaaaatctgagtagagatagtactaatattggcaagaaggtccccaggatagacctagcaaggagataagaatagatcattaaaaaataaatataaatggattggatagaattcccattcagctgttttaacacagaaattcaaaatagtgacttaacatggaagctatttctctcttacttaaaggcaaactggttttacagctctggtgtgtgatgttaccagacgcctaggccctctcctgttgctctgtcatcctaatgtgctgcatccacctcatggaccaagatggctgccacagctcctgccatcacatttacatttaagatagtagagaggaagtggagggaagttgcacatattgcttccagtcacatctcatgggttaaaacctagacatttgccacatctagctgcaaagaaggctagggaatgtctttattattgattgtcatgtgccttgataagcataggaggttctgttattaaagaaacaatgtgaaataatgtggaaattaatactgataaagactatcagtatctgatacaaaagggaaccaaacgatatttaagtgctttttaatgtcacttacttcatcatatgttttgcgaaagataagactaaaattcatcactttgtgtagcatttaatggttttcagaacatttttgcatgtgctgtctcatttggtcctcattacattcttgtgtgctaaataggacctctattcattacaccacttgctagtttgggatggagagtcagatatgttgaaagatttcccaacgactctaatttatgagcaagaaagttgcttagagccccagccttttgacttcatagtctttccgactactttatgcagctcagcatcagtactgggattgggaactgcaagaatatgaaatgtaaatctttattgatttatatccttccttaccttttttgacatggaaaatgccaaagacactggtcaagtttactctcagctccctacctccagtgagggggcctcttattaggaatgaaatatccaagagatgggcggtgctgcaggggagaccaaaactcagaggaggcattcaaacacttctagcaggttgtctactccatccaactcaaaacctattcaatatgaaggccgagggaatgtgctcacaactccctattaagggaaatcaatataaacccgcccccaccaacc

SEQ ID NO: 351 - DNA, 4353 bp, Homo sapiens
atcgcgcggcggcggcgggagcggcggcggcggcggccggggaggttcacaataaaggtgctaagaaagagaatgtaagacaggaaaataattaaatattcttaccgagtgtcttcaataggccgtgtttaagaggcgtcttacactccctgttgccagtggctggaacacaatggatcacacaggggcgatagacaccgaggatgaagtgggacctttagcccatcttgctccatgtcctcagagtgaagctgtggctcatgaattccaggaactctccttgcagtccagtcaaaacttaccccctctgaacgaaaggaaaaatggtgagttcagcatgtgcaatgggatctttgatttaaagatttcccctctttgggagcccagtttattcctgtttggtagtaatattttggtcagttcagcagtctgtcatggaggagaaccctgtagaggtactggatggtttttaataacaggcagaatttcactttccattcagttctttcattattttcccagtaagtatctttggtagtgacgttacctttggaaataatctttagattcagccattttagcacaagcagatgatttcatgctggaatggcattggaaagtaggttcctgtgctgatgccggggaagtacattgtggatatgactgcattctcctcccactttctccatctccggtgtgttgcaccgtaatttcacaagtggcaaagctatctcagtgatgactaagaagtcaggagcttcttatttgagtatttattatattaatgggtattggatatagtcatattctcagtctttggctgcctcatctttgtctacaaaatgaatattttctattcattatctgttcaggaaattttcatcgctcacagagatattccagagtctccagaagacacaatactgtcaatttttaacataaacaaatagagatagatgacatatacttttaatacttaagatacaaaatctaacaaagtaatgttaaaatttgcaaacactctaagcatgcacattaaaaaatagaattaaggtttttttctggaattactataccttccacagttctgatgagtcccacactcacaagtatatttgtaaatttcagttttttaaaagccagaagaaataaaactgctttccctgcagagtgcctcattatgtaccttgtcacttactttcctgggtcctgagtgttttccagtcctcctacttattagacttaccttatttaggaaagtggattaaaaaaaccatacatataccgttcttcttaggcctttagtacatgtctttggtatgtacttgttctccttcaaataaaatgtgttttgctttgtatctgaatcttgttgctaggcacagcccttgaccattttgataggtgtttttttttttttttttgagacagagtctcactctgtcgcccaggcttgagtgcagtggcgtgatctctggtcactgcaatctccgtctcttaggttcaagtgattctcctgcctcagcctcctgagtagctgggattacaggcacgcaccactatgcccagctaattttttgtatttttagtagagatggggttttcaccatgttggtcaggctggtctcgaatttctgaccttgtgatccacccgcctcgacctcccaaagtgctgggattacaggcctgagtcacagcacccggccaattttgataggtttaaagcagcatcttagcttaggtgctgtgaaaccttcaggatgctgtggttaactcactggtgatgacttttaaaccttccatcttttctttctttttttttttttttttttgagacggagtctcgctctgtcgcccaggctggagtgcagtggcgcgatctcagctcactgcaggctctgcctcctgggctcacgccattctcctgcctcagcctcccaagtggctgggactacgggcgtccaccaccacgcccggctaattttttctagttttggtagagagacggggtttcacagtgttggccagaatggttttgatctcctgacctcgtggtccacctgcgtcggcctcccaaagtgctcggattgcaggcgtgagccaccacgcccaggttaaaccttccatcttttaagaacccacatttaccttagacagtagctgagagaatatagccatatttactgaaacatgactaagtgtgatcagatttacacagtacacttggaccagtataatgtccaaattattaccctaaaagaaaataagagttgaactgttataaaatcagaacacacagttgtgcacaataatggtcttctgtaatggggagggaagagtgaggagactttatcctttatggtcatttacaggaaaagttaatatgtatgccagaatataaggtggcaagcccaaatataaagcagtctccccttataaacttctaaggaaatagattaaatggtaaaattttaaatttattaatgtagttacattttatgaagcattgcaataatgtagaaggattgctttaaccactctcattgttcataaaaccatcctactcaaagtctatatgtgaatctttgtggtcagtgtttttatcagtagtagaacccctgtgcatcatccatctagcactaatttccagggtacatcttcatttctgtctctttggtttgagttacagcagctttgtaacatgtgcatgatttggcactgaacatttcttttttttttttttttttcattaggcaaacatttattaagcacttaatatgtacaagggacaagggagacgcattttttaatgttgtctttctttagtaacagtcaaaataccacacagaaaataacttgaaacttaaccacagtgttattattgaccaattgggtttaatacgttttcttcaaaagatgtttgatattttgtaggagacaaaataattatttagcttatgagaagatagggcataatttggaaatccaggcctctgaaggatggaggtgcatgttttagacacaaataatcttcccggtatctttgaataaatcccatatttggtagtactgattcttttttttttttttttttatactttaagttttagggtacatgtacacaacgtgcaggttagttacatatgtatacatgcgccatgttggtgtgctgcacccagtaactcgtcatttaacattagatatatctccaaatgctatccctccccccggcactgaaaatttcatgtctaaatcacaagtaccattcacaaaacagtttttttttttaaattgtcttagttgtatactcataatctctataacataatacttgtttgatttgtcattggttgttacattttatggggtctagtttctgttttagaatttggctttttttaagcagataatgtattcatgtggtttaaaatgttatgattacctagtgaaaaggaggttaccctcccaatcttgtcccttacctgcacagttactttcccagaattaactgttactagtgttctttctgagagaataatatttgactacgttttaaaaagcagtttttaaaaggctactttgtaacgacacccaacactttgcattttaaggttctaactgggaataatgtattggtttttttctcttttccttcttttttctaattctgattaaaatatttctgtaagcctgaaagtagcttcaaaagaagttggtttttaagccaatgtgttttcttcaagagtccttttttgttcaatacggagtaaatgagagaacatctcattctgagaaactgtgcaaagactccactatgagattgttccctcttttctaataaatgacttcaggaagttattatagaagccttattttatattcagacatataatttcgggcttatgatatattaacctaatttgcatatacattccaaggcataaaaggcatccttatttggctgtcagaaatctaggtttttggggaaatgctgctcaaaggatacaaatttcagttagataggaggaataagtttaagagatctattgcaaaacatggtagccaaggttaataacaatgtattgtattgaaaattgctaagatagtagattttaagtgttgtcaccacgaaaaaaatagtaaacatttgaaataatgatgtgttaattcaattgagcaattccacagtgcatacatatttcaaaaaaaagtacatgataaatatatataatttttgccgggcgcggtggctcaagcctgtaatcccagcactttgggaggccgaggcaggcagatcacgaggtcaggagatcgagaccatcctggctaacacggtgaaaccccgtctctact

SEQ ID NO: 352 - DNA, 3745 bp, Homo sapiens
ggaagcggctgcggttctcgccggttctcagccggggtttgatagttgtcaggaggattcgacgttcagtgcccagggatgtggagagtctcactctgtcacccaggctggagtgcagtttgtgtgatctcaactcactgcaacctctgcctcctgggttcaagcgattctcctgcctcagcctcccgagtagctggaattacagagttcttggagtctctgcggagtccctgggccagatctcacagtgaaagctgcaggatcttccttctgaccccagcagtccccgttgagtccaccgatcccactggaattataaagttgtcagcaagaaagccccagggctgaagtccaagtccgtcgggaacatgccagctaacgaggacgctccccagccaggggaacatggcagtgcctgtgaggtatcagtgtcatttgaggatgtgactgtggacttcagtagagaggagtggcagcaactggactctactcaaagacgcctgtaccaggatgtaatgttggagaactacagccacctgctctcagtggggttcgaagttcctaaaccagaggtcatcttcaagttggagcaaggagaggggccatggacattggaaggggaagccccacatcagagctgttcagatgggaaatttggaattaagccttcccagaggagaatttctgggaaatctacatttcatagtgaaatggagggtgaagacacactgtgttaggtagaaaaatgctacagatgtcttcatccctgtatatgtgtccttcttcagtctttatttctctttgtgtttcagttaggataatttctattgatctgtcttcaaattcactgatgttttttctctcaccctggctttgtcaagtctactgctgaacccattgaaggcattcttcaactcagttatgttttatttttatttgtaatatttccatttgattcttacaattttcatatatctgctgaaattccccatcttttcatgcatgttcatgttttcccctttaccctttgtcttagtcagtttgagctgctataataaagcaccatagacttggtggcttataaacaacagaaatttattcctcacagttctggagcctggaagtctgagatcagaatctagcaaggttaggtcttggtgacggccctcttcaaggttgcaaactgctcacttcttgcattttcccatgtctacagctagagaactctttgggatcccttttataagggcaccaatcccattcatgagttctccacccacattacctaactaccacccaaaggctccacctcctaataccatcacattgaggattaggattttaacatatgaattttgggggggatgcaatcattcagcccataataccctctaacatattaatcatagttatttttaactccctgtctgatagttccaactactaggtcaactgagtctaggtctgttgttgtcttctcttgctcttttgcatctaataatttttggctgaatgtcacagatgttgtatgtaggacagtagaaactgaggtaaatagtaattattcctggaaacagccatggttgcccttttgataggccattagcatggggagattgaatccatctaatcaggagttgggctgagtttgtgtttctttgttgccagtgttacctttgctgtaccatagacttaaaattcctctattgttatcttatgcttgaggtaggcactggtttgcccagagaatttttatttttcccagaccacacttgcctttaggcctgtaggcctttcctgtgtgcctgcatctcagggagggtctctctccatgttgttgcctctatgttagtagtagacaactgttattacttggttcttgctgacctggtgagttggggggcaggggttgtcttgggccagcctcagtttttgtcaggccatgaatccctgggtcttgagggtgggattttttagtgatcctgccctcttccactggtagaaggcctctaatgatctgggcccaggatgatttcctgcccttttatcatgggtggaatttttttttccatttccctcactctagtcacagtgaatctttaactgtgtcctgagggcaacagggtttgctgcacttcttttagtggcttaaggattttgttctgtaggggagtagggtttcattggagctttgtgccatttctatgttaacagcagcccccttgcaggcctaccccatggaggtaggctttctccagtcttcttccttgtccccgtgtttcttgagagcactcagtggatgactatggagaagagcctgcaagcagagaccaactacccttaggtctacagctctcatgagtctcccgcactcagcctttagcaattcattaaaaattcttgttgaattcttactgcttgtatagtggcctcatcttccttcctgctgtaccacagatggcccaggagaggcacttgtcttttattatatttcaagctagttggttgctctgtaatcttagctctctgatgggttcgagaaaacttatgtttttgcagattacccagctttgttcttgttataaagatgggagcagtgttctttccagatgtctacatgctaggcagaaactagaagtctggacagtctccatggtctcctactatcagaatatgtgcccttttcagtgtgactttgccacttcacccatcaagaggtagaatctatttcttcaacccctgcaactgagcttggctattttgttggccaatgggacattaacaagtatgatacaagcagaggcttgagaagtgcctgcacaatgaggcttgcccacttttgcagctctttggaatcctgaacccatgtgtggaaaagcctgaactgtgctgttggaaaatgagagcgatcacatggagcagtaatggagcaaagaccagccatcccagttgagataccctacaccaaccagattttcaactgctggacatatgaatgaagctatcctaggcatgcagtcttggtcaaggcaactttggctggcagtctctgagatgaccctgaatgatccccacctcctggtattctcactcttatataatcccctcctcttgagtttggactggaattagtgacttggttctagtgaatagaatgaggcagaggtaatgggatgtcatgttcaagattggttacaaaaagactgtggcttccattttgggtgcttgcttactctctcagatggctcatcataggggaaacctgctgctacatcatgagatagccctgtggaaaggtccacatgagtgaactttgaagcatatcctcccccagtttagcctttagatgaggaccacagccaaatagcttgactgtaagccagatagcttgactcatgagggaccttcagccagaggcatcttttgagccatacgaattcctgacccatagaaactgcaagacaataaatgttgttttaagttgctaaattttagggtaatttgttacacagtaataggttaataatacactggcccagattaggaaggttctgccatccatcccagccatcccaaacaactaccagaataatggattaaaacgttaactgttttaagtcactaagttttgggcagcatgataacaacccagcaaaaagctaactgatacattgattatttattgcatttcttcctccactattcttctctaacagatgaccaatactaataaactactgtgaac

SEQ ID NO: 353 - DNA, 4501 bp, Homo sapiens
ttcttgattgaaaatggtgctaaagttggtctttttatgagtggtagctcttcagtttaacataaataacatcttgggagatactgagctttttgatattgaaagatagaattggtttcttttcacatttttctttatttttaagcttatgtcttgtggcacctgtacaaaggacttggttgtggttgagctataaagttatgtatcttgaaaattgattaccaggtttgggctgtggctccaaataagaaaatgaaatgtttcaccataactgtatttcataaacaggaaaagaacattcagatgtatatttcttacaattcttcacaaactttttccgcaatttgtacattcatacagttttcacacatcaaatgtaaaaattaactgtcattcctacactgttctttttaaaaatgtatggtacttgttgctgctgtagtcattcatgtatagttggctcaaggaacacttctaaaagctcaattaaaaattttttttttgagacagggtctctctctggcctggctgaagtgcagtggcgtgatcagagctcactgcagcctcgaactcctgggctcaagtgatcctcgctcctcagactgctaagtagctgggatttcaggctaccacaccctgctaatgttttttgtttttaataaagtctcgtcatgtttcccaggctggtctcaaactactgagctcaagccgtgctctaccctggcctcccaaagtgttgggattacaggtgtgagccaccacacttggccttaaaatattttaatttcctcaaatttacaaaggagaataagacctcatggctaaattgaacagtgagtgcagctagttcattgtttgcacaaggaactacagtctaattgcagttcctattttagctgatgaaacaaccagtttgtcatggaaattattttagtgtggtattatgtaccagatttttagaatccataacttgaaattagctttacacgctacatagtaaatagtggactacagaaacaaaagtattaacataaggaccttaatttttttcacctattttatgaccttaaatattcagtatttttttaattccatctgtattttcgttttgtcagtgagtggaataatgtgctccttatttaaaacatcttttcccctaacagtagaacctattaggtcttgtggtttgatcactcactggttttgagaatagatgagtcatctctagtatagatcttcatggtaggccattcaccttcagtctattactcatagcaaaaactccacggacttttttaagtttaaaacccatgaatctgcttaggttttataatctcagtatttgacatttgctcactatttcatctctatttgttggcccggtttttctgtattttctttgcccaaactgctcattatcaagatgaacatttgggatatactctttttgagaccctcaagggcatattgacatgaatttagttaattttagtcatctattgatgttgaagaattgtgaagacagtcactggtagaggtgattctatggaggctatcccatcccagtggaatgttaatgctttaccaaaatgtgttagctgcagtagacagatgtttctgtcttgggggtttagggcacaacatttctgaggaactctgactcaatctgtcccttctcctttcacagggcagcaaggcgaaccccatccctactcactggagctcagctttgatttttaacctcccttccccacccttccagaacacacacattccattccaaaactgattttataaagacattttaaacataatgatgcaacttggtgtgcactacagcaaatgtacaggtgttttttttttaattgtttccaaaaccgggacctggatttaagatgtaatttttaaaatttctatttctattttttctgcagcagttgggttagaggaggaggagccttttagcctctcataaactgacctctctacttcctcgtgtatttttaagattgattgatgatgtggaaagggctttgcttgtctgctactgaaaactttatccttgcggtttttgtggaaactgcttttggaaagagaaaagaaatgaactttactgacttgacatttttgcacctcccgtttttctaatctgggctatttttatttttgtttttttacagtgagatttttttgatcttcagctacagtaagttattccaatttttttttaacatttttcctgactttccgctgatttcctttttattgttgttactagttactattacttattattattatattaatacttatgatggtgatgatgatgatgataatgacactgatgatttttaaccggattaaaatcgagtttttctgaatgtttctaagaatttctccggcctcctgattgactttggagttttgcatcttgggagagaaagcgaaggcattagtatttttaagtggtttgatcacgtaaaccttttctctcccaaccccacccttgccctcatccccttccccacactgaaaagaattttactggctgttaagtctatgaccttatttttcctgatctttaacttaactgttttagagcatctctggacgtctgtatttttaattttttttatttttgtttttttatttttaatctttcatttgttaaatttttaaactgtgctgcaataaaatgtgtgtggtactacttaacacttatgatcgtgatggcattttccctgaaagccatcttcctcctgtttcccttgaaatcccatcctgcttttcctgtacactacccctcacaaaccacaagctgcagcaacatggatgcccagcctggagcagcagcagccaggatgacctggagccaggggggccttcggaacagatgcacacccttcctgggtgatgttttcggctttgtgagaaaccttaccatcaaacacgatggccagcaacgttaccaacaagacagatcctcgctccatgaactcccgtgtattcattgggaatctcaacactcttgtggtcaagaaatctgatgtggaggcaatcttttcgaagtatggcaaaattgtgggctgctctgttcataagggctttgccttcgttcagtatgttaatgagagaaatgcccgggctgctgtagcaggagaggatggcagaatgattgctggccaggttttagatattaacctggctgcagagccaaaagtgaaccgaggaaaagcaggtgtgaaacgatctgcagcggagatgtacggctcctcttttgacttggactatgactttcaacgggactattatgataggatgtacagttacccagcacgtgtacctcctcctcctcctattgctcgggctgtagtgccctcaaaacgtcagcgtgtatcaggaaacacttcacgaaggggcaaaagtggcttcaattctaagagtggacagcggggatcttccaagtctggaaagttgaaaggagatgaccttcaggccattaagaaggagctgacccagataaaacaaaaagtggattctctcccggaaaacctggaaaaaattgaaaaggaacagagcaaacaagcagtagagatgaagaatgataagtcagaagaggagcatagcagcagctccgtgaagaaagatgagactaatgtgaagatggagtctgaggggggtgcagatgactctgctgaggagggggacctactggatgatgatgataatgaagatcggggggatgaccagctggagttgatcaaggatgatgaaaaagaggctgaggaaggagaggatgacagagacagcgccaatggcgaggatgactcttaagcacatagtggggtttagaaatcttatcccattatttctttacctaggcgcttgtctaagatcaaatttttcaccagatcctctcccctagtatcttcagcacatgctcactgttctccccatccttgtccttcccatgttcattaattcatattgccccgcgcctagtcccattttcacttcctttgacgctcctagtagttttgttaagtcttaccctgtaatttttgcttttaattttgatacctctttatgacttaacaataaaaaggatgtatggtttttatcaactgtctccaaaataatctcttgttatgcagggagtacagttcttttcattcatacataagttcagtagttgcttccctaactgcaaaggcaatctcatttagttgagtagctcttgaaagcagctttgagttagaagtatgtgtgttacaccctcacattagtgtgctgtgtggggcagttcaacacaaatgtaacaatgtatttttgtgaatgagagttggcatgtcaaatgcatcctctagagaaataattagtgttatagtcttaagatttgttttctaaagttgatactgtgggttatttttgtgaacagcctgatgtttgggaccttttttcctcaaaataaacaagtccttattaaaccaggaatttggag

SEQ ID NO: 354 - DNA, 3360 bp, Homo sapiens
tttaaagtggaatcctacagtgtttatccgtttgtgaccagtgtagatcatttcgtgtaatgtccttcagtttcagccgtgccgtagcttgtggcagggtttccttcctttttaaggccatgtgacattccagtcccaccttgctaaagcagtttacctggtcactggggtgactctggagctcccctctggcctcactgcctgtgcttggtcatgttggctagctgtcctcccttctccacctctgagtctacaagggctgcactccacggaggtcccatgcgtcagccccgaccgcagcgcttggctctgctgctgtgtcccgtccccgtgaaggctcagcaggcactcactgggccttctcccctgctcactgctccgcactctgcaccccacccgcactgtgcgtcttcaccctgcctggcctgggccactgtcccttcctgctcagatcagtcagcagggtgcctcagcttgttccccacctccaccctggccccctgccatcttttctgcacatgggcatgagtgaacctattcaagtgaaattcacattttctcatgtctcatcagaacccccaaagcctccccagtctctgataacacatccagggtctttcggtggcctggaggagctataagatctgcttcctacagcctccaccctgtctgctgctgctctttggacaccggaccttacacacccctcagacagtacagcacccaccctgcccttcaactcttgcttggccccgtaagccagtccttccaggctcctgcctcctctggtcattccctgcgtgggcctctcgcaggaagcagttttcctgtgtcccccgccgaccccctgcaggaggtaagctgcatgagggcagtatcatgttgcctagcaccttggcccacatggagcaggtgccaagcagatatgtattgggtggaggaccctctccctgtggccttttatctatttgttctcacagggtttgccaggtttggctgcagttcatgtcacttgaggacattcctttccagcgccgttggctttgtggctgtggctctgtcacagctccagctgtgctatcattggtccacattgtcccctcccctatttgctgtgactcccatgggaagatcctatctctgttcctctcgcactggggcaaagcagtgctggcagggggctggggaactggcgggtggcctctcctgggcaggaagtccatggcacccaggtgctccctgtgctccagaggggctggggaggtttcatggagtcaataggcattggcaagctgacatgtcccctgtcccacgcaggcctgttgcagtctccaaggcaccatgaatgccatcgtggctctctgccacttctgcgagctccacggcccccgcactctcttctgcacggaggtgctgcacgccccacttcctcaaggggatgggaatgaggacagtcctggccagggtgagcaggcggaagaagaggaaggtggcattcagatgaacagtcggatgcgtgcgcacagccccgcagagggggccagcgtcgagtccagcagcccggggcccaaaaagtcggacatgtgcgagggctgccggtcacttgctgcagggcacccgggatatatcagccatgataaagagacctccattaaatacgtcagccaccagcaccccagccacccccagctcttcagcattgtccgccaggcctgtgtccggagcctgagctgtgaggtgagccttgtggccacagagcctgtctctgtgggagcccacatgctcccaggtgctctgggtgggctcggagccagcattgcacagggaggcaggcactggtcctctctcagggcggacccgcagatcagcacagcacagggtacaggacgcctcccttgtccagaattgcgggaggagtcatgttggacttgctgagcattttctgattgagtgctagcttttgcactttaagcaccgaacttttattatttgtcctttctttattattattgttttcttttttccttcttttgtgtcagggtctcgctctgtcgtccagactggagtgcagtggtgccgtcatggttcactgcaacctcaaactcctgggctcaagcgatcctcccgccttagcctcccaggtggctgggaccactggtgtgtgccaccatgctcaactggggtttgttttttgttgttgttaagacagagtctcactcggttgcccaggctggagtgcagtggtgcaatctcggcttactgcaacctccaccctgggtttaagtgattcttctgtctcagctatcctgagtagctgggacaacaggcgtgtgccaccatgcccggctaattttttgtatttttggtagagaggagatttcaccatgttggccgagctggtcttgaactcctgaccttgtgatttgcccgcctcggcctcccgaagtgctgggattacaggtgggagccactgtgccccacctttttaaaatttttttgtagagatgaggtctcagtatgttgcccaggttggtctcgaactcaagcaatcctctggctcatcctcccaaagcactaggattacaggtgtgagccgccatgcccagccatgtgtgtctattcttgatggatgtattcctaagataggaagcatttctaggttaggtggttcattgcatcaacatcacctttttttattatctcagtcctcattccaagtctcagtgatgatcccgtgctgctctcagcctgctgaggtgtggatgatttcttcctaaactacgtcgctgctgctgttgctcttgactctgagctcaggtctttgttacaaagaattcgtcgttcagttactaaacttccttgtcattggtgtccacccagttcgacacaccaagctcccttactgttctcattcagtgtggctgtgtgcctgccctcaactgtcctctccttttaatttcctaccgctggtctgctagcaggcagctcggcatgtctgttagaattgtgtgttaaggaagagtaagtatgtaatgaggagggactgaaatcctcttataagaataaagtacgtggggctgggcatggtggcccactcctgtaatcccagccctttgggaggccaaggccggcagatcacctgaggtcaggagttcgagaccagcctggccaacatggtgaaaccccctctctgaaaaaaatacaaaaaagttagccaggcgtggtggcacactcttacaatcccagctactcaggaggctgaggcaggagaattgcttgaacccaggagacggaggttgcagtgggccaggatcacaccactgcattccagcctgggtgacaagagcgagactccatctc

SEQ ID NO: 355 - DNA, 3674 bp, Homo sapiens
tttttgggctgcaaggaggcagttagcacagggaactacgtagtgagggacatggagactaaacagcagctggcccatctctctggcttctcatggccaagcctgggacacacagctgccctcgtgcaggtccagaactatggcacttgttccctcaggacccatcctcaaagccagtgacttggtcttttcctatgacaaaggagctcccagaatgtggcagtcccccttcctagagggagaatctgactgggtcagggaggcacccccggtttgcagagcccccattggtcaggttcagtgtccaaaacacctgaggggcaagtggcttctcgaagtccagcccatatggttacttttgacttggacactcaaggcacagggacacatgacacaggcacagggtgtgacaactgcatgcagaaagagccactctcattcctcagaagaggctgtggagatgagtggctgaggcatgtgccccaaaattcatgttgaagtcctaacccccagtatcttaaaatgtgaccatatttagaaatagaacctttaaagagctaactgggttaaaatgaattcattagggtaggccctacttcagtatgaccggtgtctttagcagaagaagaaatcggtacagacacgcagaggggagggcatgtgaggacatgggaaggaaatgccacttgcaagccaaggagagaggcctcagaagaaaccagccctcctgacaccttgatcctagacttccagcctccagaactgtaagaaaatacatttctgttgtttaagccacctggtcttagagttctatcttgaatttctctctgcttcagacttttctgttttgttttttagcctaaatgctattgaaaagagcagagaagatagagtgcaggcccctagagacaggatggaacgaaacacgcagtgtgcatctgtgtcctgctcagcatacgctcttggtccccactgggccatctcgctgctgactggcatcccgaagaacaggcagattgcacaggggcagctctttcctccaaagctgcaatgtggtgcatgaagtcctcagatttgggaactcatacaggcacttgagctcaaacatacagttctgatctaagacatcacaggtaagaatatccaaaaaggtgagctttccccctggaaaccatgacttcctcagaaacaaggagaaatgtttcagctgcccaggttgcagttccgagtatggaggcttccatgtttcatgtcagggtcatggtggagctgtttcagctgcaggtggtattccaccatttggtcctccctgatgtctcctggcacctttccttcttcagtctcagcactctgaagaagcgtgcttgtgagcgccgcgggacgaaccaggatgtccaggattgtggacgatcctgttcttcccatctgtgaggtaaggcagattaggaatgtccacgtctagcttgaatttcacatccagccattggctgccaccatggccaggggcttctgcagatggatcaccgtttccctcccaggagcaggcaggtgtccagtatcagccccagaacatcccggtcacccatctccatagggcttggatgacatgatgatgctctctgtgcctctgaggacggcgccttgggtctttgtacactaaatcccaccttgtcctctcctctatttgaaacagccatttcccaaatcccaatctgatgaaatcctgttcttccttccctcatgtttctctaggcctcctgtggactcccagaatgtaaagtcagcattcccttgagccttttggggacttataagcacatggcccaaggtccacctaactctaggtgtatcctgtagaaccagtattctaatcctaactttaaagatcttacaggaccatagggtgtgcgtaaaaagcctgctgcaaatcagagtgcttcaactgcgtattaatgagatggaggaaagaggctgtgagtgcagacaatgagtccctgagtaaatagactccagagccaaaggtgttctccacaccgaaagaatgactgtacccagggaaggagctcagactcacctggacaaaccctgaggggacagccatgttccagtgtggctaggagggtctggagctgggcacgtcccccatgtctgcttgattcccctctggccgagttctactcaggtgagttgtgctcattcttgcttccccagggcctggatcacagttcctcaagctttgggatacaaacgaatcacctgggatttggataaaatgcagattcgtgttcagcagccctggcattctgcatttctcatgagctccagggagacgctggtgctgctggggcaggaccacactttgggtggcaagggcttggcaggcaattccaggtgtcaccctagagatggcctgctattgcactgtcagtaggtagctgccacagtgacggccgctccagatcaaggggaggaccttttgaaaagggtccttgaatcatttgggaaataaatcaagccatatgagtaaaaagtaatcaaaaaatatgttgaatattggaaccagaggaaatcttagcatcattttgtaatgactccctccacgaattttccagataaggaaactgacaaagccaggtggcctgtggctgaggagcgagacggtcagcgaggtctccctgctgcactctcgtgcacttccacagtgaaaccctgctgagagacacaggaaatgttgaacatagtgtctttaaaattaagactatgactgccctaaacatttacaaagcacaaaccatgagaaaaaagcctgtaccagaaatcagaagatggcttttgtccatgtgcaaccttggacaagttaattacttatcgctgctctctgagcccgtttccccactggttaccgaaaaaatagaaaaggatatgcctgcccttcctaattcacagggcatcgcagggaggtaggtagttaatatgctgaaccacttcaaaacggtggagctgaactcacagcaggaaccctgtcacacctttccatgacaaggatatcagtggggtgagggaggtggggagaggcatgaggatgggagacaaaggagtggggtggggggcgggggaaggaggaagccagaaggacaggcccaggctaggctctgaagtcagcaggtgagcgaggtagagaactagcagcaccactgtccatggatatttgcggtgatggaaatgtactgtatccatgttctccaatatggcagccactagccacatgtggctatcaagcgctagaaatgtagctagtgtgatcgaggaactgatctttaatttttctttaattgttattaatttccatttaaatagccacatgtggccagtggcttatgtagcaaagatctagatcatttgtttgaagcagtaaaaagagaaatgtgaatcccctcttcttacctcctataacatgctaattaacatcactgcaattaaccaccattcacagctcttcagctgctctgtggaacctcagcccactctgaaatgaacagccgcagtggcaggggttacagaatgggctgggagtggcaatgtagatttatctcttcacacactctatgccctctatcaaaaatgcctcaggctgtgtaaaattccacaaataataaagagattttaaaaatgtg

SEQ ID NO: 356 - DNA, 4015 bp, Homo sapiens
gataagaaagcaaaacagcattcttgctgctatggggaaagtttaagtggtcttaatagaagatcaaaccagccacaatagtctgttacacaatagtctgttgccaggggtttggtttagcacagctacttgccacacagaaagccaatcactgagatgagtattgccagggaagaaggctttaattgggtgctgcagccgaggcgatgggagctcagtctcaaatccatctccctgactaactaaaattagggatttatatagcagggaagaaatgtaaccatgtgtgggagaacaggaattagggaggggtaaggaagaggaggtactcagcagcaagcagctggtgggttaggcagtcacaatgggtgaagggtctggcctctcattgtccagatgcaatgatctggtgagtttcagttccttgatactgtcttggaagcctgatggttggtttctggagaaaggaactcaaaaaagacaaatgtaactttctcaagtttcaagaccagaagggtcagtttctatgtttattcaaattaaatcataaacatcagttctatgggaccattgagcctgtttcaattcccttaaaccaaagcctaatccagagcagggccctaactctattcaattctgtgaaggctgaaataggtgaggaaactggagaggaaaagtttgaggccagtagaagtggggtcatgaagtttaaggtaagaaacctctgtaacaaaagagtgcaaggtgaagcaacaagtgctgatggacaagctacaagctatccagaagatctaagataattcatgaaagtagctaaacaacatatttccaatgtagatgaaacatcttctgttggaagaagatgccatctaggattttcatagctagagagaagttaatgcctgactttaaagcttcagagaacagggtcgggcgtggtggctcaagcctgtaatcctagcactttcggagcccaagacgggtggatcacctgaggtcaggaccttgagcccagcctggccaacacggtgaaaccccgtctctactaaaaatacaaaaattagccaggcatggtggtgcatgcctgtaatgccagctactcagaaggctgaggcaggagaatcgcttgaacccaggaggcagaggttgcagcgagctgagatcgcgccactgcactccagcctgggtgacagagtgagactcattctcaaaaataaataaataaataaattttttaaaaagtgaagcttcagaaaacaggatgactgtcttgttaggggataatgcagctggtaactttcagttgaagccagtgcacattcaccattctgaaaatgctagggcccataggaattatgccaaatctcctctgcctgtgctgtataaatggaacaacaaagcctgcacatctgtttacagcatagcttactgaatattttaaacccattgctgagacccattgctcaggaaaaaaagaaaagattgccttcaaaatatcacatctcatggaccatgcacttggtcacccaggagctctgctggagatgtacaaagagaatcacgtttcgatgcctgctaacacagcattcattttgtagctcatggatcaaggagtaattttgactttcaagtcttattatttaagaaatacatttggtaaggctatagctgccataggtagtgattcctttaagagatctgggtgaagtaaattgaaaccttctggaaaggattcaccattctagatgccatcaataacattcataattcctggaagcaggtcaaaatatcagcgttaacaggagtttggaagaagttaattgtaaccctcacagatggttttgaggattccaagacatcagtggagaaagtaactgcaaatgtggtagaaatagaaagagaattagaggtagagtctgaagatgtgactgagttgctccaatctcataataaaatttgaacagatgaggagttgcttcttatgaatgagcaaagaaagtagtttcttgaggtggaatctactcgtggttaagatgctatgaacgttgttgaaatcacaacaaagaatttagaatactacatcaacttagttgacaaagcagcagcagggtttgagaggatttactccaattttgaaagaagctctactgtgagtaaagtgctaccaaatggcatcatatactacagagaaatcttttgtgaaagactgaattgatgtggcagatttcattgttgtcttattagccaccccagccttcagcaaccaccattccaatcaatcagtagtcatcaacatcaaaaagatattaagtcactgaagactcagataattgttaacactttttagtaataaagtatttgctaataaagtatgcattttgtttttctgatgtaattctgttgcatacttaatagactatagtataatgtaaacataacttttatatgcactaggaaaccagaaaattcgtgtaactctattacaatattcattcactttattgcagtggtctggaaccaaacccacaatatctccgaggttttcgtgtgtgtgtgtgtgtgtgtgtgtgtgtgtaaagaaagatagagaattgactcatgcgattgtaaaattggcaagtctaaaattagcagggcaagctgacaattctggtaggagttgatgttgcaatcttttttttttttctctttataaattttaacttttagattaaggggtacacgtgcaggtttgttacatgggtacattgcacgacactgaggcttagaatctaaatggttctgtcatccaggtattgagcgtagtactcagtgggtggtttttgagcccgtgatccccctgcattgttgagtagccccagtgtctgttgttcccatgcttatgtctatgtgtggtcagtgtttagctcccacttataagtgagaataggcagtatttggttttccgttcttgcgttaattctcttaggataatggtctccagctccatctgcgttcctgcaaaggacatgatttcattcattttatagttgcatagtattccatgatgtatgtgtaccacattttctttatgcagtccactgctgatgggcacctgggttgattccatgtctttgctattgtgaatagtgctgtgatgaacatacgagtgtgtgtgtttttgatagaacgcattattttcctttgggtgtatatccagtagtgggattgctgagtcaaatggtattatagttctgttttcagttctttgagaaatctccaaactgctttccacagtggctgaacaactttgcattcccaccaacagtgtacaaacattcccttttctgcacagcctcgccaacatctgttacgttttgactttaataattgccattctgactggtgtgagatagtatcccatggtgattttgatttgtatttctctgatgattagcgatgttgagcatttttccatgtttgttggccacttacatgtcttcttttgagaagtgtctatttatgtcctctgcctattttttaattggattgtttttgcttgttgatttgtttaagttccttgtagtattgcaatcttgagtctgaagcagtctagagacagaattctttcatattcaggaagctgagtcttaaggtcttcaactgattggaggaaacccagcatgttttaaagggaaatctacttttttcaatgcctagtaatttaagtgttaaccacacctaggccaggcacggtggctcatgcctgtaatcccagcactttgggaggccgagacaggcagattacttggggtcaggagtttgagaccagcctggtcaaccagcctggccggcatggcggagccctgtctctactaaaaatacaaaaaattagccgggcgtggtggtgggggcctgtagtcccggctattcggagggctgaggcatgagaatcgcttgagcctggggggcggaggttgcagtgagccgggatcgcgctgctgcactccagcccaggcaacatagactccttctc

SEQ ID NO: 357 - DNA, 3425 bp, Homo sapiens
tgatgcatgtgaaacactcagcaccttgtcagacatgtggtaagcactcaataaatgttagctattaataagaacaataaaaatatttttaaactgctatcctcttcagaattttaacaaccgtataaagagcagaatgccaaactcagcatttataagactattaaatcctgccactaaaataaattctgtaggccttgtagcacatctataaaaaaaaaaaaaaaaaaacctggtaatgacagtgaattatggtgtgtgtgggggtgtctagctaatcaggacagctgatgccaccttccatgctaatgacattacacacagaaaaaatgtgatttaaaattcttttttttgtttctttctttcttgttttttttttctttttaattatattttagttctagagtacatgagacggagtctcactctgtcacccaggctggagtgcagtggtgcaatctcggctcactgcaacctccgcctcccaggttcaagtgattctcctgcctcagcctccctagcagctgggattacaggcgcctgccaccacacccagctaacttttgtatttttagtagagacggggtttcactgtgttggccaggttagtctcgaacgcctgatctcgtgatccgccctcctcagcctcccaaagttctaggattacaggcgtgagccaccatgcccggccgtgatttaaaattcttaagccacttttgccctgtaaagttgggctcagtgagttcaccagtccttttgctgtgagttacttcacaaatgcatgtgtatagctcctggctttcttcagaatctcatctcctctctgaatcctaagtataccttatattcctggaagctcagggtaactgccacttcagcttgatgctgaagtattttctctcactaaatgaacagtttttgcccagctggagttcttactaagagagtttcagactgtttttctcatttccatgcggcaagtgtgatagaacctttcacatcatggagctgagccacagtcaatgtgagactgtgagattatactctggaattgatcctgaacttttcttttggccaagagccattgctctttagaatatatcactcttccaagagcattacaagttgaccttccttgagaggtcatttttcttaaggaaacagtgatttcattgcttcagatggcccagtagagatggtggaagccatgctggatatggaagctgggtctccagcttggctccccactcgttcactctctcactcaggaattcactccctcagccagccttgcagtctacccaaaccagctgcatgccttggaaaaattacagattgtcacctgtcatggtccctggaaacagttaaatcatgaattttaagtccattactgtcaacgatgtactatataaatgggtaaacttttgtcagtttctttctcccaattaaatgttatatagcaagatttgctggtagggcacagggaccctaaaagagcttaaacaagaaaacaaataaaggatatgaaataaacactaatgatcactgtcactaggacctcacatttaatgcatccccatttctattattcctgactactcctgcttatgggtctggaacgttgggaagccactgcaggactggtttacaggcgtctaatgggatgaaagcgtatggatttgagttccaaccaagttagtaaaagtggttcatcagtgatcctcctctggattgtggacctggtgggcttcttctgaaccgtcagaccaaggaaagtcttacacacactgtttcctctatatcctcttctacaaaatgattgtgtatttttcaggttgcactctgcactgggttactagaaatacagtaggttgcactgatgatttaactctgttttctataagggctacgggatctcatgcagatttttgcaaagttatatgcaaatcacagagcccggcccttttcttaacaggatggcaaccttgttcctcggtggcacctgggacctggagatcctttctccacttacgtttagcgcgcatcctgggacttgtccctgcagctcaccgggttagccgtggcaccgttgggacctcccaccaggactccaatcacccacctctcttgagacttctctggcagggctggtgtggggtgcagcctttgctcagagggcaacatgttccaagcaaaatctccccgcctgggccatgggctcaccctcggggctcccttcttctctactgggtgcaattcgaggttgctgagcttctctccaaagtctaaaatggtggggcagtagggacctgtgagaggcccaatggcccaatgtacttcccccagatcccactcagaacagcaggtacgcccaggctcctgctgccctagaggtctgcaacatgagtgaagaggttaattagagggacacacttatctctgaagtttttctccaggctgaacatttctattatcagtggcccctaatctggaaaaacccatcattctaatctagcttgtatccccacatcatgagaaagagggaagaagaagaagggatgatgtgtggtagagaagatgagggttaactttagcctttcccaaacactggcaacaaccacttcctcaacaatttttctatttgcttcagcctactcagattttttcaggtttttctagctcctccataacctcactccctcccgaggtctctggttcaaagaccaccctaccagcccctatttgcttcaggttatcctgttgagggtgggtgggaagagtgagaagatataaatgaaaaactggccacatgttgataattgttgaaactagatgatggtacgtggacattcattataccattctccccacttctgtatttgtttgcaatttttcataataaaaaagttttaaaagtcctccagtttccaacacactcaagagagagccccaaccccaaacacagagtttcatggaaaccccacaccaaggcaagaggcagagatgatgattccatttcatatatacactcattttctaactttttttaaaggcccactgctttattttcaatagattaaacctgatttctgagaggtcctgaagttgggcttatttccctggctgggttatgggggagggcagggtaaagggatccttaaaaaattttacacttctatgtatctcacaatcttattgtgaggatgtgacttgttcagtgttctgaacttttcgaaggaatcgtgctctcaatgcaaagtgtcattctctggaattgcacctggctcaggaaaggactgtctttgtacttgaatttaaatccaatggagaactttaacacgggcatttgcatgactgagaattgctgctgtcttttttccgtatgtcactttcttgaatgtgttctaataaaatgattctaaagc

SEQ ID NO: 358 - DNA, 3661 bp, Homo sapiens
accgtaagtgctgtgatgcactaacctctaggtgctagaaccctgcacggcactgagtaagtactccataaatgtctatcaacttagcaagttagtgagtgatgctctattgtggacccctgaggcagtggctcctgaaggaggacggggccaccggcagagcagggcactcagaggggtcccctgcccggggagcatgtgccagaggagggggacatccctaaggaacaggccagaggacctgagctctccctggctgctctggaaggcggaggccccccagtttatccagtccctagagcaccccaggccagatctggggtgcgcctggcttggaggccatgtccttgctgccgcctctcctggggcctgcgtctgctcccaccctgccgcatgggccttagcaatcacttagccaggccgtgctgtggggccaggtcctccagctcataagtggcagccgcctctcagctccatgcccttcccaccccatgtcttggcaggtgagcacctgcacccaaggctcacagatgcttcagcaccaacctcattctttagaaagagtttgggggaggcttcatagattgaacacccgtccctgtagcacttgatcatagcaagacaaaatgtaaaacagcagatgaggccatggtgtaacgaactcccacacacacagcctgcagctgccctggggcccaggatgctggcccccaaaggtctgtcccagaagaggcattcgggaataagagtaacagcatgcgctctgccccagtcacttttctgagcactttacttgcattgggtgaatagcattatcatctccatgtcacagatgaggcaaccggggcacaggaagaataagtaacttgtccaaggcaacagagctaggaaggggcagagccaggtttgaacccaggaggctggctccagactgtcctttgccacctgggagggagctcaaggggctggggtgatgggctcccggctcctcccagggccccgctgtcctgatacctgattttcctccaccccgtccctctctccctcactcaggccaccagtgacttctgtgtggctcctgacaccttcatcctgaacgtcacggagggccagatcagcacagaggtgactcgctactacctgtattgcagccagagtggaagcagccccttccagcagaccctgaccaccttccagcgcgcactcaccaccatgcagatccaggtcgcggggctgctgcagtttgccgtgcccctcttctccactgcagaggaagacctgcttgcaatccagctcctgctgaactcctcagagtccagccttcaccagctgaccgccatggtggactgccgagggctgcacaaggattatctggacgctcttgctggcatctgctacgacggcctccaggtcttgctgtaccttggcctcttctccttcctggccgccctcgccttctccaccatgatctgtgcagggccaagggcctggaagcacttcaccaccagaaacagagactacgatgacattgatgatgatgacccctttaacccccaagcctggcgcatggcggctcacagtcccccgaggggacagcttcacagcttctgcagctacagcagtggcctgggaagtcagaccagcctgcagcccccggcccagaccatctccaacgcccctgtctccgagtacatgaaccaagccatgctctttggtaggaacccacgctacgagaacgtgccactaatcgggagagcctcccctccgcctacgtactctcccagcatgagagccacctacctgtctgtggcggatgagcacctgaggcactacgggaatcagtttccagcctaacagactttcgggggttcctgcctcctttttccgttctggtttttaattagtgcaaatacaagctgcgtttctttaatagaaaccaaaggcatctggagcccgagaggcctcctgctgtggcagaggagcagctgggattcccgaccaaagccccagggggtgcagaagactcaccacgcgggccagcctctctcttttgccctgctctccacaccagaaatgcccccaggtgcttggctgcctcagaggtaccatccctgagctggctgcctggccctgctcacccctacgcctcgcccttgccaggaggggagtggcagtgaggagggggccaggtcaggcaccaccatcaagagagctgtgtgttctctctggtcccacaacgatgactctgcctcttgtcagcccagccaagagcccagacgacccctctgtcctcgttccctgtcctcgttccctgcaggtaacatgagaagggctgatcaggagatgctctttaagaagttcgcacccctgctgacaccagaacagcccaaatcagagttcccagggccagacaggctcttcctgggccacagaggggaggcatcaggaaagctctgcagtggggggctggtggctccggggctgggggatcacaggctggtgaaccccggtgggaacagaggtgaaagcctgccacattccgcctgtctccctaaccctccattgcctcgcctctattccagaatcaatgctgcagaatgtgttagctgcagataggcatggtctcaggtatgaacagacactttgaaacgactttaggtctttcttttctccagtgttttaaacatgttgattatccaaagaattgaaactcctagcacatccagtttttacaacagatttgcagctcattccttaccctggttaggtcactacttttgcagattttgctggcactgatctggagatctgcagatctggaggagacgggaaggagtcgattcttaaataaggatcagtgaggcatcctgtcccaagctactgtttggtggggatctgggttcatctcacccacagagggaggatctttaagaggagaaaaaagccaagagggaaagccagagttccctgttctaggggactagccaaatgcctacatcagctgtcccctccctgttgtctccaagtaagtttgccagaaaaggttttagcaaagtgctacaactgtgtctttataggaggataggcctctgccctgccccacccccaccacctgtccccacccagtgtcccaggccacaggagcttattggccaggagggaataatgtcccccaatactgcctgttgagggaccagagttggggtctttggtgcttccaacctcctgccaacctggagttcacaacaccagagccccacggcctcgcacactgaagcaggggcctgcggtgactcggtgcttctgttttggaagaaccacctgtcatcaaaacatggacagcagggtgttctcagctcccagcgaagcctccacaacagaatggggccacagggcagccgggactccctgtctcacctacattaacccatgcataccgtatgccataaactcactttggtatatccgcgtcacatgcagagaggaactctgcgacgtcaaagtgttgcttcttaaagtttcattattggcaactagagggttgtttttaatgcatggaaactaaacagattcctcggggagttcctgaaggaaccaggtgggcaaacctttgcttatatacatgcggcctcacctggaagagaaataaaccacttgtact

SEQ ID NO: 359 - DNA, 3089 bp, Homo sapiens
cttaaagatgcttttttcactattcccctgcaccccttgtcccagcctctctttgcttttacctagactgatcctgacacctatcagtctcagcagcttacctgggctgtactgccacaaggctccagggacagccctcattacttcagccaagctctttctcatgatttactttctttccatccctccgctgctcaccttattcaatatattgatgaccttctactttgtagcccctcctttgaatcttctcaacaagacatcctcctgctctttcaacatttattctccaaaggatatcgggtatccttctccaaagctcaaatttcttctccatccgttacctaccttggcataattcttcataaaaacacacatgctctccctgctgatcgtgtctgactgatctctcaaaccctaacaccttctacaaaaccacaattcctttccttcctaggcatgattggatactttcacctttggatacctggttttgccatcctaacaaaaccattatataaactcacaaaaggaaacctagctgaccccataaatcctaaatcctttccccactcctcttttcattccttgaagatagctttagagactgcccccacgttagctctccctgactcatcccaacccttttcattacacacagccaaagtgcagggctgtgcagttggaattcttacacaaggaccaggaccatgccctatagcctttttgtccaaacaacttgaccttactgttttaggctggccatcatgtctctgtgcagtggctgccaccgccctaatacttttagaggccctcaaaatcacaaactatgctcaactcactctctacagttctcataacttccaaaatctattttcttcctcacacctgatgcatatactttctgctgcactacactacctctcagcaagccaaactcattgccttaactcaagtcctcacccttgcaaaggaattatgtgtcaatatttatactgactctaaatatgccttccatatcctgcaccaccatgctgttacatgagctgaaagagatttcctcactatgcaagggtcctccattattaatgcctctttaacaaaaactcttctcaaagctgctttacttccaaaggaggctggagtcattcactgcaagggccatcaaaaggcatcagatcccattgctcaggacaatgcgtatgttgataaggtagcttaaaaagcagccatcaaaaggcatcagatcccattgctcaggatgatgcttatgctgataaggtagctaaaaaagcagctagagttccaacttctatccctcatggcagtttttctccttttcatctggccactcccacctactccccaactgaaacttccacctatcaatcttttcccacacaaggcaaatggttcttggaccaagggtctccttccagcctcacaggcccattctattctgttgtcatttcataacctcttccatgtaggttacaagccgctagcccatctcttagaacctctcatttcctttccatcgtagaaatctatcctcaaggaaatcacttctcagtgttccatctgctattctactactcttcagggattactcaggcctacatatcaagctcggggccacccaggactggaaaattgactttactcacatgcctcagtgaggaaactaaaatacctcttggtctgggtagacactttcactgggtgggtagaggcctttcccacagggtctgagaaggccaccgcagtcatttcttcccttctgtcagacataattcctcggtttggccttctcacctctatgcagtccgataacggactggcctttattagtcaaatcacccaagcagtttttcaggctcttggtattcagtgaaatctttatatcccttaccgtcctcagtcttcaggaagggtagaatggactaatggtcttttaaaaacacaactcaccaagctcagccaccaacttaaaaaggactggacaatacttttatcacttgcctttctcagaatttgggcctgtccttggaatgctacagggtacagcccatttgagctcctgtatagacgttcctttttattaggccccagtctcattccagacaccataccaacttggactgtaccccaaaaaacttgtcatccctactatcttctgtctggtcatactcatattcaccattctcaactacacataaatgccctgctcttgtttacagtgccggtttacactgtttctccaagccatcacagctgatatctcctggtgctatctccaaaccgccactcttaactccttcttaaagtaaataaataatctttgctggcagggctatgctgaacctccttgggcactctctaattagatgtactgggtcctcccaattcttagtcctttaatacctgtttttctccttctcttattccttttagttttttaattcatgcaaaaccatatccaggccatcaccaatacttctatacaacaaatgtttcttctaacaaccccacaatatcaccccttaccacaaaatcttccttcagcttaatctctcccactctagattcccacgctgcccctaatcccgcttgaagcagccctgagaaacatcacccattctctctccataccaccccccaaaattttcaccgccccaacactttaccactattttgttttatttttcttattaatataaaaagacaggaatgtcagacctctgagcccaagctaagccatcatatcccctgtgacctgcacatacatccagatggcctgaagtaactgaagaatcataaaagaagtgaaaatggcctgttcctgccttaactgatgacattaccttgtgaaattccttctcctggctcatcctggatcaaaagctcccacactgagcaccttgtgacccctacccctgccagctagaaaacaaccccctttgactgtaattttcctttacctacccaaatcctataaaatggccccacccctatctccctttgctgactctcttttcagactcagcccatctgcacccaggtgaaataaacagccctgttgctcacac

SEQ ID NO: 360 - DNA, 3921 bp, Homo sapiens
taaggttgctggattaaagagtacaacaggggtaaataacgtgtatcttcggtcttaaagacgttgccaaattgccctccattgaatttacaccaatttatctcctccagcactggataagaattctaatctcagcctttttagtgggtctcagtcttcattggtctcttggatgcttggtatgtggttgacccttgaacagtgcaggggttagtggtaccaaccccctgtactgtagaaaatccacatagagttttcactccccaaagacttaagtactaatagtctactggtcaccttactgacacctaagcaataacctacacagtctattaacacatattttgtgtgttacatgtattgcatactctattcttacaataagctagagagaagaaaatgttattaagaaaatcataaggaaaatatatttactgttcatgaagtaggagtggttttcatcgtcatggccttcaagttgagtaggctgaggaggaagaggaggagctggtcttactgtctcagaggtggaagaggtggaggagctggaagggggaggccggagaggtaggcacactcagtgtaacttctattgaaaaaaatctgcatataagtggaccctcacaattcaaactaacatggctcaagggtcaactgtattgtgagttgaaaaggaaaaggaaggcaagcaatgaccatgttccagttaccgaagacatcacatgtaaatatcctaacagcagaggtgaggtaggttttctttaccccattgtatagatgagcaaacaggctttgtgtaactttttcacagccagtaattggcagaggcaagctttgaatccaggattacctaatatcaaactgctgttctttcttccccagtagtgccgagttccttgaagaaaattattttatggacaatgtatgagtctgttttcgtgctgctgataaagacatacccagactcacagttctacgtggctggggaggcctcacaatcgtgatggaaggtgaaagacacgtcttacatggccacagggagaatgagagtccctgtacagaaccatcagatcacatgagacttactcactgccatgagaacagcatgggggaaaccgcccccatgattcagttatctcccaccgggtccctcccacaacacgtggaaattatgggagctataattcaagatgagatttgagtggggacacagccagaccatatcagacaagaatcatcttctcaaatttggggtgcgtggctgagtgcacacacctgtgaaaactgcgggatgaatgcattacaacttcctggaacaagtcattttacctaagtaattggaaggggaaagccaactgatctgcttatctgccctgccttaccagctctctgcccatctctcagtgtggaccctaaagggggaggaaaggatgccttctgcacgggggaaatccaaatccaaggcacctataacatttggggacttagccatctacttctcccaggaggagtgggaatggctgagccccattcagaaggatttgtatgaagatgtcatgttggagaattaccggaacctggtctcgcttggtctttcctttcggagaccaaatgtgatcaccttattggagaaagggaaagcaccctggatggtagagccagtaagaagacgccgggctcctgagctcactgaggcctccccagaagccaaggaggtgccagcaccatgcttgtacagcctactgaaccaggagccaattgaacctcttttgtttataaattacccactcaagtatttatttatagcaatataggaacttcctaatacaaacagactcgggttctaaatgtgagaccaagaagttacctccaaatcaatgcaacaaatctgggcaaagcatctgccagaaactagtttctgcacaacaaaaagctcctacacgaaagagtggctgcaacaaaaattcagtcctagtaaaacttaagaaagggcattcagggaagaaacctttaaaatgtaatgactgtggtaaaacctttagtcgaagcttctctcttaaacttcatcagaacattcatacgggagagaagccttttgaatgcagtaattgtagaaaagctttcagacagatctcatccaccctacttcatcagagaattcacagtggaaagaaaagccatgaatgcaataaatgtggggaaagcttcaatcaaagaacaacccttattctacatatgagaattcatgatggaaaggaaattcttgactgtgggaaggccttgagtcaatgtcagtctttcaatatacatcagaaaattcatgttgttgggaatgtctgccagtgcagaaagtgcggaaaagccttcaatcagatgtcatcccttttacttcataagaaaattcacaatggaaagaaaacacataaatataataaatgtgggagaggcttcaaaaagaaatcagtctttgttgtacataaaagaattcatgctggagagaaaatccctgaaaatgcgaaggccttaagtcagagtctacagcaaagaagtcaccatttagagaatccttttaaatgcagaaaatgtgggaaattatttaataggatttcacccctgatgcttcaccagagaattcacacttcagagaaaccgtacaaatgtgataaatgtgacaagttcttcaggcggctttcaacccttattctgcatctaagaattcataatggagaaaaactatacagatgcaataaatgtgagaaggtctgcaatcggcattcatcccttattcaacatcagaaagttcatacaaagaaaaagaaactatttgagtgtaaggaatgtgggaagatgttttctggaactgcaaaccttaaaatacatcagaatattcattctgaagagaaacctttcaaatgcaataaatgtagtaaagttttcggccgccaatcatttcttattgaacatcaaagaattcatactggagaaaaaccctaccagtgtgaggaatgtggaaaagccttcagccaccgaatatctctcacacgacataagagaattcatactgaagatagaccctatgaatgtgatcagtgtgggaaggccttcagccagagtgcacacctcgcccaacatgaaagaattcacactggagagaagccatatacatgcaaaacatgtggtaaggcctttagtcagcgcacatctcttattctacatgaaagaagtcatactggagagaaaccctatgaatgtaatgaatgtgggaaggcatttagcagtggctcagaccttattcgacatcagagaagtcattcttcagagaaaccctatgaatgtagtaaatgtgggaaggcatatagtcggagttcatccctgattcgacatcagaatacacattctgaagaaaaagcctaaggttgttttaaatctataaaatcaacgaatgaggctatcaaacatatggcaaatatgtatttgtctataatgtaaattttgtgtatatgggaccatttgatgatatgtcccactttgaaagccaaagagcaaaagtcattggtgattttgacctcaggatttgaaattaactgaaggaaactcagaagtttggtcagtcattgtgaatgaagatcatttttcatttgataagaattactggctgggcgcagtggcttacacctgtaaccccagcactttgggaggctgagacaggcggatcacgaggtcaagagtttgagaccacggtgaaaccctgtctctactaaaaaatacaaaattagctgggcgtggtggtgcgcacctgtaatctcagctactggagaggctgaggcaggagaatcgcttgaacccaggaggtgggggttgcaccgagcagagattgcaccactgcactccagtctgggcaacagagcaagactctgtgtc

SEQ ID NO: 361 - DNA, 3771 bp, Homo sapiens
attgtgagaagtttttatgctgctctgggtcatggcttggagactgcctcctcagagcttaaatgggcagatttcatattcttcccatccttgggaatacttcataaaacagaattacaagagtccatgtttttttcggagcaccgtgcagtgggagagcctgtcttgccttttttttttttttttttttttgctgtcgttttatacaggtatttttttttctttctatttcttttttcttttactttttatttcctctttaaagaaaatgattggcagcactcaacctcaaggaactgatctatcaaaaccaagctgggataagtatttctttgagaaataatatatatttaccaacaggctctattctgcccccttgtttcacagcaccttgaatatcacttccttttcctgcccaaagcaggaggtaaccctgtattaaaagcatagtaggtgtgtgtgtgtacaatacacacatacagcacacatgtctctatttagagattccatgatatgtgttctatatacactttacagtcccttttcttaatgtcaaaaatataatttccagcgtctaaagagtgttttcaaagacttttgccctattttttaaaatagtgtctaaatatgattaagtgtcttcccagagaaaagtcaaagaggctcctagtgttaatttccatattgcttaagacttaagcttttaatttattttatcaaggttgagggagtatagtaattgttggaacaacgcccttccaaaagaaatcgcctgcacttgtttttaagttcaatttgttttctcacacagatttttgatacactcttaaataaactagaaatcacaattattttaatgtggcagagttgtaaccaggaaattgcatatattttcataaactaggctgttatagatttattaatatttattaataacattattttaagaaatttttttaacgtctttcaaccctgaaagggcctgcttgaaacatacacggcagcaaaatcactggagtccagggtttttgtcacacacacacacagcacagatttttttgattatgtagatttcttttcctactgcagtttcatatgcaaagcatgcatcagccacatccatgctatctcctaaagcagtcattctgaaacccaatctggggacagtgcagactaaataaaatttcattttgatttggcctcccgctgcgaatgggactgctttgtctcagccgacagaaccagcaagccagaaagggaatgaagacatttggagaagaagcgtttactgaaaggagattcctgggctggaggaaaaccatgatctacagttcatgttgacagatattgtatttttggtcctagatctgacttttgaaatgacttatcacaaattcaaatttagcaatcatgagtgaagtacccacgatgtgctaagcatctacctctgcagatagaagaacacttactgttcctgagcatgggagggaatagaagttcctgggtcctggcctcacctcatcaggcactgccaaatttgacacctccttcctgttcacggcagtcctttgcgatagggtattagatgccaccaagtagctgcataactcacccatttggtcagagcctgggtctaagccaggtctgacagactccaaagcaagccctgtttacagcatgactgggatccagtgggtaagaccaacctgtcaatgcccaagtgcagatgcaataatagtgcttcaactgattgttgcaaacccctcatgagggatgccaaatcccagtgcagatggtaacacaggctatttttcacctccaacctctaatatcctttctttctttctttcctttttttttttttttttttgagatagagtctcctctgtcacccaggctggagtgcaacagcacgatcccagctcactgcaacctccacctcctgagttcaagcgattctctcgcctcagcctcccgagtagctgggattacaggcacccgccatcatgtccagctaatttttgtatatttgtagagacggggtttcaccatgttggccagactggtcttgaactcctgacctcaggtgatctgcccgcctcagcctcccaaagtgctaggattacaagtgtgagccaccacgcccggccccaatattctttcttactagacactgtgtaagctaattattcagcaagtattttgcactgaactctaaataggtaagtattttgtgtccattttacagacaagagaaataaaataggtaaagtatttccccaaagctatgataaatgaatcccatagctagaaatggcagaaaacccatggaaacttctatggggagtggatgtctgccttaccttggcacaatgcttggttctcagatatcatttcagtgacattgccaaatgggagaaaccatgtctggtacacgggactcaagctgcctcaaaatatcctgaatgcattttttcaggggagaaaatccatttgaataagaatagctagttatagcttattatgtgccagacactattcaaagtgtttaatgtgtattaacttctcaaaaccactctataagttaggtactatgatttccatctccattttacagacgagggaactgagctgtcaaaactaagtgacttgattgaggccatgcagctggcgaggggaggaccaggatctgaacccaactgggtctcccaagcctgggccactgaaccatttcacctcttggaaaaacttaatggtctgagtggcccacccagtccatggacagcatggagtggtatggtggaagaggagggaagaaaacctgtgtattgtaagtcatattcttctatggtgtgaaggttaacgtaagttttaagaaagttttttttttaattttattatatgatcttgctctaaagggatgtaaattcagatgctgaattgcacacatcctttctctttcatattttcaatattgaacgtaatttcaatatttaacataaaacaatgagtacattgtctccacctcattgtttttgggtggtgtttgtgaggagcctgcgttctttggaaggaagacctttcagatgacctgaccagtcctcctcttcagaacccggatgctggcgaagcagtttgaattttatgcttgtgaaagggctccgttgatgattttgatgtctgcagctttccacccgtatgaccagacacattctcaccagctccatatatcaagataaggaggggaaacctggtagcttttccttctgttaactgctggcatcagctgagtgatgcagacatttctctattaagaactgagctgagactgaagcttcattttgtatgagactgtgcagaggtcgtctaaagtctctcccaggtgtggttattaagatcctggatttgaaactgtgacctactggtttgccagatgccaagaacaaatgctctgaaattgatttgccaaaagacatgatgagctgctctaacttgcctgggaagagtggaatatttaacctgtgggtgagactccctcttgctacctatcagctttgccactgctctgatagagaaacatcttgggagcagagttggtaagagtgaatcagacgtatctgccggaataggactcgtggcacctgcttgttcgatccctcatttccaccccctctatcctttgcctattgtcagtcattgtggttggtccattcagaagaatcgtgaatattcatagccaccctaatttaccaatatatattcaataatgtc

SEQ ID NO: 362 - DNA, 4592 bp, Homo sapiens
aaattatgtcgatatcccacatagcaatagtgaggatgggcgtcgcctacggaaccagaagcgctatatggctatcccgagccccctggtagctgtggagtggtggaggatctgccttgatgaagctcagatggttgagtgtcccacagtaaaagctgcagaaatggcccagcgtttgagtgggattaatcgatggtgtatcagtggcactccagtacagagaggattagaggatctttttgggttagtggtctttcttggtattgaaccttactgtgtcaaacactggtgggttcgacttctctatcggccttactgcaagaagaatcctcagcatctctacagctttattgccaagatactgtggaggtctgcaaagaaagatgtgattgaccaaatccaaataccaccacaaaccgaagaaatacactggctccacttttctccagtggaaaggcatttctatcaccgtcagcatgaggtgtgctgccaggatgtggtggtaaaactcaggaagatttctgactgggctctgaagctcagcagcctagacagaaggactgtcacctctatcctgtatccattgctgaggctcagacaggcctgctgtcacccacaggctgttcgtggagagttcttgccactccaaaaaagcaccatgacaatggaagagctgctgacatctttgcagaagaaatgtggaactgaatgtgaagaagcacatcgacagctagtttgtgctctcaatggcttagcaggcattcatattattaaaggtgagtatgccttggcagcagaattgtacagagaagtgttgcgctcctcggaggaacacaaaggaaaactcaaaactgattcacttcaaagacttcatgctacccataacttgatggaattgttgatagccaggcacccagggataccacctaccttgcgtgatggccgacttgaggaagaggccaaacagctgcgagagcactacatgagcaagtgtaatacagaagttgctgaagcccagcaagctttatatcctgtgcagcagaccatccatgagcttcaaagaaagattcattctaattctccttggtggctaaatgtgatccacagagcaatagaatttactattgatgaggagctagttcagcgagtgcgaaatgaaataaccagcaactacaagcaacaaactggcaagctttctatgtcagagaagttccgtgattgcagaggtcttcagttcttacttacaacacaaatggaagagctaaataaatgccagaagctagtaagagaggctgtaaaaaacctggagggacctccatctcgtaatgttattgagtctgcaacagtctgtcacctccgaccagccagacttcctctcaactgctgtgtcttttgtaaagctgatgaattgttcacagagtatgaatcaaagctattttccaacacagtcaaaggccagactgcaatatttgaggagatgataggagatgaagaaggactggtggatgatcgagcacctaccaccacccggggtctctgggcaataagtgagacagagcgatctatgaaagcaatactatcatttgcaaaatcacataggtttgatgttgaatttgttgatgaaggaagcacttcaatggatctctttgaagcatggaagaaggaatataagttgcttcatgaatattggatggctctgaggaatcgtgtgtctgctgttgatgaacttgcaatggctacagaacgactaagagtgcgtgatcctagggagccaaagcctaatccgcctgttcttcatatcattgaaccacatgaggtagaacaaaaccgaataaaactactaaatgataaagctgttgctacatcacagcttcagaaaaaacttgggcagcttctttacctaactaatttggagaagtctcaagataaaacatcgggaggtgttaatccagaaccttgtccaatctgtgctcgacagctaggaaaacagtgggcggtactgacctgtggtcactgtttctgtaatgaatgcatttctataattattgaacaatacagcgtgggatctcacagaagctccattaagtgtgcaatctgccgccagaccacatctcacaaagaaatctcgtatgtctttacctcagagaaagcaaaccaggaggaggacatccctgtgaagggcagccattctacaaaagtggaagctgtggtcagaactctgatgaaaatacagcttagagatccaggggccaaagcactcgttttctcaacgtggcaagatgtattagatattatttcaaaagctcttactgacaacaacatggaatttgcacaaatcagtcgtgttaagacatttcaggagaacctttcagcatttaaacgtgatccccaaatcaatattttgctgctgcccctgcacacaggttctaatggattaactatcattgaagcaactcatgttctcttggtggagcccatattgaaccctgcccatgagcttcaggccatagggagggtgcaccgaattggacagacaaaacctactattgtacacagattcttaattaaagcaacaatagaagaaagaatgcaggcaatgctgaaaactgctgagagaagtcacacgaactcatcagcaaagcattcagaggcctctgtcttgactgtggctgacctggcagacctatttaccaaagaaactgaagagcttgaatgaactacacttgattcattccatggactttagtgtattaataaactttcatagctgtagagcaaagttacaagttttaaaaacccagtagataacagtaacactgttcctagttgaatgaatttgtttattgttctggttatacagtggcttagtacttattgagtccttttcaatatactgtttccaaaagatctataaagattcttaattttacactcctaataaaacatttattttttgtcccaaatagtatctatatctgatgatgcaagggaattaagagaggtaatgtgtacttttcttatgataagatcactcataaaacagttggaataagaaagtaaactagtctagttttatatgacctggtatattgaacaaacatagatctcagttttggaagggccttcagtatctttagcacatgattcaccaatatcttgttagtaatattttaagtagatggtgaattatattaacccattttttgagtaggcttataccataactttacacctagtaattttgcagtaatacaactccttacaataagttaatgttagacagttatttgtttcttctgcatcttgctactgaaaacaaaaacaatgaaaatattcatatttctattatgtgtaaagtggtgttagtgtaaacagttaactccaaatagattttttaatgtattaatgattaccttaaaattatctgctttccctactcttaatttttcttattgttaaagtttttatatgttgtaagattgatgtatctgtaaatattgcagtttttatgattttgttttattataacatggaaatatggcagggtttttttttttaatcattattatactgatgtcttggattctttttctttcccatgttcttgtgtaactagactttttagccagtgatatctgaattcatggtagagttgttatttcactccagttgttcctcccttaagcacgagtctttgaccttttgaacaagagaatgccatgttcacataagcaaatcgttgcaagtgataataacgaagtgtttcttcctctgtgaggaattaatggactttgaaattgctgaataaggagtagcttgttacatcctagccatttgatgtaatacaaatgttcttatttggcttccttttctttgagccttcagagttttaaaggaccctctttgaccctcaggacttattagctcccagttagctgcctggaaaactcatagaaccattccctagatcccatttgtccgagaggctttggtgcttagttaaggtgcattttcttactctaggtttatagagtgatgtaattcaactgaagaaaacacacacatgcttttggtgcttattcttcagttaaaaggaggtatccattgattcttttatatgaaattaaatcaaactgttatttttatagctcttcacatattaaaaagagctttcatgtacatttacgtgtttaatttacccaacaatcttgtgaagttgatataattaatatctttactgttttaaaggtagagaactgaagttcagatatattgaaactttcttaggacatgtagcaagtaaacagtggagcccaggtcccctgactccatatcttacattcttttactaataacatgtcatgctgagattcagaaggcccatgcttataatttaaaaatgagactatttcagtatttctttgtgtttgttttctactattcctttctgagctatgttttagagaaaacaatttgatatgcttcaattttgtaaaatcaaattacatatatataaaaaaacctatctgtattagacaaaaactgtttttatttatttctgtaagatatccattaaataaatattttagtgg

SEQ ID NO: 363 - DNA, 2737 bp, Homo sapiens
atattaaaaatctgaattacttctgtggcagttatgagagcgcactccttggactgtggggagcataattgacttatagcaccaactggtgtgcattgaaacctttacttcatttccaagaaggtgtgcattgaaacctttacttcatttccaagaagacaggcttcccacgggctacactcatcaatgactgagtggaggcagcaatgcaaaggcagacctgtttcttggtgacatggagctcctgataataaactttggcttaaggactccgaaggccttactgacctcacctagaattgcactgctgtctaagacgtctccgctaaactttccttccgtgtgtccttcacccagggtacaagtcaattctacatggtagtttgacagcactcccagcctctcctgactcccttcttattttcccttatggatgttacctctaataaatctctgtgcagctgatctctctcatcttgatatctgcttcttggaggacctgttttaatactagcaccttcaaagctaagacagtattatgggcttagtttaaggctaactggtactcatgagtgtgcattttatattgtgctttgagctaactatgtaattgtgtctttcaacaagctagactcaaagtgtagaactttaaaacaactgtttgtcttctactgccccttcaaaattgtttttagaatttgttcttcccaccatcttagatgacaacttgagcagatcccactgacttttattctcagatagcaaaaatgtcctttgaacacttccctaaagtcttagttcatcaattaaagcgctcactcctataaaataaacaaaaatctattaaagttttgttacaattctctctctcccccagttaaggcctgtgcagctatctctgagttttggcaagtgttatagctgagccattctctttggggttgttggggaaacctgtcatcacagggggtctctcacacctgttccactgatatggccaagtacaaagtgattcagacattttaactgcaattctcccttatccctgaggtatctatcctaatagcttcagcatctttctggtgaggtatccaaacccattctggtggcctctctgtgcaacatctaagacaaccccacacagattctcacacaggtatggtccacatttcttccatggaaaataatgcacatcatttgtccaatgaactctgggcatgcaggctctcccaacatggaagcctcactacagaacaccatccaccccagcaggcagacagttacagtctctttttctttagatttctcaggcatcgtgtctctcaaactctaggacatacaacatacaaatcaaattctgtatcagtccatttcatgacattctccctaggcttaatggttgaaaaaggatctcctatttcccatagatcgggttgtagtggggtaagcaggaccatcattacacagcattctctccaaaattcctctaaactccaggatccttcttggttactccaaccttacaaaagctggagttgaattttctgttccatgtccatgtcaccaaactaatgttaagcaaccttctctacttttgtggtcccactttgcagcatgaaaatagttggcacctattcagtagattgatattcagtttgtggtcttagtaccagcagcagcttcacctggtagcttgaagaaatgctgaatcttaggtctcatcccagacctactgaatgggaatctgcgtttttacctggtgcccaggcgatttatattcacagtcacttttgagaagcactagcttagagtactcggacgaaacagaaataagaagtaacccattttaacattctgttacaacagtattattcaacaaatttatcgaccactattaggttcaagacatattcaaaaggcttacttagtgtctcatagaaaggattagtatatattagtagttccatgggattttagaggggaaagattattttatgaccagagattcagaaagggaatgatttgactggagtcttgaaagacacacacacacacacacactcacacacacacacacacacactcttttaggggactaagagagagaagcatgttattacattttactcatccaaacagtaatgcaaaaataaaacggtagaatatgaaaagctcaggatctctcccaaggctacctactgcaggagggccaacaggtgagatgggaagaatggaaacagggaccgattttgtagctcatacaattaggacaccttaggaatagcattgtagtaatggtgatgaatatgctctgccaaattcatccagtctgcaccatcttatagctgcccagcacactcgactgttcatgtggtctctttgtagtgtgagtttggagtgtcctattagcctgttctggttaggaatgagttaacggctctttccctcaaccttagtctagtcccagggctgaggattcagctggatccacatggtcttgagggttggcatgaggagggggaagcttttttgaatcgctttttgatcacataatctgccattttaagagtaagatttgctttatggaaatcaattcattaataaaaaatgatattcaagttgcaataccatttcacagtgaaatattttgagtacaattttgttgctagaatagtcatgggcaagagttttatgcaaaatgtttcaattatgttaataaataagacaatgctacaag

SEQ ID NO: 364 - DNA, 3616 bp, Homo sapiens
agtgtatcacaaactcaagcattagcaccaacaagctctgagcatcatcagtctctggaaagccttctgaattagacaagggctgcctcccagcacagctacaaaacactttaaacctgaccagctaaatggataaacctagcctgcatagcttttaaactggggtctcatacagcccaggaggcctacttgcttcaagaactgaaaatccagaggatgaattgctttatctgggaatggcaaaagccagcacaataaggaatgccagtttgtatggggctactagctcacatgcgggatcagaatggtgtgaatgacagccgcactgtgtcatgaaggtggtggtggtttccgcacaagagaccaaataagaagaaagctgagagaggggggaaacgtttttggatgacaaaggatgggtttccatttaattacgcagctgaaaggcatgagtgtggtgctggtgctacttcctacactgctgcttgttatgctcacgggtgctcagagagcttgcccaaagaactgcagatgtgatggcaaaattgtgtactgtgagtctcatgctttcgcaggtatccctgagaacatttctggagggtcacaaggcttatcattaaggttcaacagcattcagaagctcaaatccaatcagtttgccggccttaaccagcttatatggctttatcttgaccataattacattagctcagtggatgaagatgcatttcaagggatccgtagactgaaagaattaattctaagctccaacaaaattacttatctgcacaataaaacatttcacccagttcccaatctccgcaatctggacctctcctacaataagcttcagacattgcaatctgaacaatttaaaggccttcggaaactcatcattttgcacttgagatctaactcactaaagactgtgcccataagagtttttcaagactgtcggaatcttgattttttggatttgggttacaatcgtcttcgaagcttgtcccgaaatgcatttgctggcctcttgaagttaaaggagctccacctggagcacaaccagttttccaagatcaactttgctcattttccacgtctcttcaacctccgctcaatttacttacaatggaacaggattcgctccattagccaaggtttgacatggacttggagttccttacacaacttggatttatcagggaatgacatccaaggaattgagccgggcacatttaaatgcctccccaatttacaaaaattgaatttggattccaacaagctcaccaatatctcacaggaaactgtcaatgcgtggatatcattaatatccatcacattgtctggaaatatgtgggaatgcagtcggagcatttgtcctttattttattggcttaagaatttcaaaggaaataaggaaagcaccatgatatgtgcgggacctaagcacatccagggtgaaaaggttagtgatgcagtggaaacatataatatctgttctgaagtccaggtggtcaacacagaaagatcacacctggtgccccaaactccccagaaacctctgattatccctagacctaccatcttcaaacctgacgtcacccaatccacctttgaaacaccaagcccttccccagggtttcagattcctggcgcagagcaagagtatgagcatgtttcatttcacaaaattattgccgggagtgtggctctctttctctcagtggccatgatcctcttggtgatctatgtgtcttggaaacgctacccagccagcatgaaacaactccagcaacactctcttatgaagaggcggcggaaaaaggccagagagtctgaaagacaaatgaattcccctttacaggagtattatgtggactacaagcctacaaactctgagaccatggatatatcggttaatggatctgggccctgcacatataccatctctggctccagggaatgtgaggtatgaaccatgatcctcctaaaagcatttctactgcggggaaggagaggtaaatgtttgaagccctagaggtgtctctaatcactagaaagattaatgacccttttgcttttgggttttgctcagtgtgaaaggttacttaattaaattacaaccaccaggaaattgactgcttttttttttttttaaatggttgaaacttgaaggaagttcattcaaggataagttggaataaagcactatgttaaaacatctgctttttaacaatttgtatacaggggttggacttaaaaacacacatacaaacaaaactcttttcattctgaaatttctgtctggttcttggtgtttgactgttgtaatggagtaaagaagagggccaacttaatttaaaaataaagtgagtttaccaaaattccagaaggtaatgaagatttaaaccaaagagcaattttcccaagggttgattttgttgtaaatttttagttttaatgaaagcatgcaacagggatctcacacccatgttacttgccatttagttattataccagcatagagaatgtcagaggcctactgtgtaattgtatcaggctcctaaggcttctttcttttttttttttttgtttccttctttcctactttctttcactccttcctttccttcctttctcttccttctttttttgtttgtttgtttgttttttaattactgggatatagatccgatttcaaaggtttttatgcactggctatttgtgtttaatcagaatgaaacttcaattccatgctttggctttgtccctggtaactaaaatcaggtcacaattttgtggatgatttagcaataataaaatggcagtcataacagggactgtttgtcagtattgctgtcatccccaaaagaaatgatatgtattcttgttaaacttattaaaaaataagtgatacaaatatttataaataaaaggagagaggtttgagttctgggtatcctccctttctgtaacagcctcaaataaaggtgtaccttccatgttatattatttttgtttttataagaataaatttggacccggtttctgattatttaatttaaaagatcacttacaggatcatgttagtgagcagacaaatagtcacaaatttcaaacttgtcaataagtaatgctggatgtaaattgttcctttcttggtaatgttgatcattatgtgcaaagactgactactaaggccttgttgctggaagaaactagtgaagagaggttaaattctggcaatataatgttttagtatctgattttagatgatcactctttcaaaagacagttttaatgagtaattaaagatgttgccctttctaatgctagttaacagttggaaaatataattgctctttgatagcatatactccaatttttccatagtcctaactacaaatgctaatgaaaatgttttcagacaaagcactgaatttgaaataatctctaactcagtacaatttggactattgaactgttcttcaaagaattcattttcttcttttttgtgtatcattgaaaataagagaagtaatcctagataataaattcctaaaaggaaactgtataagcaattgcccttaaaaattaaaaagaataaaagattttctat

SEQ ID NO: 365 - DNA, 5118 bp, Homo sapiens
tgtgtgcttccttggctgctgcgctgagtccgggttgctcttaagcttctgccactgccttgcgttccagctgcttccttctcatgggcctggtggccatccagagaccctccgcgcagcccctcctcagcctgaggccaccccaatcccgtggcttctgtcccctcactatgaccctgggttgttcccatgctctgcaaagctcctcctgtccagcttctgcctggacagctcagtgtccgagttctcttcaaaggcagggagtgagctgggctctccatagaagggcctgcagcccagaagccgctgcccgggcatgcctggccttccctgggtcaccaggaaatggagccacagtggctgcaagcagagctctcgctgctcaggcggccactgcggagctgtcagggctgagccagaggagagcccccaactcaggcagccgcagaccggggccaggaagggtggaaacaaagcactcctgccacctcccccgcggtgggtgcccctggtgaccatggcacttcccactgagcttggctgcctgcagccccaaccagcgcatcgtcgtctgccacctagaatgtcgtctggcagtgcctgggcccgagatggcttctgtgaccaccccgctccctacgtttccctccctgacgctactctcccaggcagcagtggggatcaggccaaggatgctggtgagaagtccagctctcgctagtccccacgagcatggctgagtctcctgcctccagctgggcccaactgcccctgtccctggaggcccctttccatccatcctgtaagactctgacgttagcttcagaagccaccaggaggtcccctgcacactgtggcctctgcaccccagatcatggcccctgtttgtccacaagcattttttttcccctgttctggccacctgttggagctcttcataggtgtgagcgtctgcatcgagttccctgtcattctccagagctgtttgtcgtaggtcctgctgttggagggcgcccactaggactctgagaggtgagacagttggcatcacatgaatggtgagtcagggctggagcaggacttgagccctgagtgtgccgcctgcctgcaggcgcctctggggagctggccacgggcatcctcacgtctgcgcccctggcacagagcacaggcttggccagcagccgtccagaagcggcggggaattgctgagctggaacctgagcgacctccagggcagccccttgctccagtgttgcggttggatccacagcctaggggatagcagccagcggctgcaggaggcccccgcttacccactaagggtgatcttgctgtgaacattctctccttctctctctttctctcccactgggcaccccgtactccaggccctttaaggcgcagactcccaacccttctttcccacccgcctccagcatgggggggctgccgaatgcaaggcaggcatccggctgccgacagcttgtcttctcttcagggtgttgctggggcctagccactggggtgcagggcagggttccagtcctggctctgggaaaggccgtgctcattaatccactgtgggctccgtcactgctgcaggagggacagtacagtacattctctcctgtcttaaagaagttgctacagatgggaaatcccagagcacaggcctgaggatttctgccagccttgagggttgggcctggctaagcaagtgcccaggacggagtccgtccgtccaggcatcagcagtcattcgttcctgtgccaggctgggggatagagcagcatcccacccttgatggggcaggctgagcctagtggggcaggccctacaccaacaacccacaggatgcacgttggccaagacctgctgcacacaggaagtgcagggcggccgctgacccttgtccactctgcaagctggaggattagcccatttcacagttgaggccaggccccagggagcacctgccaaaaattaaagggacccagcctgagagggaacacaggagcctggccccgaggctccccaacccctgtgcctctagctgtcatctgtattcctttcagcaactcagggtgccttgggggacacccccaggtaggtagcgtggctgtttagttccaggtagcagtgaggccttgccctgaagggaccacatgtcagcatgtggcgtgctgggatggggccaagaccgggcagccaggccccagaggttcgggtttgcagtcttagagcatctcaggatggttagggcccctgtgaccccagcttctcacttgtgaggagcttgaagggatttgggggccttctcagtcgccgaacccagcctctgtatctggaaacaacttgagcacgtggggagggcagaattcctgcaaagcagccttcagagaacagacggcccagcactgtgtgggatggagaggtgtaccccacttaaaggggacagccgtggagcctcagtgctggcttcagtgtttaattgaaatgtaactaaggttacttaatacacacaagcatacaactagaaagccccttatgttcttgttcttacacaactaaaactaacacgtacagcttaaatacaaccaaagccaaaaaccgcggacagcgtcaccattaatcactgctttgctgaggctccttgccttatggagtgcatgaacactcagggttgctagagtgctccgcctgcctgtgcccgcctgtgcgagagggctcaccttttcctttcagggcctcggagtggtatgtgagagggaacttactctattaggggaataggctcacttggtgatagaggctgagaagtcccatgataggctgcaagctgcagaaccaggagagctggggacagacctcagcccaaggacaaagagccaagagcctggggtgggggtggggtggtgggcagcaagtcccagaggccagagaacctggagctctgatgcccgatggcaggaaaagagcaacctagctccagaagaaagaaacctgagtccccatttccttagctttttattccaccagggcccctgcccatctgatggtgctcacctgcaaccacggctctcacgccggtcacctctggaagcacagactcactggggcggcctggccattcgaatcaagtaccaagccgcctgggtttcccttccagcactgagaatacgtaatgtgtccccgggcgtctgggtatccccgaatccaatcaagttgacacctgagtcacctgccactcagtggggaaagcaggcctggggtgcctgaatcaccagactgcgctgccggtgaatggtggatctggcgttctcacgcccgagcctcatgggcagctgtgtcattgtcattttgttccagatcaggtcagaacagaacaatgtggccactgattgattttctcttcctctcctccctccacagaccgcggccttcagtgtcacagcgtggccttgcttgtctgccacagcgggagctaagccggccctgggccagcactccgagaggtggaaggggccctgccagctctggggagcagcagccttgggctgttctgagctttaggcaagagaagagaagcatctcttgcatccgtgcccctgggggcctcttcagctttgcagtggtttgtgggaagacatacctcccagaggggcatggactgccaccaggactgaccctggcgtcggggagaaggacacttgcagagccttgagatcacctgtttggcaggtcctggactggggccgggcaggcaggggcagggaggcgccccgggtgggctttggggctgcggcactgccacacatcgtttccctcctggcctgccctgctggggctctactgccatctatagatggtgtcctgggcctgggaaactaggttcccaggggttgagaccagaaaggtgaccaagacagattttttaaggtgcagaaactgcaggggggcctcagtgacatccatgaggccttattagcaaaggacacccagacctccaaggtttgtgggccccttccacaaagctgtaagtcccagcccacctactcagggccttgctcagtgctgtggcccggtggggacacagttgctcgtggccactcagtggagctgggcctgcagcagactcaaggctccgagtgccctgggggtcacccctcccctcccctcctcagagcccaccctgagaggcagcagtgagacccatggcacacacctgccaacagcactgggggcttctccccaggagaccacgctgccctccaagaccaggagcagctgtgagctggagacagcagagggaccccagggtgtcccctgcagatcccaccagggccgcatccatctcagtgtggaggacagtgacgggaccctcaccatcctcttgcgttttggcccccatttgctccctgagctccaagataagaatggccccgagagaactgctgaacatttgttcattgctgtcacctcctgagtcactggggtccctcaccagcacctccctgacacctgggctatggagaggttggcgcctgtcagtgaccatcctaatgcctctcgctcactcccaagccaccatttgagagggaggggtgttggtgccctgacagggactgggcagggtgtccaaacttggggcttcccaggcacctgcagtgtgaacactgcttggctggctcaagattagggccgcggagggggctgtgcacataccagttacttaagcagccacgagtgtcccccatgccttggtgcgggtcctggaggcctcttgggggtgggacctttgggcagggtttgcccactgacacgcccgccatggggcactggctgcatggggctccttggaccctgtagacccagcagaccccgcctgtgtcaggccagctgcccgaaggcacttggctgtggtcccaggggacggctctgctggcacactcaggagcctggccgcggggactgcagggagggtgcctggacccgtggggttgcttcattgagataaagcacacttatcacgtagcacaaaggacgtgccatggtgctttccccaaaagttgtgttgcttttatcagttttctaacttaataaaaagagttgag

SEQ ID NO: 366 - DNA, 3539 bp, Homo sapiens
aagttacagattaacggcatcttagggcaaagcaattgttcagggtacaggtcaaaatggagtttcttgtgtctttcttttcaacgtagacacagtaacagtctgatctctccttcttttccctacaccagccccgcctcttctacaagtcctccagctgccaaccactatattcttggcaacttgagttcctcaccccttagcagatgtttggagtaaaacgataacttccatctgttttttcaaagattttctataataagcatgtgctaattttttagtcagaaagattaatgttcagtatttacatccatccatccatccatcaatatttggcccttggtccagaaaaatattgtgatttgttgttaacccacagacacgagagatttaagatgcacctccttgagtgctggtgtcaaatggctgtctcccagcccagtctcattggctcttatggacgccgatctgcaaaccacctccaaaccctcaggcagctgcagggtctagcaggcttccctatccgtgtgttattatggtttgccctccaggtcagcatttatggggagatagatgggcaagctctagaccctgccatttccctcaaaccagtgcagccaagggggcacacaggatgtcccagctgctttaaaacagctgccatctttaaacagaaaaagtcaggttttttcgagtagtaaccagtttttacctaaggcaggaagggaggggacccagtgctgtaaacaaaccagagcctcttgtctcctttgctctggccaacccagtcttgctgactgtgctactcacaagtgccaagttcagaggagtgactgcatggcaaggctctttgggccactgaaggcaccctccctgaggcccttctctgaggccttgcactttgtctccaagcgagaacaccctaatgtccttcccaagaggaagggtgtttgcagtagacatactgcaagccccctccccacgccctgtctgatctcatggtgtgtgtgcattggaagatgagttgatccgggaggtcaccatcaactgtgcggagagggggctgctgctgctgcgagtccgggacgagatccgcatgaccatcgctgcctaccagaccctgtacgagagcagcgtggcgtttggcatgaggaaggcactgcaggctgagcaggggaagtcagacatggagaggaaagtgagtggggtttaccgtgacccttggtcccatctcttctgtaaacctcagggccacatgcttatcattccagcactacattctgacctcctaaggtgctctgctgacagtcacgacacctggacttgcatcacctcagtgagggacccctggttgagtatgatggccagcctggtggtcttggcagagttgtttccgctgtagacgctccatgccaggcactgacctcccactgggtggcagtatataccctggcaatgtcatgtcccatgtcccttccacccaggctcacaccattccattcacctggcgacatcccaggatgactgggcattctctcctcagatcgcagaattggagacggaaaagagagacctggagaggcaagtgaacgagcagaaggcaaaatgtgaagccactgagaagcgggagagcgagaggcggcaggtggaggagaagaagcacaatgaggagattcagttcctgaagcgaacaaatcagcagctgaaggcccaactggaaggcattattgcaccaaagaagtgataatttccacatgattaatttccaacaagacacttgggagttatttactgtgttcctctggcagccaataaaatcatcataagccctttgtaataaaaagctagtttcctgagtgaacaagccataacctcccctaaacaccacctaggtatttgttagaagtcacactattactccaatgtcatcagacacctaaggtctgccagccaggctcctggctgggcaatggaagatggtgtggccctgttagtctccgtgtgtggcttactagccagccttgggaactgccaactcaaattctaagaaagccactgctttctcatcatcactctataccaatacttatttctggccaaatgaatctgcttctctgcccctcaaacttttagttcacaattcatcttctaccttaacttgggcttcttgggcctctggccttccttacttaatgtcttcttttccctactctaatgcatttctaactcactttggagctttggttttctaatgtattatccccacttgccagtcaactggaccccttcctcctcggtttcagactgcctacattaggaaacaatggcagtcaaacccatggctttggagaaagtaaatgtttgccagaaaggaatactagtcacagtggcctttgtgagttgtctgcaactcagctcttcccccagcacagatctgttccccttatcctgcagaaaatcaagccctgactctgcactccccgaagtagtgatgttaattaacaactgaagaggtaactaaatctcacatgcaggtctaatgactaataattggagtacggctgctagacaactgcattttagtatttctcttccattctcctggttttgtagacccagaagattgaatgagtgacataaatctttagttcggggcaagccagggtgggctagggtggtaagctggaggacttcatccttcagttaggctgcacaagtaacattacctaaaaggcactaacatgctcaggttccccagaaagaggcgtaagaagggcctctccttagcagagcttccacctgccatccgtcttgggttcagtgagcttcaaggctcacaatggaagcactgtcatttccccagaaaagctgtgttccctatgctgaacacaccatacacattctcatctggaatctaaggagcagcttttaccctgatccagtatcctgaggaattttaagcctccactcaaatgacctgcctgtgttgtcatttccatgggaaagaactctttccacgagatctgctagttccaggcctctaagacaggaacgtatgtgccataagtgggtctacttcacagactcaatgaggcagaaattattgtagttttctcctatttcttctgcacccaactttctccttgtatttcaaaggccaggccatgtacactaacgtccttgaaatttgcagttctgtatgcttctattccaaatcattcattaccaataaaaacgaaataccaccctttccattttatagacctcatcccctatttctgtcagacagttatatgacagggtgactgtggaacctcttagttcatccaaagtctacctgaagtgctagactttcagactcttatcactgaaatccttaaggttgaggaggctttatttccctagcactggtgaagggcttcaactgtcaaacctcagaacaaatgcattagggccttagaaatgtcaatggggcaggaagaaaacacaatttctaactgcctgtttttgtataatttaataaaaaccttttaaacatt

SEQ ID NO: 367 - DNA, 5006 bp, Homo sapiens
caaggaggagacggagctgaggttccggcagctgaccatggagtaccaggccctgcagcgtgcctacgctttgttgcaggagcaggttggagggacgctggacgcagagcgagaagttaagacccgtgagcagctacaagccgaagtgcagagggcacaggcgcggatagaggacctggagaaggccctggcggagcaggggcaggatatgaagtggattgaagagaagcaggcactgtaccggagaaatcaagagcttgtggaaaagatcaaacaaatggagacggaagaggctcggctcagacacgaggtgcaggacgccagagaccaaaacgagctgctggagttcaggatcctggagcttgaggagagggagaggaagtcacccgccatcagcttccaccacacgcccttcgtggacgggaagagccccctccaggtgtactgcgaggccgaaggtgtgacggacattgtggttgcggagctgatgaagaagctggacatcctgggcgataacgccaacctgaccaatgaggagcaggtggttgtcatacaagccaggacagtcctgaccttggccgaaaagtggctccagcagattgaggagacagaggcggcgctgcagcggaagatggtggatctggagagcgagaaggagctgttcagtaagcagaagggctacctggacgaggagctggactaccggaaacaggccttggaccaggccaacaagcacatcctggagctggaagccatgctgtatgatgccctgcagcaggaggccggggctaaggtggctgagctgctgtcagaggaggagcgcgagaagctcaaggtggccgtggagcagtggaagcgccaggtcatgagtgagctgcgcgagcgggacgcccagatcctgcgggagcgcatggagctgctgcagctggctcagcagagaattaaagagttagaagaaagaatagaagctcagaagagacaaataaaggaactggaggaaaagtttctatttttgttcttatttttctccttagctttcattctctggtcatagtccgtcttggcaccctgacgtgccccacattgaatcggacccttttcctccagtgggaccagaaagcagggacaaaatgggacgtcgcgtctccatcctgaagacccagggagatttggtctctgcacgcccgtcccgtggaggaagagtgagaaggggcagtgtgtggggcgtggagctgccgtccacgtgggatgtgccagaactagaactggctctgccgacttctcgggggcttctccgggacaggcctggccttggctgctggaccctgggtcccttctcccggacggcagcccccatcccatttccagggatgtgtagcattccctgccaagcaggggtgagaactgcttctgtgcagaagcaccagccgcgggtcccctcctctctcttggttctcacagtagctgccactggtgtctggaggaagattttcagaaacaacagaggcttggcctgatgacaagatgaaagctggacggtgaccttcattcaggggaacctggaggctccctgggatggtcctgggagggctccccgacgcctcaggggcccctccgatgctgcaatatgttgctggggtcctgagcacccgctggccaacagaccccacatccaccctcgttcatcatcatctctgtggggacagacaagagccgtggccgccgcgggccgcgtggtgccatcaaccctctgcctccctactcaacctgagacaggaaggccaagatcccgcccaagccgccagctgggagcaccgcgggactgagccaaggaaggcgtggggagcgtggtgacaggaggtgggacgagggggcggagctggctggaacacggatgccagaggctgcctccatagtgaatctccagaagtcacagaggccctgggcacccagagccacccagcctggaagcccctgcacgggccagccctgcaggccatggaccccggcgggcaccgaagcctcaccccaagcctttgcacacaaggagcagcccaggtggggatggcgggcgcaagaagggaaccgcggggacggcctttcccctcccgccctgtgtggggacgctgcacgagccgtggaccaagaggctgacaggaggggtccgcagcgaggaggaggtgcgaagggggcggcggctccgtcttgcaggtcccctggggcgtgttcttcaggtgcgtggtggacgaggcggcgtcctcgcggggtcgggacctgggtacccagcagcatctggctcctgcatccaccaagggcgcccaggcacagcctcaggccagaaggttcgctgcagaggttcattctagaaggagcgggagaccagcagtcccagccctgtccaaggacgcccgctgcttggcacacgagggcgccgcaggcccaccatccctcaggacatggctgccgagtccccagagacttctggtcccacagcaagagctggagctccaagcataacatctctaactgtgcggcaaggacagcgcagccagagagaggaagcagtgcattggtgaaggcaacgttaggtgtgatttccattcctgctgggagacccgggacgcagcccgggagcttcgtccagcctgtggatggagcctgactggctgcagatggaacttctgtgtcctcccaccctaggtgggctaaggttctgctctcagagctgaattgacaggaggtgtgtgtgtgtgctcacttgtgtgcacaagcatgcgtttatgcatgttttcacgcaaccagaagagccattcgtgggatttagccatttcgaggcacctagaagttgaggcagccagctgtgcagccaggtgtgactgttactggcagcattgtataaaagacacgactcagctgccgtagggaggactgggttgtctggaagtattaggctcattttatatttgtgtcagaagaaatgtctgactttggggcagatgacacggtggctgcggaccaggcatggctccctaggttgaaatcagggaaaagctaatagtatcagacagatatgctttttctttggtggctgcaggatttttgctggaaaatgcactattaatcagcacttgtccaagaaagacccatccatttctgttgtcattcaagccacagttcctgatttactcggcaagatactgggccagttcagtgtctctagctgagcctgacctcggggtttgcgtctcgagtctgaaatcctgtttagtcctctgtgcatagttttgtctcattttaacgactgcatcttcttggcacatttattatactcacaactgaatggcacacaatagccttgtgttaataaaagctaccgtggcgctgtgggtgaaccgctgggttgaagtccgatggactctacgatgcaggcatccagaaatatgttgtaactctacctggctccctgccagcctggcctcctcctctgggagagctcctggcatggtcccaatgtgtacctgcatgggaacaacagctgcatgggccagctgtttcggatctaaagatgtgcagtgaaactcacattcccagattcacatccctcatgtttatttgggtcatcatggtttagcatgttgtatatatgtctggagcacttcatacacctctatccaccacagacactcttaatcacagttctgtaataataataaggcaaactatacggcaaagagaagcatgtaaatatgtaccaaatccttatgaagttgtaattgtttatatgtaaaaagtatgtatataggaacgggagaaggtgcaaggaatgtgctgaataacatccaaactgcatcgcgtctctgccccattcctgaaagcacacatctagttggagcgtcagttcctctccttagatatcattgttttcactcgtctatcataggcaccttctttacatctgattacaatacccagcatttcagaactgggtttttgcccccaaaaaggtaaatatgagcatttatcactgactcctcctggtccagtgagcagcagcagaattcaagtatttaaaaataaggtgcatttctaaattgcaggctataccttcttttccaaaccaatgggctagagtgaatttcctccaagtacttgggctgtcttactgctagctcttctaacaggggaagtctgtatgaatgcatcaccccctaataaggcaagaggaaggaccctgaaatgttgccagaaatgtactgttacatcaacatttacattatattaacatcatcacactctgtgttcaacacacagaacaacatagatactttagtttgtctaaagtaaaaatccacataaatagcagattcctttgttgacaccagtgtgttgtttaccttgtgcccatggtccagattttgagctggagaaggactatggctgttccttaaagtctctgcccttgcagaatctgtagccttcaggataccccgagtgccttacagggcttgtgaacaccgatactagaagtcaaaaagaagagagtgcccaagtgtgggtttggaggcactgacgcattcgccaactcaccgtcatcccctccttgaaaccctgagagagagtgtgtgttttatcacagtaatggaattcagtttagcctcaggaaactcatattgtgaatataggtatcaaatcatatatttgtttactgtatattttttaaaaagctttattgtaaatttatgcaaaaactaaccgggcctgttttcttacggcggcatgccaggtagtgtgtgtattctcccaggcactcccttcatagtcaccctctaaccacatgacattccgttccatgctaagcagtattcacaggcctaaaataggtttgtatggtgatctacaagattttacaaatatttttgtattgtgattcctatgatatataccagagaattttttactcgtttgtaaattattgtacagttttaataaaaaatgttttaaatctt

SEQ ID NO: 368 - DNA, 5167 bp, Homo sapiens
aattgagcaccattatatgccaggcactgttctaggacactagaacaagacaaaggcccctgtccttgaagagcttacagtctactggtgccaagccttataaagaaaataatgcagaaaaaagaacagagagctattttacatggggtggtcagggacttccttgagggagggaagaatgttccaggcaggggcaacatcacaagcaaaggcactaaggcaggaactggccctcaagtgttgaaagaaaagcaaggataccagtttgctagacccgagtggcagcaaatgagatcagagaagctgacagcgcccagatcaggtgtggaaggccaggagaaggacagcgatgggaagcctcaaaggagactgagcagagggggtaacatgattggagacaggggtcccctccgcagcagccctgctggatagtcctgtccagggacaggatgctcccccaagacagcccactcttttgctgggcaaatccgatacatccagggtcttccttagatgcagttcaaatctgcctcctgcaagctttcacttgctggtgtttattccaccccatggggaatgcagagcacggacagtcacacagactgtcctctctggccttctggacccaacatactcctcttgccaactgggtattactggaccttactgggccttactggacccaacatactcctcttgccaactgggtattaaacattttaaaagcccttcatctccctccacaagtcatgtactgccaacagggacacactgttttctttggaaaccctgctgtgtgcccagacagaggtcccactgccctgggacagctcccttgcctagaggggaagggtagggtgtgtgtgcatgtgtgtgtttggggttggggagattagctgattagcagggcaggaaagaaatgaaagaaaatttgcaagtcatcctgatgaaatgaaatcctgctgaagtcttctctttcccacactgagggtgtccctgcaggaatgggacattgcacccagctgggcatggggaggaggtcctgtcaacagggacagggctgcaggctatggtgggagaagagggcttggtaaatgtggaaaggtgagggtgccctggccagatctcactgcccactgtcttcacacccaccgcaggctccctcaacctcctggtgcggtcccggaacaaaggggctctggacacgcacgcctggtctctcagtggcaataagggcaatgtgtggcagcaggcccatgtgcccatcagccccagtgggcccttccagattatttttgagggggttcgaggcccgggctacctgggggatattgccatagatgacgtcacactgaagaagggggagtgtccccggaagcagacggatcccaataaagtggtggtgatgccgggcagtggagccccctgccagtccagcccacagctgtgggggcccatggccatcttcctcttggcgttgcagagatgatgagagctgtgtggccacccccccaaccttgcccccggcacaccaaagtgtccacattgtaccaaagactgacccccgccagctggggtgcccaggggcagggccggcccgccagggagggggcctgcattggctgcaaggatgagcagagaacaaggacagaggccaggcactgaggccctggagacagctgttccacttgcacacacgcacacactcatgctcacacacacagagatatattaaagcacaagtttctatctgacctgccagcaccttctttactgcaaagacaggggacttgcctgaatggcatccgccaacccagggacctcggcgcaacataggccttgtccttgctgcactcgtggtgtgcttctgactttaccctgtcccctaagtcaaggccgaactccagcctggtggctttgccagaagggagccagaagtggggcagacatggagccccttccttggtcagactctgggactcctgagatgggagaggcagggatcagaggacaaacaggtgggaatttgcgagctctgtgactgtcccacgtccaggagacaaggaaggtagggcacctgctgcacacgattctgtccagagtgagcactggatggtggagaccataggtcaccccagattccctgacctatttctgggacaccatatttccctcctcagtgtgcaccctttgaagggacccagcacagggtcttgggcctgggcagtctgaagactgataacttccccactccaccctacaagcagtgggactcctgagaacacggttctctcctagcctcagcccccagctgggtctcagaggagctgggggagcggtggccagcccattttctggggtgaggcttgacttggagaaaggcagaagagacgtcccgcttctgtgatttggtgcccccatatcagacaatgaatttggaagtggagaggggccttcatttcttatctacttggcatgaaagggtgccctggataggagggtgtgtacagggcaaaatgccaaaaagcactgtctagttgaaagttcccttctccacccaggggcagtgaaggaggaggggcttatagagctgggattggtggagggagcaggtgccagtcccctcactctctgggagctgtgaaagggatccctgtccttgggtcctgggttaggcacctgagattgacatgatgggatctagatctttcctccttgacatcacctgagcccccacctagccatccatgggagagagaaggcccagccccttctagaatgactctttaggcatgcgtgcatatgtgtgtatgtgtttgtgcccgtctgtgtctaggtaccaccgtgggtacattgttgggcaggagtgtgtgcaaacacaggtctgtgtgtgcaatctcacatatctgcctgtgagactggattaagacccattcgtttctatgaatgtccgtgtacgtcagcgtgtgtgtccaccttcctgagtgatgtgttcgcttgtagggtgctggctgaatagactctgtccagccctgttctgtagtctcaagctgcctgcgatggcctgaaattccacctttcatcccctatggatgacagagagcttacagatgaccttattgaatgcaagcacctttggtgaggagcatcacagggctccttctggagcatttggtggggacagctgcagagaagaggcctggaactcgggcagcactgcagtgccaggaggcaggcggggaaccgaggcaaaggctgcccatctccccctgccaggcctgtgtgatcattatcaccaacagctggtgggtggccgggccaggatgcagcggggccttctgatgcccaatcagcacggctgccttcctgacccagtcaaggcctctgtctgaaatgagtcgctccaggttctcagcatacacttccatcgcgtctgtcgggtattgttccttaactgtcccatctgtgcagagtccattgccccaactagactgtgagctcctcctctgagccttccaagtcccccctctgccttcgccacctcccgctcgtgcccagcacaagtgagcctggtgtggaaaccactccattgcccggtggaatggattctgtaatcagtggttcctggccttgcctgcagaatagaaccaccagagtcctttaaaaagtattgctgcttggttcccacctcagaggttctgagttaattggactggagcgcagtcggacatcaagaaatgttgaaaagctccttgggttctcctgacagcaggaaccactggcctggcaccacctgggtgcttcctctgtgccctcgctggggtaggcattggagcaccagagatgaatagccccaagtgctccctctttggggttcccaaggcaccctgtgcctgcttccctcagaggaccttccaatccatttgccccgcaaccctggctgctccgacaggggagacttgtctcccttgttcccctcaggatccatagagtggacagtaaaggtgctcagtacatgttggctgagctgaactgcatacatgtggcccccaggttcctggtctttatggacgaagggcacaaggtggaggggggatggggggatgctgctggaggtctcagtgggtgcagacagccctgccttgaggatggcttgacctgggattgacaaagtgtgtctgctgaaatgctgaggtccccacgtgtgaatgggtgaggctgatgtggatgtctgtgtgtgccagcaggtgggtgggggatgtgggtgtcagtgtatgccagtgggcactgtgaatgtctaggcatgtgctggtctctgtgtgtttgtgtgttcctcagcaggaatgagtgtctttgtgtatcacctggtgacttgtcagtgtctgtgtctgtgtgtgcctgtgagccagcatctctgtatcagtgttgctcatgctgtgtctttgtgcgccatggtgtgtcagtgtctgtgtgttgatgggtggcccatgagtgacccccgccaggggagaccaggctggctggatccagcacatctccccagtggcagcctcgccctctgggtcagggtgactgaggcattttgtggccttaaaacggggtgttcagggtcagccctcagggtgctggggcccttccatcccttgtccccttcaggttggtgaaaaggactccgggggccaggtgctgtatagcagcttatggaagtctcagctgggctatcctgcccttgggagcacagacaggctcctagggtgctgagtgaagcctgaagaccaagccccctcctcctggaatgctccttccacccctacctctcagagatgggcctgacacctctttctcattcattctccttttccctgtgctctgggaaagcccctggctcaggctgtcagagtgaggatggacctcaaaagtttgatcccctcgtgcagatgaagaagctgaagcccagagtggggaaggggagtggcccaaggtcacacagctagtttgagtagagccagtcttgggagagccaagtactacagccctgggggtgtcacaccgcttgtcactgcccctgaggtctcctgccaaacaactgcagggagtttggctaacagtcctgtgtccagaactgtgagaaaataaactcctgttacttaagccactcagtttgtgg

SEQ ID NO: 369 - DNA, 4078 bp, Homo sapiens
atccgacagctgcccatggcctgcatcaccacctgcttcttgagtgcctggaagcgtcgccactccttctccaccctggtgagcttctcctggcactgccgcttcaactggcccagctcctggtggtaccactgcaggtcgtctgcctgctgcttcttcagctcctccagcatgcccagatggcgcaggaagatatggctgcccacgttggtgcttcccggactccccaagaggtgatggagcattacgtgagcatgtacatccacgggaacctggggaaggcctgcatccccgacaccatccccaaccgcgtgacagaccacacctgtcccagcggaggccccctctcacccagcctcaccaccccgctgcccccgctggacatctctgtggctgagcagcagcagctgggctacatgccgctgcgggatgattacgagatcgagtatgaccaggatgccgagacgctcatcagcgggctctctgtcaactatgatgacgacgacgtggagatcgagctgaagcgcgcccacgtggacatgtacgtgcggaagctgaaagagagacagcggcggaagaacatcgcccgtgactacaatctggtgccagccttcctggggaaggacaagaaggagaaggaaaaggcgctgaagcgcaagatcaccaaggaggagaaggagctgcgcctgaagctgaggccgctgtaccagttcatgtcatgcaaggagtttgatgacctttttgaaaacatgcacaaagaaaaaatgctccgggccaagatccgagaactgcagcggtaccggcgaaacgggatcaccaagatggaagagtcggcagagtacgaggcagcgcggcataaacgggagaagaggaaggagaacaaaaacctagccggctccaaacggggaaaggaggacggcaaagacagcgagttcgccgccattgagaaccttccaggcttcgagctcctgtcagatcgcgagaaggtgctctgcagctctttaaacttgagtccagcccgctacgtgactgtgaagactattataattaaagaccacctccagaagcggcaaggaatcccctccaaaagccgccttcctagctacctggacaaagtcctaaagaaaaggattttgaattccctcacagaaagcggctggatctccagggacgcgtcttgaagctgagacgctttgaaagccagggtgatgctcagacagtgtgccagccaaaatgacttgggggaggggagccgcttccccactgttgctctttttttaaacaaattgagttcctttttttaagatagaaattcttttcatggtcctctgaaagaagcaatagtaacaatcttatattggatcatgggggaagcaaatgtgtgtattttaagtgagttcctgcgagtcatacactgcgatgatgctccgcctttacccgttcagttgggagcttattgtgagattggatcatttccttttgagtgttcttctctttggtacaaaacctattgtgggtgacaggagcagtgttttcctgctggacccgcaagccaccagctatttcctggtgacacaagctcttctcaggcggggctgcctgcaggctcccgttttctgagcccacgctgcccacagctgaccccagcgcagccccgggcacgcggcactttacatgggggcagcttgggcccagactcctccgctgtgtagcagatgaggaaaatcaggccagaggacaacaggctggcgttttgttgggaactgaagaggaatctgttgaacacagcgaccagatgaccttccatttcaccggcggcagcagtttcagcgtgcagttcccaaaccccaaagctgaccctgcgccccatttgaatacggccagagcctgctggttcactttgggtagagccgtgcctcttgggcaggctcccatagtgaccacgtccccacgaatgggaaagcacgttagtgggagggacgtaggacacgtgtggaccgccaggccctctcagtccattttccggggctgctcggtgctgctgttaagacgtgagtgcatttcacttggaagaacccattgtacaaagttcaaggctaagagttctgaattctggcgtcagcttcctcaggattttcttcagttgcaagtacctttccactgaaaatatgagcatgcccgcctggctagtaggcatctgtaagagtgtcgccaggcccgcgccagctgaggcctcagactagccaggcaagagccgtctgaccagttggctggcggtggttctggtggagcacgagggagcccgggtggtgccctgagcctcgagctgctctctgtcactgtcttgaatcagactcagaaatggcttcttcccagccctgcctacaagtttttctctggggtcctctttcaaggatgtccacggtaccttcctcctgaaacttgaggaagtcttttgtcttccagctgctcagggttctctggtccaagaccctgctttaaagagagtctttggcgtgctcagactccagcgctccgttcttcaaggaggttgacttgcctctcgggccccgtaggtaccaagagactgtttacctcccagaatgtttgggcttgaagttacattaaagtgaagttatttgaaagaaagaaaacctcatcatttctaaggatgacttaattactgtgccttttcctttctttttacacatcctactgtcccttagggtaaaattttcagcattaaataaaacatttcaaatatattgtatatggctttagttgtaaactatactgcatgctgacagagaagcgctcttttagctaagcccagaacttctcttttgacaataaagtactgagcagtggtatcatgagggccacctccacattgtcccctgcagaataaatgcggatgacagaaagcttatgctgtctaccactgaacagtgatggagatggtgctaagtttttacagttgtcttagccccagtggttctcaaggtggggctcctggcccagcagcagcaacttgtttgttagaatgcagacgcgcaggccccacctggcctcctgaatcaaaatggtgtgcggcagggtgcagcgagctgttttcacgaggcctccaggtgactggatgtaagcttgcttgagaactatgggttttagctattctggtgtctgcctgattttctacagcgccaggatcctagtttggtgaggttttaaatttaatcttatttttatataaaatgattgccagacgtactatattaagcttgaagaagcagaagatccctgttaatgtgtatggcccaggccaagagctgtcaaatgaaaaactttgtgctgaagcaggtttttagtatgtatatctttttgatggtatgaagaatttatttaggcttgactgttttaaaacaccataatgaatgtataattaatttatgttaaagtattaaccctttgtcacaaaggaatggtaatgtgattggctgcctgttagcccatcgactattcccgtcacggtagtccttacctctgtcggcagctcagagcctccacatttttatatttaattctcatgataaattagccaccataatcccatggaattaggtcttgttaaaatctagtccgggcgcagtggctcacgcctgtaatcccagcactttgggaggccaaggcgggctgatcacgaggtcaagagatcgagaccatcctggccaacatggtgaaaccctgtctctactaaaaatacaaaaattagctgggtgtggtggtgcatgcctgtagtcccagctacttgggaggctgaggtaggagaattgcttgaacctgggaggcggaggttacggtgagctgagatcacgccactacactccagcctggtgacagagcaagactccatctcaaaaaaaaaaaatctaagcaaactatctttgagtcaaaaaagttggataactcatctatatttgaaataatgctgtctgaatggccaacatcccaagaatgtattaaaaacagcaacctgcctaccgttttgatgacctttttccatattaaacaagttgagaac

SEQ ID NO: 370 - DNA, 5501 bp, Homo sapiens
ttcggggcatctggataaatggttagcatcattgtggtccggtccttggcggccctcctggaggccgggacctgggggtccaccgggggcctgggtttgcaggagacaggaaggggctaaaggggcagaagcatgcaggggcttcacctgcaggaggagtcgggtctttcacagctgcccggccaccctcggagcctgagaggccatcacacctttccctcatggtgccagctggaccctccacgctccttgcctccttgtgtgtcatgtggcagccacaggcacccccaccctgtggcgcattttgagcttctggggagctcagcacacacagcccctgtgaaagtgcagtgccggctgctggaccctgctgtgcccccggcatcacccctgtcctctgagacctctgactctgcccagcaagaggggcagggtcgggaagaagggagtgtggggcctttggaagccgggcccaggcagtgaggcggaaaccaggccgggctcagcatggcgagctcctcctggtgaaggcactggtgtccgggggcatcagcggcacagagaaggttctgggctccatctcctgaacctgtctggaagagcccagctgctcccatggacctgcgacctgctgcccggggccgggggtctgggcctctttgcatcggctcaggggaggccatccgtggctgggcgagggtcagctgccatttggatgccccggcagccgtggggctctcgcctctgccagagcaggcagcttccgaggtggcaagggctttggggagcagcgggaggcctgggggtgccgagtgttccggaaatattgctggttcttctggggcagtcctggcccgctgggcagagcagaacacggcctctgctcagtggcagggtggggcgccggggtggcggaaacatgaggccgcgtgaagtgggcatcagttgggccctggggtttggtctcggaggcctgcggggcagtggtcccccggctcttgctgccctgcggttcagttcctcctgctgcagcgcctgtgtgccccgtgggtcggcaggtctcgtgagaggcctcatctgagacaggaagccccacgcaggcttctggagggctcctcctggctctcagccaccccgttggctgagtgagactgaccccagcagcttcctgaggcgtggcaaggcccccagggacacctggcggccacacacctgggggaccccaccaaggctgagacccaggttggggccccctgcactgctgaggtttgggcctcattccccgctggccctccgtctgcttgggagctttccaggtggggatgtttgtagggacagtggtatggcatccagttgcctcctccctgaaaccttcaacccgaacctcactcagcacagagaattgggggccagaccacggcggacggaggcgtcctgctgacacagcccctgtcgggatgtgggaaggggcggaggcacagctccagccccagcgtgaccgtgtgtgtgggaaaaccgtccgggtacttggggacagcagggacatttccagtgtgggtgtgtgagagccacctcccccatgcggtgggccctggtgtgatgctggcagctgggacaagagtccttctctcagcagatgctgctgtgctcctggggcacagtctgtggttttcttttgtgtgcatgtccatgcttgggtgttgtgtgcatgtccttgcgtgtgcgtgtccttgcgtgtgcacgtgtgtgcttgggggcgtgtgtgtgtccttgcgggtacacatgcgtgcttggggtgtgtgtgcatgtccttgtgggtgcacgtgtgtgcacgggtgtgtgtgtgtgcgtccttgcatgtgcacaggtgtgtgtgtgtgtgtgtccttgcgggtgcatgtgcatgcttggggggcgtgtgcgtgtccttgcgggtgcacgtgcgtgtttgggggtgtgtgtgtgtccttgcgggtgcacgtgtgcttgggtgcatgcaggtgtgtgtgtatatgcatgtctgtgtgtgcacatatgtgcatgcatgtttgccccagagcggaaggaaagtgaatgcagccgaatgatcacatctgcatgaggggtgttcactgttgtgtctgcccatctttctgtgggctgaaatatttcaaaataagaaattgaggggaaagagaaaggagggtgcttgtctctctccttgcctcctgctcctcctccctgtgttggaggctccaggacgcctcacccccggttgacgtcatttttggcctgcacaggcagcccgtttcttttctcctggcaccggcgaggaggctggggaggggggacgggaattcccccaggggccaggccttgactgccctgcagggccctcgctgtcgcttttttccctcacagtgtctcatccctcaacctctgttttccatccaaaggcatctctgtgaatccacctggcgcgggagcggcgctgatgccacaaatgcgggccagactgctgggcagagctcaccagtcaacagggctgggtgtggctggggcagccctgagaccccaggccctgccgctgtggctcccccttcctggcccctcttctctgtgggacagaaagtctctcctggggaaggctcggagctgagctgatgggtgtttgaagtttctccacacacagggtcccctggcatctccctctgtcatttggtggccaagtgacatttcccagcagccctactgcagacgccatatgttctcggggtgactcaggtggcctgggcccttctggtagccgcttatccagcctgaccccaggctccagcgaggctgctccggatcggggctgctctgcccaggtgaagggcgggtgtgggaggtttccgtagaggccgctctcccctgctaccacggccccgtgtgggaccctgggtctgtctgacagacagaggcttcctgagccaggcccttgggatgacgggtaggaatctagggtggatccacaggaattagagattttttcagttttgttttccaaatgaagtcaacagccccctagcagcgtgatgctgatggtcctgtcccctatggcccccatcctggaggcaccctggtgtgggctgtgggcctgggggtccttggcactgtccagtatgcggacgtggcagcagcccacatttcccccagtgaccaccaggctgtgccctggacgtggccgcctgagcacggcatgtcctggggccccgtctggtggtcaggctcagtacgagcccatcaggggtactctgcccgcctgggaagacagtgtggcttctgggggctcctccagggaggctctggaccaggctgcagaggatgccaacctgccacaggctggcctggccgctcatggacatggcggctcctggcccagggtctctcccccgggaacccaggcgtgctcgcggccctctggaatgcaggcgctggggctgtggggggccgcctggcgcctggcatcttgttataaaaagctctggcgcaggctgctctcagtggctgcaggatggttgtggctttggaagggcagcccccaggggccttggtcagccacctgtgggccccactgccgagccgtggtcagccctcactggctgccctgccatgacgctgctgaggtcagtgcagctcccgccagactcccgtgacaagtcataacagagccacatgctgggtggctgcagggccctgtcgcccacagcagtcgaggtctcaggtgtgtccggagggcagccctggagacacctgggacaggcgtacctctggcaggcgcaccctggctgtcacccagtgtgggcatggtgggggtgctggaatgctgtgtagggcaggaggcagcagcccgtggctgggtgggagactgcagggtagacgggacgggaccaggagggttgttcgcagggactgccaagccatccccaggtgtcgagagtgtgaggtaggagtgggagcccagagccggctccaggccaccccaactcccgacagctctcggctgttctgtgtgaggggggacggggccgagtgtgggtcggcgcagtgctgaggtgtcccacgtaccccagcactgtgctgaatgcattgaaatcactgcccagggctccgcgagctgcacggcccggctttgtcaatttcattgctgttgatgccaattaggggtgacgctgtccctcccgcatcccagggtgggcagagggaggggccggcttgttccctgggggcaggcgtgcatggagtcagcctggccatggagctgtggccaagagggcagcgggggcagctggactggggtttttgccgacgctctaatttggcggctgtcgccacccctcccccccatggagaccctgacgtggcctgagccagactccaggggccatgtgccctgctggggagcaggggctcagcatcaggtctggtgcactgactgggagaggggggtctccagccctggacaggctctgagtggggtggggtcccccagctgctgtgcccagccctgcccccaggacctggccttggccctgcgctggccggggccagggagggagtgggcccagctcccaagtctgtgtgaccacctcggctggggcactgacagcccggggtgcggagggcccagcccgtgacacccgccgtcagccgcgccctctgcctccagcccgtggaccgggagcccgtggaccgggagccggtggtgtgccaccccgacctggaggagcggctgcaggcctggccagcggagctgcctgatgagttctttgagctgacggtggacgacgtgagaagacgcttggcccagctcaagagtgagcggaagcgcctggaagaagcccccttggtgaccaaggccttcagggaggcgcagataaaggagaagctggagcgctacccaaaggtggctctgagggtcctgttccccgaccgctacgtcctacagggcttcttccgccccagcgagacagtgggggacttgcgagacttcgtgaggagccacctggggaaccccgagctgtcattttacctgttcatcacccctccaaaaacagtcctggacgaccacacgcagaccctctttcaggcgaacctcttcccggccgctctggtgcacttgggagccgaggagccggcaggtgtctacctggagcctggcctgctggagcatgccatctccccatctgcggccgatgtgctggtggccaggtacatgtccagggccgccgggtccccttccccattgccagcccctgaccctgcacctaagtctgagccagctgctgaggagggggcgctggtcccccctgggcccatcccagggacggcccagcccgtgaagaggagcctgggcaaggtgcccaagtggctgaagctgccggccagcaagaggtgagagctgccagcctgaggtgcccactccgccagccacaggaccacctcctctgccagcaggaataaagacttgtgcatccctc

SEQ ID NO: 371 - DNA, 4527 bp, Homo sapiens
gtgagtcacaatgcaagtctggcaggaggcagtgggggacacagggcccaggccctctcagaatagtggcagctccagagacctcagcctctctccctgccccagctggctccatctacccacatgtccacactgccaccctggctgccacttatgccaccaggacagctcacctggttctcatggcaggggccctggcagtactcagtgagggtctccaaggtctggatgacgaggcccacgttgtcctcattgatgtagagccccagcagccccaggccgcccgtggtgctgccgcacatgatgtccaggaactgcagcgtctcgcataccaagttgtagttggttttgttgttctgacagcgcaggaagttctgcggggcacagaagggttgggcacagcacagctacagcacggagagggaggctggcctgggaagcacgatcttgtgtgctgcaggggtaggggaaccaccagccacaaagcagcagtgcccagggcagggcacacctgccatagagggacaccagccacactgcctagtctgcatgccggctggccagcgggggaaggggcaggtgtgtggcgaggcactcacctgcaggtcccggttgtggttctcacacagcagctgcagaaagcgcaggatgggctgcatgatgagcacggatgtgcccatctcactgctctgcacacgttcgctcacctcgtgcccccggcgcaggctggggcccagcgagtagcgggatgaggagccaggtatcgagaaggaggccacgcggcctgtgggcgagacctggtgaggctggagctgcccacccccttggccacccccctgcacatcttatcctgggatccccgtcacgccgtgcctctgcctcagacccctgacctttggtggtggggtcgactggctcgcggtcctcatgtggctggctgcccaggtcattcatgttgactgccaccgtggacttggtctcctgctgggcccgcttcatgcggtcgtgcagcaccttgaagaagcgctctgacttcttgtcactcatcatcaggttgtggaaggatttctggaggtggacagtggccagggagcaacctcagcactgggccctgctcctactcagggcgtggggcaggcacaccacactgctggggccgctggggctgcaggggcctggctgcaggcctgggtgctggtggctagcatccatggccacccatgggcggctccatgccccatatctgctcctgtgtcacgtggtcctttcatcacccccgcatacccctctgccccagccaggcctgagcccgtctcctcaccaccctgcccccatcatgcccactcttctcacctctcagccactgctcaggcctctcctctttcacaccctcctcggccttcagtgcccaactcaaggcccacctcctccaaaaagggagggaggcaaaggagggcatgtccaggccccaggccccccacacctggatctctgtgttgccaccatccagcaggtggatggccaggccgatgctctcctggaagatcttctcgttcttggtgctggtgatgaggtcgcataccaacttggtggccccctccttgtccagccggcactgggtggctgcgattgccgaccagtctgggtccaggcctggaggcgggactcggttgagggagagctggtgtgacaggagagtggaagggagggcccgggggcaggggaaggtgatactgaccagtgcctatggggtcgggaaggtccccccgcgaggtggacttccggttctggaggtagttttgcagcagcatcttgcgcagctggttgccctgggggaggatgggagtgaggccccattgtgggtacagcccaccactgaccactggcctgacgggcttgaccctgagcccctgggtactcctgactggcccacccagcacttgccccaccagggcactcacccggtccccgtacttggtcttcttgagcagcatctgctgcagggtccgcagcaccttgatgcacagcttctcctccgactccatgaggtccttggtgtgctggatcagcctgagccggccaaggaggcagctcagggcagccccacactgcctccctccagctacttccccaccccatcccaggcaggaacacccccaggccctctgacccagtgagcctgtctagtccccaccgggcccttctctgtcccctgccgctgcacccctcctgcccccatgccccagtgtctcgctcacttggacaggaagcccccactctcgcagcgctggtaggcctcactgccctccaggaagagcagctcaggccagtgcaggacatccaccagcacggacagctcagcctgtaccaggggcttcagccgctcctccagggctgtgatgatgtcctggggtgggcagggcagagtcattgccaggcccaagaaatgacccgggtgtgactgccattcctccgacccaaacgccaaacagccccacagattgccctgcctctgtctgaggggcccacacccacagagacaccctgaacacagcgtgatgtctgtctgctcagagccctggctgggagctgccaagcctggcttctctcccagctctgtgtgaccttgggcaaaccccttagcctctctgagcctcagtctcctgccacgtggggaaaataatccaccacaccccctctacaggccaacgagacagcgcacagaaatgtgctgcatagacaggagggcgctgcaggagtgaggggtggtcccgaccccctcatgagctccaaccccactagcaggcctctgggttctccaggcttcctctggaaggaggttccccagtcccttgctgctgggtcggcccttagcagccccagagtgtagagaagccaaccagccccttcctggaagtgtgggcagaacaggaagaaacactccccgagaacttgcccctccaaagtaggggagctgctgactcaaccaagcagctcccgaggcagatgccaggcagccccacacccacctgcagcttctcaatgatgttcttgtagtcccactggttggcggtgggggtgacgcgggggaaggcccgcgtggttgccttgtagctggaggcgttccgctgggcggcagctgcacagctggctccactgctgagcatcgagctgatgtgggcatccaggtccatgggcagcaagatggcccggcccttggctgggtgggaagggagggagtgctggagtgctggtgcgggggcagttcagccagccagaggccaggctcagggctgccacaccaggagacagagtgaactagaccaagggtctgggagacagagacccccccaccccggcctatgcttgagggactgagaggctttcttccccttgttgggtaaaaggagtttctgcctctttgattccccccggctctaccctgacttccccttcctctctctcacctgtcctctcttcttccccaactgtccctaacaatccacaggcctgctcctgcctgagcccatctgcaaatacccataaaaaactagctggagaatgtcggcgagcatccttctctggggaactgacccagaggagaaaacagcttctctcaattgccaggatgaggcagacgccaagaagaacttactgacaaccacctgggagcaggagatgggcgagcttagggataaagtgtttattaggagggcaggcgtccccactgtgagcggcaggaggagtggtttggggctggccagtgccccgggacactcacccaccatggcgagggtccggatgcaggcctccacggagcccttgtgctgctgctgtagccacggacactcgaggaggcgtgtggtagactgcagcagctgcaccacaatcgtctggtgtgtctgcaagaagtcacagagcccgctgctgcagcccaggcccccaccctgggcaaccccaggtccaggaaccagggcccaatcagaatgggcatgggtggagagacggagccttcactagccaccatgtgcctctgtgccagttggaaaaaggtacttgtattcccttcagcagtgcacgacctgcccaactgtacacggcagccctgtaactcaccaaggccgtgggctcatagccatgttgctgacccttttaaaaaatgtttaaaaaaattaatgtcataaaaaggtgatggatttacatggttgaaaaaccaaaaggttatttaaaagataacactttgaggctgggcgcagtggctcacacgtgtaatgtcagcactttgggaggccaaggtgggtggatgacttgcggtcaggagttcgagaccagcctggccaacatggtgaaaccctgtctctactaaaaatacaaaaattagccgggcgtggtggcgggtgcctataatcccagctactcaggaggctgaggctggagaattgcttgaacctgggaggcaggggttgcaagtgagccaaggttgtgctactgcactctagcctgggacaccaagtgagactccgtctc

SEQ ID NO: 372 - DNA, 3531 bp, Homo sapiens
gcgtccccggcccgggcggactggagactcgaacttgagcgggtgcccgaaaggccgcaggagccgcgggcggaaggcggccgcacgatggccgaggggcagggcggcggagggcagcgctgggactgggctggcggcggccgggcagccgaggaggaggtggtgcggcggcgatgccggcgcggggaggaggcccaggtcgcgcagccctggcccgagggttcccggggcacggccgctgggcccccggtggaggagcgtttccgccagctgcacctacgaaagcaggtgtcttacaggaaagccatcaccaagtcgggcctccagcacctggccccccctccgcccacccctggggccccgtgcagcgagtcagagcggcagatccggagtacagtggactggagcgagtcagcgacatatggggagcacatctggttcgagaccaacgtgtccggggacttctgctacgttggggagcagtactgtgtagccaggatgctgaagtcagtgtctcgaagaaagtgcgcagcctgcaagattgtggtgcacacgccctgcatcgagcagctggagaagataaatttccgctgtaagccgtccttccgtgaatcaggctccaggaatgtccgcgagccaacctttgtacggcaccactgggtacacagacgacgccaggacggcaagtgtcggcactgtgggaagggattccagcagaagttcaccttccacagcaaggagattgtggccatcagctgctcgtggtgcaagcaggcataccacagcaaggtgtcctgcttcatgctgcagcagatcgaggagccgtgctcgctgggggtccacgcagccgtggtcatcccgcccacctggatcctccgcgcccggaggccccagaatactctgaaagcaagcaagaagaagaagagggcatccttcaagaggaagtccagcaagaaagggcctgaggagggccgctggagacccttcatcatcaggcccaccccctccccgctcatgaagcccctgctggtgtttgtgaaccccaagagtgggggcaaccagggtgcaaagatcatccagtctttcctctggtatctcaatccccgacaagtcttcgacctgagccagggagggcccaaggaggcgctggagatgtaccgcaaagtgcacaacctgcggatcctggcgtgcgggggcgacggcacggtgggctggatcctctccaccctggaccagctacgcctgaagccgccaccccctgttgccatcctgcccctgggtactggcaacgacttggcccgaaccctcaactggggtgggggctacacagatgagcctgtgtccaagatcctctcccacgtggaggaggggaacgtggtacagctggaccgctgggacctccacgctgagcccaaccccgaggcagggcctgaggaccgagatgaaggcgccaccgaccggttgcccctggatgtcttcaacaactacttcagcctgggctttgacgcccacgtcaccctggagttccacgagtctcgagaggccaacccagagaaattcaacagccgctttcggaataagatgttctacgtcgggacagctttctctgacttcctgatgggcagctccaaggacctggccaagcacatccgagtggtgtgtgatggaatggacttgactcccaagatccaggacctgaaaccccagtgtgttgttttcctgaacatccccaggtactgtgcgggcaccatgccctggggccaccctggggagcaccacgactttgagccccagcggcatgacgacggctacctcgaggtcattggcttcaccatgacgtcgttggccgcgctgcaggtgggcggacacggcgagcggctgacgcagtgtcgcgaggtggtgctcaccacatccaaggccatcccggtgcaggtggatggcgagccctgcaagcttgcagcctcacgcatccgcatcgccctgcgcaaccaggccaccatggtgcagaaggccaagcggcggagcgccgcccccctgcacagcgaccagcagccggtgccagagcagttgcgcatccaggtgagtcgcgtcagcatgcacgactatgaggccctgcactacgacaaggagcagcacaaggaggcctctgtgccgctgggcactgtggtggtcccaggagacagtgacctagagctctgccgtgcccacattgagagactccagcaggagcccgatggtgctggagccaagtccccgacatgccagaaactgtcccccaagtggtgcttcctggacgccaccactgccagccgcttctacaggatcgaccgagcccaggagcacctcaactatgtgactgagatcgcacaggatgagatttatatcctggaccctgagctgctgggggcatcggcccggcctgacctcccaacccccacttcccctctccccacctcaccctgctcacccacgccccggtcactgcaaggggatgctgcaccccctcaaggtgaagagctgattgaggctgccaagaggaacgacttctgtaagctccaggagctgcaccgagctgggggcgacctcatgcaccgagacgagcagagtcgcacgctcctgcaccacgcagtcagcactggcagcaaggatgtggtccgctacctgctggaccacgcccccccagagatccttgatgcggtggaggaaaacggggagacctgtttgcaccaagcagcggccctgggccagcgcaccatctgccactacatcgtggaggccggggcctcgctcatgaagacagaccagcagggcgacactccccggcagcgggctgagaaggctcaggacaccgagctggccgcctacctggagaaccggcagcactaccagatgatccagcgggaggaccaggagacggctgtgtagcgggccgcccacgggcagcaggagggacaatgcggccaggggacgagcgccttccttgcccacctcactgccacattccagtgggacggccacggggggacctaggccccagggaaagagccccatgccgccccctaaggagccgcccagacctagggctggactcaggagctgggggggcctcacctgttcccctgaggaccccgccggacccggaggctcacagggaacaagacacggctgggttggatatgcctttgccggggttctggggcagggcgctccctggccgcagcagatgccctcccaggagtggaggggctggagagggggaggccttcgggaagaggcttcctgggccccctggtcttcggccgggtccccagcccccgctcctgccccaccccacctcctccgggcttcctcccggaaactcagcgcctgctgcacttgcctgccctgccttgcttggcacccgctccggcgaccctccccgctcccctgtcatttcatcgcggactgtgcggcctgggggtggggggcgggactctcacggtgacatgtttacagctgggtgtgactcagtaaagtggatttttttttctt

SEQ ID NO: 373 - DNA, 4712 bp, Homo sapiens
attttttccgatggacgcttctccttttggctgctgacggagccacgggaagatgccgagctcctgccacgccaccgggccggggcacgttccgggagggcgccggggcacgcgtgtgtctgagctgcctttctcctcccgttgctagggaaatggtccaggagtgctgggtgtgagcctcccttctcctcaagccggagactgcggttgtcattgatcaattgaagaagcaaggacccgaaatcacagacattagcaatgatgtgtgaagtgatgcccacgattaatgaggacaccccaatgagccaaagggggtcccaaagcagtggctcggactcagactcccattttgagcagctgatggtgaatatgctagatgaaagggatcgtcttctagacacccttcgggagacccaggaaagcctctcacttgcccagcaaagacttcaggatgtcatctatgaccgagactcactccagagacagctcaattcagccctgccacaggaatttgctgcactgacaaaagaattaaatgcctgcagggaacaacttctagaaaaggaagaagaaatctctgaacttaaagctgaaagaaacaacacaagactattactggagcatttggagtgccttgtgtcacgacatgaaagatcgctaagaatgacggtggtaaaacggcaagcccagtctccctcaggagtatccagtgaagttgaagttctcaaggcactgaaatctttgtttgagcaccacaaggccttggatgaaaaggtaagggagcgactgagggtttctttagaaagagtctctgcactggaagaagaactagctgctgctaatcaggagattgttgccttgcgtgaacaaaatgttcatatacaaagaaaaatggcatcaagcgagggatccacagagtcagaacatcttgaagggatggaacctggacagaaagtccatgagaagcgtttgtccaatggttctatagactcaaccgatgaaactagtcaaatagttgaactacaagaattgcttgaaaagcaaaactatgaaatggcccagatgaaagaacgtttagcagccctttcttcccgagtgggagaggtggaacaggaagcagagacagcaagaaaggatctcattaaaacagaagaaatgaacaccaagtatcaaagggacattagggaggccatggcacaaaaggaagatatggaagaaagaattacaacccttgaaaagcgttacctcagtgctcagagagaatctacctccatacatgacatgaatgataaactagaaaatgagttagcaaataaagaagctatcctacggcagatggaagagaaaaacagacagttacaagaacgtcttgagctagctgaacaaaagttgcagcagaccatgagaaaggctgaaaccttgcctgaagtagaggctgaactggctcagagaattgcagccctaaccaaggctgaagagagacatggaaatattgaagaacgtatgagacatttagagggtcaacttgaagagaagaatcaagaacttcaaagagctaggcaaagagagaaaatgaatgaggagcataacaagagattatcggatacggttgatagacttctgactgaatccaatgaacgcctacaactacacttaaaggaaagaatggctgctctagaagaaaagaatgttttaattcaagaatcagaaactttcagaaagaatcttgaagaatctttacatgataaggaaagattagcagaagaaattgaaaagctgagatctgaacttgaccaattgaaaatgagaactggctctttaattgaacccacaataccaagaactcatctagacacctcagctgagttgcggtactcagtgggatccctagtggacagccagtctgattacagaacaactaaagtaataagaagaccaaggagaggccgcatgggtgtgcgaagagatgagccaaaggtgaaatctcttggggatcacgagtggaatagaactcaacagattggagtactaagcagccacccttttgaaagtgacactgaaatgtctgatattgatgatgatgacagagaaacaatttttagctcaatggatcttctctctccaagtggtcattccgatgcccagacgctagccatgatgcttcaggaacaattggatgccatcaacaaagaaatcaggctaattcaggaagaaaaagaatctacagagttgcgtgctgaagaaattgaaaatagagtggctagtgtgagcctcgaaggcctgaatttggcaagggtccacccaggtacctccattactgcctctgttacagcttcatcgctggccagttcatctccccccagtggacactcaactccaaagctcacccctcgaagccctgccagggaaatggatcggatgggagtcatgacactgccaagtgatctgaggaaacatcggagaaagattgcagttgtggaagaagatggtcgagaggacaaagcaacaattaaatgtgaaacttctcctcctcctacccctagagccctcagaatgactcacactctcccttcttcctaccacaatgatgctcgaagtagtttatctgtctctcttgagccagaaagcctcgggcttggtagtgccaacagcagccaagactctcttcacaaagcccccaagaagaaaggaatcaagtcttcaataggacgtttgtttggtaaaaaagaaaaagctcgacttgggcagctccgaggctttatggagactgaagctgcagctcaggagtccctggggttaggcaaactcggaactcaagctgagaaggatcgaagactaaagaaaaacacatctgggcatgaacttcttgaagaagctcggagaaagggattaccttttgcccagtgggatgggccaactgtggtcgcatggctagagctttggttgggaatgcctgcgtggtacgtggcagcctgccgagccaacgtgaagagtggtgccatcatgtctgctttatctgacactgagatccagagagaaattggaatcagcaatccactgcatcgcttaaaacttcgattagcaatccaggagatggtttccctaacaagtccttcagctcctccaacatctcgaactccttcaggcaacgtttgggtgactcatgaagaaatggaaaatcttgcagctccagcaaaaacgaaagaatctgaggaaggaagctgggcccagtgtccggtttttctacagaccctggcttatggagatatgaatcatgagtggattggaaatgaatggcttcccagcttggggttacctcagtacagaagttactttatggaatgcttggtagatgcaagaatgttagatcacctaacaaaaaaagatctccgtgtccatttaaaaatggtggatagtttccatcgaacaagtttacaatatggaattatgtgcttaaagaggttgaattatgacagaaaagaactagaaagaagacgggaagcaagccaacatgaaataaaagacgtgttggtgtggagcaatgaccgagttattcgctggatacaagcaattggacttcgagaatatgcaaataatatacttgagagcggtgtgcatggctcacttatagccctggatgaaaactttgactacagcagcttagctttattattacagattccaacacagaacacccaggcaaggcagattcttgaaagagaatacaataacctcttggccctgggaactgaaaggcgactggatgaaagtgatgacaagaacttcagacgtggatcaacctggagaaggcagtttcctcctcgtgaagtacatggaatcagcatgatgcctgggtcctcagaaacattaccagctggatttaggttaaccacaacctctgggcagtcaagaaaaatgacaacagatgatggcgtcttttcagtctactctacctaaagtgcactaccatctaagaagacgagcagtgaaaacctttgtgaaaactgaattctaaggaaataatgacgtcatgacttattaaaagctgaaaaatgtgatttttggggggagtcagatattacatttgattagtttactacaaattgtaataaaatgcttaagtcatttgaataataaacatcatctacatcataaactctgtacaacagatgcttttatgaaatgaagccagttgtttttcatgttttattgtaatatactaggcatttatgtattaccgtgcatttctttttaaatgtgtaagtcttatgtaaatggatataaatatgattttttaaaaaataaaatatatggttcatggagtctcgagtgcaaacatttgacaattccaagtactgtttgtattttaccattccaccatttttacagtttttggattgttaatagtcaaatcaatatgtttccttgaagcatgtttcatgcttcaacgtgtttctccttcaagtctgtcaatacttaaagctgaacaacctgcctctgatcatgtaaaaaagaatgatttaacctggaaccggagccaaaaatagagctttaaaggcaatcagggatgtcctatatctttagaaatagcactgtgatggcttgatctccttttcaatacaaaacaaagccaagctgtttacaagggtcaaaagcaattatttaaaaatttatattaaaaaaccataatcttctcttgttacctgtggacc

SEQ ID NO: 374 - DNA, 4284 bp, Homo sapiens
aatcaccaatcactaagtcttgtcccagtttccttgaggtttaaatgggacattttttccaccagaggttttgacccccagcaagaattctggcagtttatagccccttggcgtgagtgggtccccccaaccccttctgttctgtcccttcttcccagtccctcccctgcttcccttctcccctatcctctgcactaaactgtaacgagcagtaggcctctgaaagcctggaactgccatcccccaatcaaaagacagcagctttgccctttcagaggaaggtacctaaccaggcatcaagcatctccttgaattttcctaatcaaattgtagacaggcatcaccttcccccttctctttcctgcccagcacacaccctctcagtagcagaggcttagtctccacctccccactgagcactgtttttgcctcccttgaagcagcagctgctatggagagagcccagccttgcagtctagacctggactccaagcccagccttgccactcacagtggcagctttgtgggtctgtttcctcccttgcaaaatgattccatataaaacagattctgggtctgatcaccatgactgcatgccactagcctgcctcatcctcttatccctcctccttttctatagcaccagccggccacgggccatggctatccttggaacagagggtcgaggctccttctcctgccctaaaaccaagactgatgggagccccaagagcactagctctccggtaaccacctaccacctgcagcgggcactgcctgggggcatcatcctcatggaactggcattccagggctgttacttctgtgtcaaacagtttgccctggaatgttcccgaatcccaatggggcaggctgtcaactcacagctgtccatgctgttcacagaggagtgtgacaaggtgcgggacctgatgcacgtgcactcgttcagctatgacttccatctgcgcctcgtgcatcagcacgtgctaggtgcccatctggtgctgcggcacggctaccacctcaccacctttctgcgacacttcctggcccaccaccctgacggaccccactttggccgcaatcacatttaccaagggacattggagctccccacaccactcattgctgcccaccagctatacaactacgtggctgatcacgccagctcttaccacatgaagccattgcgaatggcccggccagggggcccagaacacaacgagtatgccctggtgtcggcatggcacagttctggctcctacctggactctgagggacttcgacaccaggatgactttgatgtgtctctgcttgtctgtcactgtgctgcaccctttgaggagcaaggagaggctgagcggcacgttctgcggctacagttcttcgtggtgctcaccagccagcgagagctcttccccaggctcactgctgacatgcgccgcttccggaagccacccagactgccccctgagccagaggctcctgggagttcagctggcagccctggggaggcctcagggcttattctagcgcctggaccggctcctctgttcccaccactggctgcagaggtgggcatggcacgagcacggctggctcagctggtgcggctggctggagggcactgccgtcgggacaccctttggaagcgcctcttcttgctggagccaccggggcctgatcgactgcggctaggggggcgcctggccctggcagagctggaggaactcctagaagcagtccatgccaaatccattggggacatcgacccccagctggactgcttcctatccatgacggtctcctggtaccagagcctgatcaaagttctcctaagccgcttcccccagagctgtcgccatttccaaagcccagacttgggaactcagtacctggttgtgctgaatcagaagttcactgactgctttgtgctagtgtttctggactcccacttaggaaagacgtctctgacagtggttttccgagagcccttcccagtacagccccaggacagcgagagcccccctgcccaactggtctccacctaccaccacttggagtctgtcatcaacacagcctgtttcaccctctggacccgcctcctctgagggagtggactggaccactgaatgtcactgttccttgaatcatgggcctaccaaattgcctgccagaggcaggactgaccagcccttctgggccccagggcaagccagacactgagtgacaccaaaggctttgtaactatgtcttgagggtctgctgccccagcctggcagcaggaaccgccctccccaaacacccacagccactgacccatccaggactccagagagtcaggtcaaccccgaggaccccttgggcccttctggggtactcctttcggcccccctggtagagtctcgggagttcacacagggtggcaaacaccccctagagctcctctgcctgaatcctgccccctagcctttgaccactgtcagccacctgtgtcccttgagccttcgggtcttcacttcccacttggacatcactgctggacattcccatcgagatgacacctgggttccaatcccagctctgcctttgaagcacttgtggccaccgtcaagtccctttgctctcggaccctgggtttctcatcctttaatgaggtgggttcagaagctctcccatcttcacagcaaccctggcactggcttctcaatgggagggaagcagcagagaaactgaagtgttagacactatgtgtcccaccaccccattacagagacatatgacaatgttcagcaggtcatctttaatgcagaggaggagatgggatgtcactcgctgtctggaggcacgtgggtggtgtgcgggccctcactggccagcctctgggtggccccgcctatcccagtatggacgtagccaactcaagccctctactgtgtctcctgcagggagagggaggcctcggcacctcagcccacaaggagaaaacagcccctgtccgggtccctccagagctcccttccccagggccacgcctcacctcgaggctgatactcacagcccacgaagcctttgtagccttcatcttccagcagttgaaacagataggggaaattcagctctccggggctgctgggctcccctcggcctgggacctgtgccacctgcacatgccctggggacagatgtggacaaatgtggggtccaggctcctgccagggcctgaaggacagatgtggggattgaaagggtgggagggcaaaggaaggtcctctcaccaacaatgggcaggaactcccggatgtttcctgtcaggttcccatccatgatctgccagtggaatatgtcctagggaagaggatactacactccgagaccccgcaggccccgccctccttccgatctgcgaagtacccccttccacttaccatttgtaattggaggttgggtcttcctaccttctgtaagatggctgccgctgtaagagaagccagggaggggaccgtgagcctcaagagcacaggaatcaaaagggacagaaggagagacagggctggggtcgtaccctgctggggcgtgtccaggaagtactggggatcagtgatgcgggtgttgatgggctccagcagtcccacgaggtcctcctagcagcatgtcgggtgctgtgaatagagctccttcccaagtttgtcccccatcagtcagtcactggtcaaggccctcacctgttcctctgacctaggctggcagcctcacgtgctgtccccactgtgcacccccttctccgcacacccacagagacatgtaagtacgtgtgtgtttccacctttctcacctgagccaaaaccccagctgcatgcctcaggttctccagaaaaacggcctccatctcagccttgactgctattcgatcagctccctggggtactcggccagccatcaggtggatcctgtggggaagatggactggaggccttgcctcccttggctctctctgcacctcttccaggatcccctgactgtgccagccctcgtccgtctccccaggtctccagtccatggcacctgggtcacgatgcccaggtatcccagcactttcagagacacttcagtgatggctgaggggcaagccctttcccagacatctcagtgtccacccaccgcctcctgcctccagtactttccaaaacctttccttccctcggtccttctccgcaacctgtaacctgctaaattctcacctttaaaaattgtcctgacctttgcttgcccttctcaggt

SEQ ID NO: 375 - DNA, 3431 bp, Homo sapiens
aggcgccgccatggccgccgctatcaccgacatggccgacctggaggagctctcccgcctgagccctctgccccccggcagcccgggttcggcggcgcggggccgggctgagccccccgaggaggaggaggaagatgagagcagcagcagcggcgggggtgaggaggagagtagcgccgagagcctggtgggcagcagcggcgggagcagcagcgacgagacccgctcgttgagccccggcgccgccagcagcagcagcggggatggggacggcaaggagggcctggaggagcccaagggaccgcggggcagccagggcggcggcgggggcggcagcagtagcagcagcgtagtctccagcggcggcgacgagggctacgggactgggggaggcggaagcagcgcgacctccgggggccggcggggcagcttggagatgtcgtcggatggggaacccctgagccgcatggactcggaggacagcataagcagtactataatggatgtagacagcacaatttccagtgggcgttcaactccagcaatgatgaatggacaaggaagcactacttcttcaagcaaaaatattgcctataattgttgttgggaccagtgccaggcttgcttcaactctagcccagatctggcagatcacatccgttccatacatgtagatggtcagcgaggaggggtatttgtttgcttatggaaaggttgtaaagtatataacactccatctaccagtcaaagttggttacaaaggcatatgctgacacacagtggagacaaacctttcaagtgtgttgttggtggctgcaatgccagctttgcttctcagggagggctagctcgtcatgtacccacacacttcagtcagcagaactcctcaaaagtttctagccagccaaaggccaaagaagaatctccttctaaagctggaatgaacaaaaggaggaaattaaagaacaaaagacgacgctcattaccacggccacatgatttcttcgatgcacaaacactggatgcgataagacatcgagccatatgctttaacctctcagctcatatagaaagtttagggaagggacacagtgttgtttttcatagtactgtaatagctaagagaaaagaagattctgggaagatcaaacttttgcttcattggatgcctgaagacattctgcctgatgtgtgggtgaatgaaagtgaacgacatcagttaaaaactaaagtagttcatttatcaaagctacccaaagatactgccttgcttttggacccaaacatatacagaacaatgccgcagaagaggttgaagaggtaaaaaataaataaatacataaaaagcaaacaagcggggacacctgcagtcttagtcactgacaatgggtttagggaaagttgcacattagagtcaaccccttctttttttttttttttttttttaaatccagtatttaggataatatttatgcttagtgtaaacattctgtgaatgaagtagactcttcggtggaatatattaatatattactgtatatccacattttcatggaatggtactgtgggagactgagcaaacactcttttggcaacttagtagaacagcttcttaaaggctttgcatgcttgctgctttaagctgcttttttttttcttttcttccctttagtgatttcagtagtttatattggaaagaaaaacaattacaacatgtgcccttacaaataccaaaagcactgtaaggatatttgtcttgacagtgtttattgatttgaagtcatattaggaaatatttagacaatgaaaattatcaagagataatttacctttcaattatgataaatagatgtgattggttgccatttgtgttcttttgcagaactctgataagaaaagtgttcaatttgtatttaagcaaacagtgaacgacgtttgcaatcaactaaaaattcgtctatcgaattagggctgaaaattactgttaaagagtgttgcagtatgtctggtggctcccttttcaggactagggctttctcatggagtacagtatgttaatatttacctatataactaatctgttaacggtttttgaaaaacctttcaaattatttgaataatcttcatattttcatttaacctatatgactctaattttttttctgaggaaatcatttggtttttgagttgttttttcttaatgtaagaaaaattgtattttttttacaagtatcttcaaactgaatcttttatgcaccaaagttggtcttgaaaaggaaaataaaatcactctcttgcttggtaagcaagaagccatatcgattttttttaacttacagaaatggaaatatgtgtaacttgttagtattgtattaaacaaatgttgcatagagataatagaacattgcttgtaaataattcagcagatttgtaatatatttttatattttgaaatgtactgtagatgttttctagaggcatgaaagttaaatgtatatattatggtagaaataatattgaaggatattgtacttcactagtgctgccagaggaattgttaataaaagcaccttctttaacaataaatgtctttcacagacttaagggactatgtactactgttaatatctctaagaacaaaacacattgaacatccttccagaaagtctttgagggaggacctatacccataatagaattatggcactcatttctgacagtgatcaagaaatcagttatttccttactgttggaaggacattgtaaagtatgtggttatatgcagtgaaactgcagaaaatactcctggttgaggagttttcactttactacagtgatataaaaaccagcagtttttacactaaattttttaaagaaatattagacaaaaatatagaattaaaacctttggttccaaaatgggaaaggttccacgatacataaatcatttctcatttgctttaaaaaatttaaaagtgtaaaaattatgagagactttattcgttaacaatgggggtaaagagctatatacatgaaaatgagtcttataaaattaagtgaagtgcaaataaaagcactgctactataagacattctggaatggttgtttaataagggtattatccatttgatctatagcaatgtgattttatttttaaaaagaaaagcagtgtgttttctttttttgttgttttcttttgcttaagcacttcatcaattgctttattctgtatctgcgaagtaatctgcaatctcttttgttctttttaaaatttgatttgttataaaattgccaaatagaagtgtttcagatacatagtttgtacctgtatttttattttattgcctcatgttcttgtaagtcattcttaattgaccaatgattgtagaccttgcttgagtattttttctaataaaacaaagcaaatcac

SEQ ID NO: 376 - DNA, 4336 bp, Homo sapiens
aatcacatcaaatccaactcggatgttactcccacccaggaatattgcctctaagcttccagatgcagcggccaaaagcaagcctcaacaaagtgcttctggaaacaatgagagctctcaagttgagtcaacaaaggaaggaaatccaagtaccactgcctgtgactctcaagatgagggcagaccgtgttccatgaagcacaaagaaagtcccccaagtaatgccactgcagaaaccgagcctatcccacagaaattgcaaatgcctccttgctctgaatgtgaggtgaaaaaagccccagaaaaaccattgaccagctttgaagggatggcagctagagaagaaaaaatactgtaaatactaagaaactgtgttaaaaacgtccatttgctattgtcttcatattctttttagaccacaagcttgatggaaatactgtttctaaagcatgcaactttttcacaattttatgtaactttataaagtagcctacacattttcaaagattccagaccaattatgatccttaagcaataacctcattgaattgaatacccacagtcagaaatattttgttgtcaacagtaaattgtcccatataaattggtctggtttaactcaaatgctatctaacatgtaattctcccggttcatttggatatctagtacttctatgatatagttgtcaaaatcaactggaggataataaaatattgtgggttctcagcattcttagaatccaaattacaaccatatcagtaagggtttggtccacatgagccaactgaagtcattttcctcaaggttggaatttgtgccaacctaaatacgttgtttctttgatggtgtttattgctattggtattattttgaactaataacaattattttgtctaaatgatgctaagacaattctgttaagaattttgtcagctaacataattcattaagtatgtttggcatcatatggacaaaatatttggatgaatgactgaatttctgacacaattaaatattttggcattctatagacacatctcctatgtatgtctaccgtaattaatccaagttaataaccaagttttctgaaatacttggcaggatttttggtatgaagttgggtagtggaatagggaatgaagagtgagttctaaaatacaaatatgaaagcaggtaatatatatcacaaaacaggggtctgatgaaagtacaatagccatgttgattcaataaacccagatgcatattttttgaaaaccaatgtgttattgaaacaaatcaatggcagtgttaatccataagagttctgattttctataggaatatcactaatcaaaaaaatgcactcatgaataattggaagatagctcacaagcaagaggaattgacccttgaataattatctgattaataggtttcatagggcattcaaagttgcagactcagttaatgactacagttaagttgtctggactgaaaagtcatttcttttgtttagaacctttttgcaaccgtagaaagcatattaaaccattggttttgcaggatggatctgtcaaaccacaatatatacatttggatcagtgtatcctaggagacagttaataaaaatgtattaaaggaaatctttaatcaataaatgaacttagattctgagatttaatggcatacctctgatcaaaatggcatatttaaagaaatttaaagatttggagaattggaaaatatcgttagctgtaaaagtaatattatgacatatttatgtagcacttctattttcagaatagttcagtgtcattcattagcacaggcaggtcccaaccacaatggttcaacttaacggttttttcatgattctgtgaaagcttcataatttctacatgctttgaattttgaattttgttattttttggagggctagtgatacatggtccatgaaatattcaacactttattataaaatagggtttgtgttagacaatttgcccaactgtaggatgaggtatatgttctgagcacgtttaagcaggtttaagttagggtgggctatgattttccatttaggtatctgaaatgcatttcagacttacaatgttttcaacctttgatttctttatctgtatgtaatcctattgttaaatcaaggagcattcatatttttcataaaaccggctacccaaggaaaaaaataattagctttatggatgatccatagagctttcagatgaagtgactaggataaaataaaagatgaaggtctgaggtttcttctgactccttcatatttctaaaaataatcatacaaactagaatactgctagtctcccaagtcctgttccttgtaattctcccactgttctcagtggccctaaccatctctataggttcctgacagggaagcagatcatttagttttaatttatgttcagtctcccacctccaccctggggcccaacttcccttgcaggccttgtgggtcctatagaaagttattcaccatgtaatctagcacagcatgttttgaagcatctttggaatgaaaaaaaagaagaatcaggctgttatttcctgaaattgttatgagagataacatgttgaaaggtaagaactcaggttgatattaatcatgtttttatcaatcttcattttaaagttgtttttgttctgtatattctaaattccttttattaattcctggcttgatcaagtgggctttggatccatatgatttttttttttttttttttttgagatgaaatctcgctcttgttgcccaggctggagtgcaatggagcgatcttggctcactgcaactctgcttcccaggttcaagtgattctccctgcctccgcctcccaagtagctgggattacaggtacctgccaccatgcccggctaatttttatatttttaatagagacggggtttcaccatgttggccaggctggtctcgaactcctgacctcaggcgatccacctgcctcagtctcctcccaaaatgctgggattacaggtgtgagccaccgtgcctggccagtgtgtttttttcctttaaatatatatggcattatacatccagcaaagtttactgtgttatactcattgcatcatttgtttaaaaaaaaaaaagaaacttgtagcaggagacatttaaaaatatatttaggagttccttttaataactaagttagagactctctttcagtaagttctatgactgtaccttaatgaatgcattttatttatctcaatttttatttgcttcaaaatagaatcggataagtttaaaatgttcctcttacatttgtgaatgtgtctatgagagaggggccatttctcacatattttaattaacaactaaataaacagacgttgttttaaaggaattaacacttaaatcccaaccatcctcatatagaataaaatatcaacctaaatctttactatagatagtataattctattatgtacctgtaatgataagcattgaaagattatttacattttgaaaaacatggaattgattcttattaagaaaaaagatattttccaatggagtaacttgttttaatagaggtacaaccagaaccaacaattgtatttctctatagttattttaaaatagtaatcaatgctatgtatttgatgtatatgtttctaaattagaaatttcttttggctttgtgtttttttaatgtgcgttaaatatgtaaactgaacctgttcctaaaatgcattaaacttgaatgctgtgtctatccaatgccaaaatgctcagaagaaaagtgaataattcagtcattcatctggatgtagttttctgtgtaatctcaaatatctgaatattgaaaaaactaggttgctaacttttttcattccttatgcaaatgtttagcatcatagtgctgtttcagatacagatctgtttcatcaaatatcctcaattacaagtctaagacagttatatgtaaagaaaatgtattattttagatgaacaatgtggataactgaactaaaacgatatttgtgaactttgctataatgaaatcttttatttttatagctcaggtattgtaattagcactaattgcagcagagactgaaataattattgacaccgtagagtaccatagagtaggttgaactggccagacctagacaatgaagaaaacacatactgtttacttaggagacattttcttagtcgtgtgtatagtcctaaatttccccaaactatgtgttcatttggattgtgttatataataacagtcgaatgatgaagaataaaagatgctgaaagatggcctatttttgttcaataaagattgttacaag

SEQ ID NO: 377 - DNA, 3360 bp, Homo sapiens
attattcaaatcctaatagctaccatcacccatcttttaccaagtacagaggcttcatcttatgaaatggacaagaggttggtagtatctttacttctctgccttctggactggatcatggccttacctctaaagacactgctccaaccatttcatgctacgggagcagaaagcgataaaacagaaaaatctgttctcaattgcatttataaggttttacatgggtgtgtttatggagctcagtgttttagcaatccaaggtattttcccatgagcctctctgatttggcatctgtagattatgatccttttatgcatttggaaagtctgaaagagcctgagcctctgcactctcctgactcagaacgatcttctaaactccagccagtaacagaagtgaaaactcaaatgcagcatggattaatctctatagcagcccgcactgttattacacatctggtaaatcacctgggccattatccaatgagcggtggtcctgctatgctaacaagtcaggtgtgtgaaaatcacgacaatcattacagtgaaagtactgaactttctcctgaactctttgagagtccaaatatccagttctttgtgttaaataatacaaccttagtgtcctgtatccagatcagatcagaagagaatatgcctggaggaggtttatctgctggccttgcatcagccaattcaaatgtcagaatcatagtacgtgatctctctggaaaatattcatgggattctgctatactgtatggcccacctcctgtaagtggcttgtcagaacctacatctttcatgctttcattgtctcaccaagagaagccagaagagcctccgacatctaatgaatgcttagaagatataaccgtaaaagatggactttctctccagtttaaaagatttagagaaactgtaccaacttgggatacaataagagatgaagaagatgttcttgatgagctcttgcagtatttgggtgttactagtcctgaatgcttacagagaactggaatctcacttaatattcctgctccacaacctgtgtgcatttctgaaaaacaagaaaatgatgttattaatgctatccttaagcaacatacagaagaaaaagaatttgttgagaagcactttaatgacttaaacatgaaagctgtggaacaagatgaaccaatacctcaaaaacctcagtcagcattttattattgcagattgcttcttagtatattgggaatgaattcctgggacaaacggaggagctttcatctcctgaagaaaaatgaaaagctacttagagaacttaggaacttggattcaaggcagtgccgagagacacacaagattgcagtattttatgttgctgaaggacaagaagacaaacactccattctcaccaatacaggaggaagtcaagcatatgaagattttgtagctggtcttggttgggaggtaaatcttacaaaccattgtggttttatgggaggactacaaaaaaacaaaagcactggattgaccactccatattttgctacctctacagtagaggtaatatttcacgtgtcaacaagaatgccttctgattctgatgattctttgaccaaaaaattgagacatttgggaaatgatgaagtgcacattgtttggtcagagcatactagagactacaggagaggaattattcccacagaatttggtgatgtccttattgtaatatatccaatgaaaaatcacatgttcagtattcagataatgaaaaaaccagaggttcccttctttggtcccctttttgatggtgctattgtgaatggaaaggttctacccattatggttagagcaacagctataaatgcaagccgtgctctgaaatctctgattccattgtatcaaaacttctatgaggagagagcacgatacctgcaaacaattgtccagcaccacttagaaccaacaacatttgaagattttgcagcacaggttttttctccagctccctaccaccatttaccatctgatgccgttggctcctacccagagattctacccagtgaaactcccacagcaacgcaggtagatggggctgacctggcctctccaatgtctcctcgaactagcaaaagccgcatgtccatgaagctgcgtcgttcctctggctcagccaataaatcctaaggagacaagcagcccagcagtgatcagcagtagccaccttagcacgaacatagggttaaccctttcaggccttcatgtctgccataacatgcatgtttcttcctgtacatttatttgagaaaacactggatttaaataattttaaataatttgtagcttaatattaaagatttaagttatttattgtttcattttttttcccacaatccaagctgccatattttgagggcagggggagttttattctacaccctttaccttcctagataattatgtctaagtagttttatctttaatttcatggttaactgtgagccaaaatacaattggacaattagtctcattatttattgtgccccattgcaactttatggttcaataaatatataattttttacaaatgtaaaattttacatttaagcatttgtaaagttacagcaaaagatgtacctgttaatacacagaatgtgtacagattatttgttatgacaataaaacactcaaaataaatggtctttagcatctcaaattccaactgaaatcattttagtattaactcttcttcccaaagcaatgtctcatttcttggctgtgcaggtgatgccatgttatatccaataactagaaaaatcactgtgctgaacttttatgtttagcttccaagtatttttctaatgttttgcatttcaagtggtatcactgttaaatgccatttgttttcagatcgtggccttttattattggctgctagatcctggtgtttctatgttcttttttaagcaccaaaaagaagatggggaagaaaagaaggaaaattttctgatataaatatgttgttcaaattatgagtattatttaaaaaagaaaaaggaacataacccaggagtctaagttaaatctaatattgttaatactgaacttgcaggtccaggttggtatacattccaccctctagaagtattttcttacagtagataagctgctcacattttgttttgaatgggcatctcctgaggaaatgtagcatgacattggtactaactgcatgtgtaaatacatcatactggcaaaccgtaaaatataaattatgtatcatcattcatgtagtatctataatttgtaacagtgggggggaaagatgacatggtatttaataatacaataaaaatattcttatcacttcct

SEQ ID NO: 378 - DNA, 3995 bp, Homo sapiens
aagggagacaccccagctatgaaataggcaacaaggcaaagaacagcctggctcccgtgctgcggtgccccctccagcacgggaccctgctccgagctccctgactcccagagacaccggtgctctcggggctgacagggctcttttctttgaggactggaaggcaggcagcgggagcacagtaggggaatattgcgacatgcgagaacccaaaagcaagctggggaagcaaggattctgaggggagaggagcaacacgcacgatggggaatggctgcgtgggaagtggacccactgttctctgcagttcctctgtctgctcagcccctgcctgcccgcctgcctgtccatcccgtgctgcaggtccctggaacccggtgctgggcctgcactggaggctggagtgagggcgccagtggtgcagctggaaaggtggccccgggcagggcggctcctttcggccccgccaacggtgccagctcctccaagctccaggctcggcctggggcccaggacactgacctgagcaggaaggggctgctctgggcttccagcagccactgtctccgagtcctcggacgtcctttctgcctctttctcacagacccttgtgctcctggcctgacttggaggacactgtccacccctcagccttggcgcccatggaggcttctggaaagacctgccctgcctctgaatccaccatcacccagcacactggcgtttaggaagcaaagcattttgtgccatgggaaagcacaggaggaagaaccaaaaatgcttggctcaggtctcatggcactgcgtcatagccgtggacctggggcaggtgtctgtcttctctgagcttccttccctctcctgtaaaacagcaatggtggcaaaagcgtcacctgtcctgcagatgctttggaacgttgtgctgatcaagcaagaaaagcaatgcaaaggccccacaggagcctcgtcctctgaaaacattggtgtcatcataaccctgccccagtgccactccacactcgtgctattctggaagaggcctggccaccctcagagctgctggggagggcagtgctggctctaaaagctctgctggccccggcccctctgcccctcaaggctgtagctttgggtcctctgtgtttctgtgctggggccttagtttccgaaactgtaaaatgaaaatcagagcggtgaacctcatatcaatccctgctcccaccattctcagaaggaaatggtaatcaagcctcaaaagccccatggttggggcagctggactagaacttcactctctggccatcagctccgagtcatctgcgtttgggaaacagacgtctctgagcctcccccgtgggagaggagtccctcttgccatgaggaagaggaattttttccgtgggtctctcgggacaaggaacagagaccctgcttcccggagctgtggtcatgaagggtgtgctcctgcatggagacgccatggcaacatggtacctgggggcgggctgccatcaaggtgccaaccagagaggccacggcacagccacccggcggaaagcacacaaccattttaaggacttcctcgccaatctgacagcagctttcgcctctgacaggtgccgtttgtccacctccgttgcttctccctcttcggcacactcaccaggatgaggaagctggaacccggcgtcaaagctcttcctctttgaggttaaacccagatcagaaaaatgcagccactgaaagggtttacttaatggcagaagcacaggctgccgaactttgatttgttgtatccttctgtgcccagagccagagccccaatgtgggtcccacaaggtttcgtgccaagaggtctctgataccgacccctgtatcaccagcggacagaggcaaaggcccccaaaggaggccacgggagcttcacttccccatgaaacatgggagagaaaacacaaccagatatgccccgaccacatctacaaaagcagtatctgaatctctgcatccagcctcacagtttgctaagaggagaaacgctgatccttcctgtcatggggcaaagcaacaacctcccgagtagggcaccagaagggaaaccacacacacaagccacgggcgccagcggccgccaccctgcagcgctctcattcccagtatctgcaaggagctgcatcctctgcaaggagctgaggtaacagcctcaggttacctgaaatctgcatcagaacgaaaggcttgtctgtgaattttttcagacatagagaaaagcccgctattctggatggtgcacagctttctgtaaagaaagtaaatgcccgtgactttcattaactcgtgcgagccgatgattcaggaataaacataatcttcaacccggcaaagggcaaaaacacaggaaaaactgcatctgtcattcagacagaaaagaattctctccaaactgcaaaatctaaaatgccctgatcttgcttttaaaaaaaaatctaacatactctcctgaggcatggtaggagctgtttgaccagaaatcgaataatagcttccttgcggcggggagtggggggggacacgtatatatatatgtgctttttttcagaggaagctattatttaactagtattgtaactagtatttaactagtattgaaaagagaaccacagtgttctgtgatttctcggaattgccagagcattatgaagtcagggggatggagagtgagaaaaggggagacagcatggcccaccatttacagtcggatgtgtcgtctcatctccagccttgcagactttgacacacatgttctgtccaataatactgatttcactggtgcctgttttagctgctgggccagtttccatgggaaacagataccatgaccctaagcttcagatagtttgcagggggtctgctgtttcccactcccaccggtttttaggtagaaaatacgcacgcattgaaacagaagatccctggagagaaaggaagatgctgcgtaggtgactgtctcctttgagcatctttaaggaggatcatttaatcacttaaacaaggtttctggggatgtcaaggatctctgtgagccacaaaagaagtgtgatgtagggaaaatggcagaaaaggtgcatctatttcatctagaactacattttacgattcctaattcaaaaaatatactgaagaagcatattatcactttcacaagaaaaaaattatatcaaatatacctctgttctttcttatcatggcagctcagaaaaacagtgacaccactatctcctgtggttctgaacaggccacacagattcatccctgagctctctgtctctgagttttttcagattaacttctgagctctctggtatctgcacttcctgagagtgccagaagaatcaaatattactctgggaggtaaaaagagtaaaaagcaaattcattcgcccttcactctcagggccactgctgaaaccgtcgaaatgaacagcagaggtcccgaatgccgctttgtggatgtgtgcaaaaacccgccacgtgcaacctggaaattaaaggaataaggaccaggagatatgttggttggttggttttcagtcacatagacaaaataggacagtccagacgatgccatctgtcagtcctgaggcatcactctccactgaaaggaggaactgatgggccctttgttttaattacatagaaatgcgtcttttaaaatgacagagaaaattgaaaaatctcatctcattaactacactggcatttattgtatccatcagtgtttactagaaaattagttcccaattattttggtaaacagcagcaattgaagcttccctcattccctagacactaactggcatatgtcattgactttgtctacagatactagtttatttttctcgtctgtgagcacactgttagttctagccaatagcttcataacttactacaaggtaagtctacaaattcttgtaataaaatacaatttaaaaatc

SEQ ID NO: 379 - DNA, 5537 bp, Homo sapiens
tagggatccttatttgagccacgttgtcctcctttctaatacttctgcccctcaccctgagacccgcctcgcccacccccgcttcccagagctccctgtattccgcccttttattcacttgcctcactctctgtcgcctcctcctccctcctgggcattttacttatgctcactcctctggcactctcacacctttatgcagtcattcgtgaccacaagcccggtttttccttccgctcagccctgctgcccttcctttcattccctcctgtggacattttcacctggcgttacctgctgtcaaacggcctcctcccactggggcctttctagactcgggggccctccttggcccctcctcctggcaggaagcaagatggagctgttgggagaggcctgtggaatctgggatctgccgcccctgccggagagaaggctggggcatccgctccccatccacaactttcctggtggctctgcagacccctgtaacccacagctgtgactcataaccgaggttggaaaagagactgttcaaaccactgaggatcagattttgaagagagatatgccaccagcatttattaaggttgagaatgcttgcaccaagcttgtccaggcagctcagatgcttcagtcagacccttactcagtgcctgctcgagattatctaattgatgggtcaaggggcatcctctctggaacatcagacctgctccttaccttcgatgaggctgaggtccgtaaaattattagagtttgcaaaggaattttggaatatcttacagtggcagaggtggtggagactatggaagatttggtcacttacacaaagaatcttgggccaggaatgactaagatggccaagatgattgacgagagacagcaggagctcactcaccaggagcaccgagtgatgttggtgaactcgatgaacaccgtgaaagagttgctgccagttctcatttcagctatgaagatttttgtaacaactaaaaactcaaaaaaccaaggcatagaggaagctttaaaaaatcgcaattttactgtagaaaaaatgagtgctgaaattaatgagataattcgtgtgttacaactcacctcttgggatgaagatgcctgggccagcaaggacactgaagccatgaagagagcattggcctccatagactccaaactgaaccaggccaaaggttggctccgtgaccctagtgcctccccaggggatgctggtgagcaggccatcagacagatcttagatgaagctggaaaagttggtgaactctgtgcaggcaaagaacgcagggagattctgggaacttgcaaaatgctagagcagatgactgatcaagtggctgacctccgtgccagaggacaaggatcctcaccggtggccatgcagaaagctcagcaggtatctcagggtctggatgtgctcacagcaaaagtggaaaatgcagctcgcaagctggaagccatgaccaactcaaagcagagcattgcaaagaagatcgatgctgctcagaactggcttgcagatccaaatggtggaccggaaggagaagagcagattcgaggtgctttggctgaagctcggaaaatagcagaattatgtgatgatcctaaagaaagagatgacattctacgttcccttggggaaatatctgctctgacttctaaattagcagatctacgaagacaggggaaaggagattctccagaggctcgagccttggccaaacaggtggccacggccctgcagaacctgcagaccaaaaccaaccgggctgtggccaacagcagaccggccaaagcagctgtacaccttgagggcaagattgagcaagcacagcggtggattgataatcccacagtggatgaccgtggagtcggtcaggctgccatccgggggcttgtggccgaagggcatcgtctggctaatgttatgatggggccttatcggcaagatcttctcgccaagtgtgaccgagtggaccagctgacagcccagctggctgacctggctgccagaggggaaggggagagtcctcaggcacgagcacttgcatctcagctccaagactccttaaaggatctaaaagctcggatgcaggaggccatgactcaggaagtgtcagatgttttcagcgataccacaactcccatcaagctgttggcagtggcagccacggcgcctcctgatgcgcctaacagggaagaggtatttgatgagagggcagctaactttgaaaaccattcaggaaagcttggtgctacggccgagaaggcggctgcggttggtactgctaataaatcaacagtggaaggcattcaggcctcagtgaagacggcccgagaactcacaccccaggtggtctcggctgctcgtatcttacttaggaaccctggaaatcaagctgcttatgaacattttgagaccatgaagaaccagtggatcgataatgttgaaaaaatgacagggctggtggacgaagccattgataccaaatctctgttggatgcttcagaagaagcaattaaaaaagacctggacaagtgcaaggtagctatggccaacattcagcctcagatgctggttgctggggcaaccagtattgctcgtcgggccaaccggatcctgctggcggctaagagggaggtggagaattccgaggatcccaagttccgtgaggctgtgaaagctgcctctgatgaattgagcaaaaccatctccccaatggtgatggatgcaaaagctgtggctggaaacatttccgaccctggactgcaaaagagcttcctggactcaggatatcggatcctgggagctgtggccaaggtcagagaagccttccaacctcaggagcctgacttcccgccgcctccaccagaccttgaacaactccgactaacagatgagcttgctcctcccaaaccacctctgcctgaaggtgaggtccctccacctaggcctccaccaccagaggaaaaggatgaagagttccctgagcagaaggccggggaggtgattaaccagccaatgatgatggctgccagacagctccatgatgaagctcgcaaatggtccagcaagggcaatgacatcattgcagcagccaagcgcatggctctgctgatggctgagatgtctcggctggtaagagggggcagtggtaccaagcgggcactcattcagtgtgccaaggacatcgccaaggcctcagatgaggtgactcggttggccaaggaggttgccaagcagtgcacagataaacggattagaaccaacctcttacaggtatgtgagcgaatcccaaccataagcacccagctcaaaatcctgtccacagtgaaggccaccatgctgggccggaccaacatcagtgatgaggagtctgagcaggccacagagatgctggttcacaatgcccagaacctcatgcagtctgtgaaggagactgtgcgggagctgaagctgcttcaatcaaaattcgaacagatgctggatttacactgcgctgggttagaaagactccctggtaccagtaggcacctggctgagcctggctggcacagaaacctctactaaaaagaaggaaaatgatctgagtcccaggagctgcccagagttgctgggagctgaaaaatcacatcctggcctggcacatcagaaaggaatgggggcctcttcaaattagaagacatttatactcttttttcatggacactttgaaatgtgtttctgtataaagcctgtattctcaaacacagttacacttgtgcaccctctatcccaataggcagactgggtttctagcccatggacttcacataagctcagaatccaagtgaacactagccagacactctgctctgcccttgttccctaggggacacttccctctgtttctctttccttggctcccattcactcttccagaatcccaagacccagggcccaggcaaatcagttactaagaagaaaattgctgtgcctcccaaaattgttttgatctttccatgttgctgccaaccataccttccttccctgggctgtgctacctgggtccttttcagaagtgagctttgctgctacaggggaaggtggcctctgtggagccccagcatatgggggcctggattcatttcctgcccttcctcagtttaatccttctagtttcccacaatataaaactgtacttcactgtcaggaagaaatcacagaatcatatgattctgcttttaccatgcccctgagcaatgtctgtgctagggaaacttcccgtcccatatcctgcctcagcccgccaaggtagccatcccatgaacacactgtgtcctggtgctctctgccactggaagggcagagtagccagggtgtggccctgccatcttcccagcagggccactcccggcactccatgcttagtcactgcctgcagaggtctgtgctgaggccttatcattcattcttagctcttaattgttcattttgagctgaaatgctgcattttaattttaaccaaaacatgtctcctatatcctggtttttgtagccttcctccacatcctttctaaacaagattttaaagacatgtaggtgtttgttcatctgtaactctaaaagatcctttttaaattcagtcctaagaaagaggagtgcttgtcccctaagagtgtttaatggcaaggcagccctgtctgaaggacacttcctgcctaagggagagtggtatttgcagactagaattctagtgctgctgaagatgaatcaatgggaaatactactcctgtaattcctacctccctgcaaccaactacaaccaagctctctgcatctactcccaagtatggggttcaagagagtaatgggtttcatatttcttatcaccacagtaagttcctactaggcaaaatgagagggcagtgtttcctttttggtacttattactgctaagtatttcccagcacatgaaaccttattttttcccaaagccagaaccagatgagtaaaggagtaagaaccttgcctgaacatccttccttcccacccatcgctgtgtgttagttcccaacatcgaatgtgtacaacttaagttggtcctttacactcaggctttcactatttcctttaaaatgaggatgattattttcaaggccctcagcatatttgtatagttgcttgcctgatataaatgcaatattaatgcctttaaagtatgaatctatgccaaagatcacttgttgttttactaaagaaagattacttagaggaaataagaaaaatcatgtttgctctcccggttcttccagtggtttgagacactggtttacactttatgccggatgtgcttttctccaatatcagtgctcgagacacagtgaagcaaattaaaaaaaaaaaaaaaaaaaaatccctgaatgatgattagagacatcaccgctaaaaaactacatttataagctaggatttgttatatgcaaatattttctgcctcttcttttgttctgtttaaaacaataaaatgcatttgtat

SEQ ID NO: 380 - DNA, 3962 bp, Homo sapiens
agctcggtcgcttgtgcgttccgctccggccgccctttgcgcttggatccacttccccatctgtaacgaggtgttgagacgaggcggagttgacctggaaacctctccttggccactgtcctttctaaggaactcatttccagagtccaccagcacagaactggtgggggagcctactaggagcagagaaaatggccatcttcaggcagctgtccctaggcgcgaaggccaccctggctgctgtcactgtcttcgtgtccatgatcgcctcccgctcgtatctggcagagagccttgagctcagggcctggcgttggctgcttcgcttgcagcttgccctgtttgtcaactcgctcttgctcattggctccctctacatttggcgcagcacagtgagcaacctctgccactccccagctgcagagtcaacctgttttcagctttggaaggtggtggttctggcatttctggccctggcccattccagtttctttaccatgttctttttagtggccgaagagccctatctcttttccttggcggcctactcctgcctgggtgcttacatcatcatgctcttcttcctcttcatcctcagcggcatggagcaggcctaccagctcttggcctggcgcagtggtagggtcgtgggcagccttgagaagacaaggaagctcgtgctcaggcctgccctggcagtgggagtgactgctgtgctcagcgtggccgggattctgaatgccgcgcagcccccggctgtgaaaactgtggaggtgcccatccatcagctgcctgcctcaatgaacaacctcaaggtcgtgctcctctcagacattcacttgggccccacagtgggcaggaccaagatggaaatgtttgtgaggatggtgaatgtgctggaaccagacatcacggtgattgtgggtgacctctccgactcagaagcctcggtcctgcggacggctgtcgctcctctgggccagcttcgttcacatctcggtgcctacttcgtcacaggcaatcatgagtactacacgtcagatgtcagcaactggtttgcacttctggaatccctgcatgtccagcctcttcataatgagaacgtgaagatttccgccacacgggcccaacgtggtggtggtggcagtggcagtgggagtgaggatgaggactggatctgcttggctggggtggacgatattgaagcagacatcctgcactactctggccatggcatggatcttgacaaggccctggagggctgcagcccagaccacacaatcatcttgctagctcaccagcccctggctgccaagagagctctccaggctcggccagatattaacctgatcctttctgggcacacacatgctgggcagatcttccccttgaacgtagcagcctatctcctgaatcccttctttgctggtctctaccaggtggcccaggctacattcgtgtatgtcagcccaggcacagcctactacgggatacccatgaggctgggtagcagggccgagatcacagagctcatcctgcagcggtctccctgaactggccctgccctgtgcacctctgccctgcccttgtcctcgaccctccatcctgcttcagagtggtttgcctgcttttcccctccagccttgcccactcatccttgcctacacacccttggtcacaagcctgactcaaacagtgacttatggtgggcctgcctggcatgttcaggctggtttaactatttccttggccagttgctttttttgatgcacttgtgagatcactaaggtcacatatattagcactcccctctattttccagatgatgtggaatggggaccttctcctgcagagctcccagggatgaacctcccctcggggttgctagaaaggcatacctctagaaggtggggcggggaggagcaggagcatttttctcctggtgttttaaaattgtctttaggacttaagtggtttccagaatcattgatccagagcctttctggggaaggggtagtgttgccaggtaatttgggagaacaggcaagatggaagggccctctggctgctagagaagaatattttcttttcctctgattctatcaggatcacctctattgagggcatcagcaaaatctactggaatgcaaagctcctcctgttccaggccttgagggatgctatttaactgtctgtgctcctgggcctttgggggcaaggtcaggggagaagaacggtgggcgccatggtcggtgatggtgagaacatggctgcttaggaattcagagggctttgcctcccttgtctcattttatacaacccttcggggagctcactggggacaggctgcttttccctatttggagataaggaaaccaaggcaaagagagatagggcacaggcagtatgacaagatatgtaggagatttggggctagaaaccaggtcttgtacctcccagtaaaagcggtgcttttgcccttttgccagaagcaatagatcctttgatcctgagatggagataagcacccgtgttagaaaaggcctcactgagaagacagggctgggctggtttcctgctgggtgatttaggcttgtgatggaaagtcttcctccaatggggagtgaagacactcgctctgactggagaggctaaccctgctgctcactcatagggcagcgttgggtgggtgactttccctcactcagccttggtttccatcaaccctaaaatggggataattatcgtatctacctcaagattgttttgtcaggagggatccatcaagccttgtgcatgagttccacatggcacagcgtgcacagtaaacactcaatgttaatttttcaacgttccagtggagcttgctaaggaactctgttgggcacaggtgcccagaggattcatggagcagccagtcctggggaatgtgagtgggtagcgagctgcctgctgctggggcaggtgatgtgtcaaagcagcaactgctaggggtttgccttcctcccctcatgtgcattctggcaggcaaagggggtttcttcctttcctccttgtcctcctggtgtatagtggggttctgggggatctggagaccaccctttttgttcccaggcagccacggtattgacagtgggccataccatgcagtttaaaatgtatctttgagttgaaattttggtggtttccttattcttttttctctcttcactgtccttccaaactcacttttcttgtgtcccgaccgcattttgtgaatcatccttactccctttaagttctcgctttggatttcaccaggtgggctagatggtgccatttcacttccactgtttgatgcggctggtaatgtttgactcacctgttacgtgttatttcactggtttcttgattttacatctttctcatcagtgacctgggcttgatgaaattagctttcattaagtcctattttttttttaattttgcatccttacctcttttctttctcttgaatgccatcattgtgtggtcttatgtacccttcatccactctgaagtccttgcttgactgattgctttctattagcagaaagaaaacaggtccatcctatgtatctgagaaacaacatcaacaccctctcgtatgtggtttgtattccctgacgcggcggacatttttgcagcagaaatttctccatcactgtccagattctggccctggtgggcaggtctccatgacacctttagtccctctgttcaacattcttaaaccatggacctttttgtttgtttgtggccgggggaggtggtgagaaacgttacttgaagcttgatcattctttcaatttcatttgtttctttatttttaatctgttagatgcaaattgaaatgcaatgctttttgaaaatcagcaatagtgtctgtagtatatgatgctgtcacaaaatctcaataaattgatcctgctgccattccttcc

SEQ ID NO: 381 - DNA, 3955 bp, Homo sapiens
agcgccggtcgcggtcgggctcagcatggaggacggcttctccagctacagcagcctgtacgacacgtcctcgctgctccagttctgcaacgatgacagcgcttctgctgcaagtagcatggaggtgacagaccgcattgcttcactggagcagagagtccagatgcaagaagacgacatccagctgctcaaatcagctctagctgatgtggttcggcggctgaacattactgaggaacagcaggccgtgcttaacaggaaaggacctaccaaagcaagaccactgatgcagaccctgcctttaagaaccacggtcaacaatggcactgtgttaccaaagaaacctactggctctctaccatccccctccggggtcaggaaagaaactgctgtgccagcaaccaaaagattaaacagatctgtgagtcttctcaatgcttgcaaactgaatagatcgacaccaagtaacatcaagaggaccagctcttctgaacgagtgtctcctgggggtcgaagggaaagcaatggggattccagaggaaaccggaatcgcacaggctccaccagcagctcttccagtggcaaaaagaacagtgaaagcaaacccaaggagcctgtattcagtgcagaagaaggctatgtaaaaatgtttcttcgtggacgccctgttaccatgtacatgcccaaagatcaagtggattcttacagcttggaagcaaaagtagaacttccaaccaagagactcaagctggaatgggtctatgggtacaggggtcgagactgccgtaacaacctgtacttgcttccgacgggagagaccgtctacttcatcgcatccgtggtggtgttatacaacgtggaggagcaactgcagaggcattacgctggccacaacgatgacgtgaagtgcctagcagttcatcctgatcggatcacgatagcaacaggacaagttgcgggcacatcgaaggatggaaaacaattgcccccacatgtgcgcatctgggattctgtgacattgaatactctccacgtcattggaataggtttttttgaccgagcagtcacctgtattgcattctcaaaatctaatggaggaaccaatctctgtgctgtggatgactccaacgaccatgtgctctctgtatgggactggcagaaagaagaaaaactagcagatgtgaagtgctctaatgaagctgtgtttgctgtggatttccaccccacggacaccaacatcatagttacttgtggaaaatcacatctctacttttggacactagaaggaagctcccttaataagaagcaaggattattcgagaaacaagaaaagccaaagtttgtcctctgtgtgactttctctgaaaacggtgacaccattactggagattcaagtggcaacatcttagtatggggaaaaggtacaaatcgaataagctatgcagttcagggggcccatgagggtggcatttttgcactttgtatgttaagagatggcacactggtgtcgggaagtgggaaagaccgaaagctcatttcttggagcggaaactatcaaaaacttcgtaaaacggagattccagaacagtttggtccaatacggacagtggccgaggggaaaggcgatgtgatcttgattggcacaactcgaaactttgtcctgcagggcactctgtcaggggacttcacacccattactcagggtcacactgatgagctctggggactggccatccatgcctcaaaacctcagttcttgacctgtgggcatgacaagcatgccactctctgggacgctgtgggtcaccgtcccgtctgggacaaaataatagaggatccagctcagtcttctggttttcatccttcagggtctgtggttgcagtcggaacactcactgggaggtggtttgtgtttgacacagaaacaaaagacttggtcaccgttcacacagatggaaacgaacagctctctgtaatgcgatactcaccagatgggaatttcttagccataggctcacatgacaactgcatctatatatatggcgttagtgacaacgggaggaagtacacgcgagtgggcaagtgctcgggtcattccagcttcattactcacctggactggtctgtaaactcacagttcctcgtgtcaaattccggagactacgaaatcctctactgggttccctctgcctgtaagcaagtcgtaagtgtggaaactacaagagacattgaatgggctacctatacctgcactttgggattccatgtttttggagtgtggccagaaggctcggacggaaccgacatcaatgccgtctgtcgggcccatgagaagaaactcctgtcaacaggcgacgactttggcaaagtgcacctcttctcatacccctgctcgcagttcagggctccaagccacatctacggcgggcacagcagccatgtcaccaatgtcgatttcctctgtgaagacagccacctcatctccacgggcgggaaagacacaagcatcatgcagtggcgcgtcatttagtacccaccgagagctgtggggagcagcatgggcaaggaagacacagactcgcattacccttggtcactgtgatttctgttttgtttaaaaaattcttacaaacctcaggaaaactgtgccctccgccggctaccttagcttagcgtgtcagcgggcgccacagcggatcagcggttccgtgttcacttttgttgtacaatatatgacacagtgcacattgaataccaacaaggttgcaacgtttacattatagccacatcaacagaagtaactggtatattcttagtaacttttctatgaactcttcaaaaatggtcacagaatgccttttaaaacattgtatataatcttcactgtttcaccatctagcttgctaagtcaaatatttatgatgataatgaggtactgaaccacgatggctgttgaggaattggtcctaaaaggacagatcacttcagaagagtgaataactgatttgcacagctgaatcaggagacacaaagatgagactgtgtttggttacattttccaaagtttcattgcattctcccttggggaggctgtgagagagggcttgtatccctcttgtgctaagcagactctactcctaactgacttcaatatttcagcagggtacacaggcgtttccaagtttcagtgacaccgtcctgcctaaccagatgcggtcagcctcttcacgcccacctggcttgcatcccccatcccttgttcacacaccctgattcacggtgagacattttgccaccttcttgtgtatattacttggcatgagatgatattgtacttgtataggattctagcaattcataataaatatgtaagactaggctttactgtcttatgcttatggacattgtatatttgtattttatgaccaagtagaccaagtcagaaagatctctctcgagcgtaccataaacctgcagagagaagtctcgaaaggctccaccaggtaccaagggcagctgcttttcctgtcttttgtgcatgggcgacccattacagtatgagataagattgagttctgatgcgttaaacggaggtggcagaaatttgtcaagaaggccttatccatttcgattgtgtgacagattgaaatttattgtttacattggggaatgtatctcaaatttttaaatagaagagtaataaacagactttaaagcaaatattaagatttttactcattcaaggcaagtaaatgaatggaattatctgagctctatggcactggttgtttagagtgactgatgaagtgcaactttcaaaaacatttttgatgacatcaccagcctactgcagaagtgcagggcaccagtaaacaccatgtattattgaagatgaatctgtttgtatgtatccttgtcaaatatattctataatgaaataaaatctgaaaagtgg

SEQ ID NO: 382 - DNA, 3623 bp, Homo sapiens
tctcacattccatgaaacattccatgtttcccaggcacaaggtaactgcctctttcacccatttttttccctctctttctgtttttggtttgttttttgttgttgttgttgtttggttttttttgggacgagatctcgctctgtcacccaggctggagtgcagtggtgcagtctcggctcactgcagcctcagcctccgggggtcaatcgattctcccgcctcagcctcccaggtagccgggacaacaggcatgcacaaccatgcccagctaattttgttatcggaaaggggtcccaatccagaccccaagagagggttcctggatctcatacaagaaagaattcaaggcaaatccatagaggaaagtgaaagccagtttactaagggagtaaaagaatggctactccataggcagaaaagccccaagagctgctggctgcccatttttatggttatttcttgatgatatgctaaacaaggggtggattattcatgcctcccctttttaggccatatagggtaacttcctgatgttgccatggcatttgtaaactgtcatggtgctggtgggagtgtagcagtgaggacgaccagaggtcactctcatcaccatcttggttttggtgggttttagctggcttctttactgcaaactgttttatcagcaaggtctttgtgacctgtatcttgttctgacctctatctcatcctgtgatttagaaggtctaactgtctgggaatgcagcccagtaggtctcagccttattttacacagcccctattcaagatggagttgctctagttcaactgcctctgacaattttattttttgtagatacagggtctcactatgttgcccaggctggtctcgaactcctagactcaagtgattctcctgccttggcctcccaaagtgctgggattgcaggcatgagtcaccgcactcagcctctctctgtctttatttaccattttagtcagctggagcacttgttaaaagactcttataaatctctttttcctctgacttccattcataatacagagctgagccgctcaccatcccataggttgtccagaatgtctcttccctggcttccactgcctctgttgagtgtccatggggtcctgtgtatcctgtggtgcaaaggctgagacctcagccctaaagcagagcccagaacaggagaccaccaccaaggcctcttgcttggatttttggtttcttttggtgaaaacttcactcactgttctcactcaccctgccagtgggaaaataaacccatacgaaaatggtcttgggactgggagccctgctaaacccttgttcaggttaaactcccttaagtaacagagaacagacctgactgagcttgatctcctaggatatttctctgtgctgagagcctaaccaggaaaaacgttaaacagatcacttagctgatggcaaatatatgtgaccaattctcagcctcagccacagaagggacttgatgggtgggaccttggcaccaccccttcccccactgcccccactgccttggtctaaatctgcatctcgtagaattctttgcacaacagcagacctattgtgaggactttccttctccctaaccccatccccctatcaagtaagatgtttacttccagtactagaagggggcgggcatgcaggcagaaatagaaggaattctaaccatagctaaccaaagtcagatttccaggccactccactcaccggggtctgctttaacctctgggaacaaagtaaacaaaaagctggattgttgtatcctgctctgaaggttaaagttttgattcaaggttaaagttttgatatcttctgtgcctcacagccttttgtttcactctgatgctattatttactcatccttttgcacaggaggtcactttgcatagacgagaagaacttgaggctgagcctctacctatggtctgttggaacctaaggaagccagttcatttctcccaatctcaatgccctcatctgtaaaagtagggaaattatactgggcttgctgggttggtttgtgtgtgtatgtgtgaactataaatacttgaaaacgactacccctttcagaaagggttactattgctattactgttatctgtgcctttatgtatgtataactgatctgtctcctctactaggctatgcatttgagagcaagaattgtgtctgtattgctaacagcaattccagcgcctaacaaagaggaggtgctgtggaggccaaagcaactccaacttggatgctaatccatcactttaacttctgattaacccttgttctaggaagtcctctaagatttccagtttatttgatgtttcttgtgtgagagtaggtacctactgtaaatcctgccctgaggtcaaaacaaccttgatgttataggacttcaattgttctacacaaacattctgaatcacatataccctttcccagtattatataagccctggtcatgagaataaatggtgcaggatccaccatcttgcctcactgctgcctgagacacagacatggcttctgtttgtaagtccctattaagtgtatatttctgaggaactggatatgtcagcctttttcttcagcctctcagcttccttggatttttgggggtaggtttgctgaggcctggcccccatggaacaggtgctccatcaaggagtaagtgctgagcatttagattcaggtgaggggcagcagccaccaggaaagaagagtctatgcataattacctgccctacttcctgagtcaggggttctcaaattctttgtgttcaggacacatttgaagagccggcacattcagacaacagtgactcagcaatcattgcaacttaatccctactactgaagaacaacatctcataatgtctacaaaagcaaccactatgaccccaccatttactgggatgcgcttcagcactacagttagaaggtggaacgctgactgcccgaatgtccttcctctaatatacacaagaagatttctcacctgtctagttaaccactatatttcttggtccctggcttgacaacatacctcttacctcctcacagcactacatagtgtgttggcatgcagtcatgtttcaggcaggcacttcaaatttgcccttggaattccaggattttgcttttgcagtttctaattgtcaacaatcctgaaggcccttgacatgtggtcatttgtaattttgctgagatgtaatttttttttttttttgagacagactctcgctctgtcgtccaggctggagtgcagtggcatgatctcagctcactgcaatctccgcctcccgggttcaagcaattctcctgcctcagcctcctgagtagctgagattacaggcacatgccaccacgcccagctaatttttgtatttttagtacagatgaggtttcaccatgttggtaaggctggtctcgaactcctaacatcatgatccacccaccttggcctcccaaagtgctgggattgcaggcatgagccactgtacccggcctgagatgtcaatttttaaaaattagtttataagtaatacataagtatatgtatattccaaaatgtctatacaataaaaaatatggaag

SEQ ID NO: 383 - DNA, 3510 bp, Homo sapiens
gatagagccagagccaccacctgcaactcggatgctgacacaacaggacctagaacctgtccactgagtaagcggccaggaggcagcagaggaaggcatgtttatttcagggtagggaaccagtgagccttgttatgcgcggggaaatgtttgcaagactgtcccctgtgagtgaaacgtttggaagactgtgccctgtgagtgaaacgtttggaagactgtgccctgtgagtgaaacgtttggaatactgtcccctgtgagtgaaacgtttggaatactgtcccctgtgagtgaaacgtttggaatactgtcccctgtgagtgaaacgtttggaatactgtcccctgtgagtgaaacgtttgcaagactgtgccctgtgagtgaaacgtttgcaagactgtgccctgtgagtgaaatgtttgcaagactgtgccctgtgagtgaaacgtttggaagactgtgccctgtgagtgaaacgtttgcaagactgtgccctgtgagtgaaacgtttgcaagactgtgccctgtgagtgaaacgttttgaatactgtcccctgtgagtgaaacgtttggaatactgtcccctgtgagtgaaacgtttgcaagactgtgccctgtgagtgaaacgtttgcaagactgtgccctgtgagtgaaatgtttgcaagactgtgccctgtgagtgaaacgtttggaagactgtgccctgtgagtgaaacgtttgcaagactgtgccctgtgagtgaaacgtttgcaagactgtgccctgtgagtgaaacgtttgcaagactgtgccctgtgagtgaaacgtttggaagactgtgccctgtgagtgaaatgtttggaagactgtcccctgtgagtgaaacgtttggaagactgtgccctgtgagtgaaacgtttggaagactgtgccctgtgagtgaaatgtttgcaagactgtgccctgtgagtgaaacgtttggaagactgtcccctgtgagtgaaatgtttggaagactgtgccctgtgagtgaaatgtttggaagactgtgccctgtgagtgaaatgtttggaagactgtgccctgtgataacctgagaggcagacaacgtgtaccgaccaaacccggagccgtggtgccagagtgtggatctgtgttgctcgacctcgctgcgttagggaggttttacaagataaataaacacaggcaagaactagctccttctaaagcagagatggaagaaagcagatggggctggggctagaaatccctcctgcttctgtgctctcaatggcagtagatacataacttggttttcagagcctttcttaaaggcctactgttaagccaaagccaaaaagatccgattaggggtgttacctctacctataagctcactgtttcccatggcctcagaactggtgcctttacaataaagagagggatggatcccaaaagccaggccatcaggcaggcctgagaactatgtgcaggctggagttctgtgcgcggtttctggaacctgggactcagtgaaagaaaataaacacacgaagaagcccacaaaatttttaaaaaccacaaacctggtttacaaatgcttgtgactacttgaaacctaagcaagcaattagccccactccactttggatatgggtgtggacacaatgcatagagaagaccctttccaaaaggtgaagccagctgtcatagctagattcatgggagatggtgatcaagggtgactccgggaggcgcagagccagccgcagtggggggaagtgtccaaggacacgctcaggggcagggtggggcgtgagcaactcctgcccagctggggaccaccagagatccgccctttgctcctccctttgctcttcccttgtcccaaccaggtcttccctgcagatgtgctgttccagctccaccactgtggttgtgagtgggagggacatagacaactggccctttagctggaggccactgggcagtgagccgctacctctggaccagaccaaaaagaccctccaggccaggcgtggtggctcactcctgtaatcccagcactctgggaagccgaggtgggtggatcacctgaggtcaggagttcaagaccagtctggccaacatggcaaaaccctgtctctactaaaaatacaaaaaattagccaggtgtggacacctataatcccagctacttgggaggctgaagcaggagaatcacttgaacccgggaggcagaagttgcagtgagccgagatcataccattgcactgcagcctgggagacagagcgagactctgtctcaaaaagaaaaaaaaatcctccaataccgatactgcagcaacctagaccttgggctgggggaaatgcagaggggactctgggggctccccgtggagggcggcacatgtgcctcgtgtgtctgtgcgtgggataagagcacacacagatatcgggtgacactggaggggtctgagctggacacggctagttaccagattggcttcacactacgcaaacactgtgctgatccttgacttgcggctgggcttccaggatgatgtttctgaactttccatggagagagtggtggccttgtgactgagttccagccactggagtttgagtggaagtgacatctgccactctgaaccagggccttaaaacactgagcatgcacttctcgaccctctcccttcacccgagctggtagacgcaggtgcctctgacccggttcccatcatgcagaagacgatgtcctaacgagatgggaggaacgtgttctttgccagcctgcacttcccaccacctagggatggctttctgagaaagagaaatacacataaaggtttttatgccactatttgggggatttctttgtcaccatactaagtcttcaccctgatggtaaccaattatagctatttgtagattcagttcatccatctgtcgggtaaagcaatgtgtggtgacacctgcatggtgtcagacaccacaatagattcctaggcccatgtgctgggctaccagccagtcactgccactctgcaggcttctggccatgccaccgcctgcagaatcccagagtgtacacagtgggactggaacccagaactcgctgactctcgaactgtttatctttccatttatagatgttcaatttggtaacagatttgcaaacgcactaaaatttttcaggaatgtaggttttgcgtgtgtgtgtttttaacatatcagccatgtttattttgccttttctattagacgttaaaattatgttgccaatattttgataacttgattttttaatacaaataaataaaagcatatgccccatgccaatttaacttcatttgcttaggctctgggaattttccatatacttcaagttataattttggattttgaataaagcaacattttaaactctaagagttcatgactgtagtaaatactgggtacaatatatttttccatgtcttataatatattgaactttgtaaagaaattgccattaaaactttt

SEQ ID NO: 384 - DNA, 5637 bp, Homo sapiens
tgctggggtagcccagcctacgcctccgggggccttcagggaagagaaccagctaaggctggggggaccaggagaagggtcccccaaggttggaaagtgcatgcaggaggatgctcagcaggggctgcaacaggggggccttgggagcccaccaggcagggatcggcaaggggtctcactcagcgagggactgcaaagcctcacttcagtctctaggtccagggatcaggctcaccaactccctgcagaggccccagcagcaggggaccgcaggctcacagcatggacagtgggtgatatctgttgtaagctctcctcttccctctcccgctccccatggcctccgctatcagaacatattctgcctcttgcaatatggacagagtgggtccttaaaaaaaattacctaaaatgttagctcagggttcacttccagaagagaaaacaggtgtaaggggttctgggacaggcctgcggaaatcgggagtgataccgaggctgactgtagcattggggataaaagggagggaggagtcccagagtggggtggggaccacataggacaccacttccttagggcccagacagaggcaggaggtctgatatcagcagtcagttgggagttcctaggggtctggggtggtggagagagaccttcacaagttgggcaggctgctctgcttcaccccagattagagggcactgctggacacccacatggcaaagtggccaaatcccaagggaagacccaaggagccgagttgaaactgccccctgctcctgaactcaggggtcagcgatattgctgctacttgctaagcccagttgcccctgtgttatctactcccccttggagacctcggggcagcatagattccccccacccaggacttggaatgggtcatcattcaatgctatttaattccaagggtagcctggaccccagacgacacattcttttactactcttcctactttcccatcctaaattaggtccaacctcaaagttcaaatttgagtcagaggttctgcagatatataagatgccagatacccagataaaaagtcaacctagaaatgtctttcatacatttcctagggtcaaattcaagtcaaaaaattaagttcccttgtccttttaggttaaagtccaaagggaaaaaaaagtcttaaggtcaaaggattcaagcccaaagcaatcaaagagagcccagggatccgtcagagcccagtggtgttaacctcctccccgaggctctgtgctcacccagtgagcaaagtggcccagtaggcacgggagggctgggtgtcctggaaagtgagatccttctctccacatctcagcattttcactagcctgccatgtgctccagttttaaaagacccagagttactaggaatgagcagatggtgatagcctcagcctcctgctcgccaaccacagggaagtccttagagcagggtgcaggccatgagatgtctccaggatcccggacccagccccatgtagccctctcttcctgctacctcagtactccagcaggaatgccctggcagctgatggaaagagagtagacagggaagacaaaccctagaccccacagcatatctaaccaggtggagggttagcattagccctggcgaccccgctggggtggagcaggaagcaatttctgctgtcctcctccctgagcgtatctgtacaagcagtcatcacctgcctgggtcttatttataataccttctccttttcatatgtgtgaaatctcatcatttccatttccctctgtatgcccattgcatggatgtcttcagtcctaagagatcctgccccagtcagtgcagcacagcccagcaggttgctgagctgagcaccagggagcagtggctgtgtcccactggctctcaggacactagctgtcctccactggggatgttcccagtcctgagcagcactgtttccgcagcacagttgtcagcagttggggacagatgtccacagctgtgcttcctcatgcgactgctggcttgcatccccagcatggctcagctggggccctggcagttgtgctggctgctggcagtcttcacacacagggctggtcatttgtgttcaaccccagtgccttccctccttttactttctctttgctttccggcccatatatttactttttctgatctgttcctctaggttttgtcacttgggggtctcccctggcaacagaaaacaaaaccaggcaatcccaggtttgccacaagaattgctgttgaaacagtcccacagctgcgcccaagagatggcggccatggccatcagcctccctgccgtcagcccctctctcctgactggctgtgctctcctcagggaggactccactgagccctccttgacacctaatccctacatttaaaaaatgcattcccttaggtcctgagcaaccccagacacccacccacagtaactatgctgtccccaggtatacctaaaatattttcaatgtttgatgctgatcttctgtcctttaatttgcccaaattccctacagcctctgagggttgccctggctcatggaatggcttctgattcttacggagttgctgtctgcagcattgaatggccccccctcaagagtgttctgggtcacctggttccctggtggtgaccttgtctgttcccaacgtctgccctcccctcacatcagggagctttcctgtcccctaagttggtctggcccactccagggtcccatgatccctcatctctgcacagcctgcctcctgacaccactgctcccattctaagggtaagactgtggtgtgtttttcaaaccattccagttccttctggatctcccaagtaaacccaattccctgggacagacggttctcagcacaagccatttgtatggcccttgctagctttggatgcgtattgatttcattgtttctctatctcaacccaagaaaatagcatattctctgaagggccctgattccttttaatgctgttgtccattaacaaactcttacctttctgtgggcaaagccacgactttagtctcccaattcctgggtcaaaatgtacgtaatagccaggcacggtggctcatacctgtgatccctgtaatattctgggatgccaaggcgggaagatcacttagggccagcctggggaacctagtgaaatcctgtctctacaaaaataaaaatataattagctgggcatggtggcacagaactgtagtctcagccacccaagaagctgtggcgggaagatggcttaatcccaggagttcaaggttactgtgagcttgattgcaccactgcattgcagcatgggcaacagggagagaccctgtctctaaaaagaaacaacaaattaaaacaaaatgtatgtaaggcacaaatcgagagccaagctgagccgcacaaggggactaactcagcagacctagggatgtgtttcgtgggctcaggagggaccctccccagtccctgttctggcaggaggctttgaggacagctcatctggcacaactccactgtgggtggtacaagactcataccaggttgcaccggccccttgctgccttcgcagttggaagtggtgatctcagacctggctgagaacacagtaaaggcagcaagcctgggcctgccctcctccattcatgcctcagaggttgggacccttctgtagcctcctctgcactgtctctctttggattaataggaggcccgtgcaggagtcagagaacacggctctgagctgtgaccatccccaaagcactgccctgagttgccaaaggtcatatccccacatggaccttactttataccagcaagatggaacctccggcctgggccactagttaaaagccaaccctaagactgtaaggatcagctcgtggctccaaagctctgtggggaactgccaaggccagaagccagtgtggtccccgtgaagcccccgcgcacacaccaggcatccccaaagcctcagactttatgtggttacttgaggactcaaagctcaaagcctctgctggatttaagggggcttaaatagaacacgcctttcttcccattccaatcctggggcctccaccacagttgtgagggtcatagcacatgccagaaggcagggagcacacagcaaagcagggcccagaaagactgagctagacggggggcgctaaggaggtgcttgtttagggacataagcacctcatggggaaacaaggaggtgaggaagaacggcccccactcccagcagaaacactgtggtgggaagctcagggaggctgggggtgggctggggaagaggccaacaaagtgggaacagccctccgtatgggccagtgtctggcaaggtcttagtgggatggggcagttgggcagtgcttctgcatggcacggtacccaacggtcggcctggtggtggtgctcttcacttcctcttcactcccttctactgtgcatgttaacttttgtatcagggagtatgagatatggaaaaatgcataaatgcataaggtttaataaatatatataggcacttgtaagaacagagagaaaaatactgcagcaccctgccacctcccaaatgcccctggccagtgggaccgctgtcctgacagtgatagaaatcatttcttggctttcatcacaattttcccacctacacgtggtcctctgaacagtacagtttgggggtccttgttttcaaactttatataaatggaactgcattatatatatatatcttgtggcttttgctcaatatgtttatgagatttgaccgtggtgatatttgtacctatagcttgttcatttcactgctgttgaatattccatgaatgaacaagcataatttatccaattattgatggacattgggttgcttcgagatacaagtttctccgggataaatatatcgaggagtgggattgtgggcacgttacagctgaggaggttagtagtggtgtgtcatggtggttcttatttccctgatttctactgacgatgaacaacttttccattggatattctgttttgtgaagtggcttctaaagtcctttgctcatttttttaaatagggtttcctaataatgtaatgttgagataggagatcagcagaacttgttttccaagcactggtcaagaccttggtcatgatcccgctgatcaaaacagaatctggtcggaacaggatgcagtgaagaaatcagctgaaaccagctggaaccaagatggcaacaaaagtgacctcacttttgtccctcactgctcattatatgctagtgataatgcatgctaaaagacattcccaccagcaccatgacagtttacacatgccacggcaatacccaaaagttatcttatgtgatttaaaagggggaggaaccctcagttccaggaactccggatccctttgctagaaaattcatgaataacctgccccttatttagcatataataagaagtagctatacatatagatagctggtagtccaagagtgctgctctgcctatggggtagccctgtaaaccccatccacctgtatggatgctctatgaaacccacttttctgtactctgttgctctaataaacttgctttgctttcactctt

SEQ ID NO: 385 - DNA, 3553 bp, Homo sapiens
ctctttttttaaaattaatattgccacattattttaaattatgtacaaagacctaacatgtcactcagggaccatttcacccactgctctatttagccgccagtctcttcagcaatggtgagggtttggtgtacacattatttcatcacccaggtaataagcatagcacccgacaggtagtttttcggtcctcaccctcctcccatcttaccctcaagtaggccctgctgtttgttgttcccttttttgtgtcaatgtgtagtcaatgttcagctcccacctataagtgagaacctgtggtgtctggttttctgtccctgcattagttcacttaggatagtggcttccagctccatctatgttgctgcaaaagacattatcttgttcctttttatggctgtgtagtattccatggtgtatatataccacattttctgtctttctccttccttccttccttccttcattccttctctctctctctctttctttctttcagacagagtcttgctctgttgcccaggctggagtgcagtggtgtggtctcatctcactgcagcttctgcctcctgggttcaggtgacttctcctgcctgggcctcccaagtggctgggagtgggggtgcccgctactatgcctggctaatttttttgtgtttttggtggagacggggtttcgccgtgttggacgggcttggtctcggactaccgacctcacgtggtccacccgccttggcctcccaaagtgctgggattgcaggcgtgggtcaccgcgcccagcccacattttctttatccagtctaccactgatgggcatttaggttgattccacatctttgctattgtgaacagtgctgctgtgaacaaaggtgtgcacgtgtcttcatggtagaacgattgatattcctttgtgtatatactcaataatgagattgctgggtcggatggtagttctattttaagtttttttagaaatcaccaaactacttttcacagtggctcttggcttaaatttggaagcagaggtacactccctttacacctgatttttaaatttcttttctccttgatcagataatatgttgacactatccaaaattcaaaagatacaaaatgatggaaagtgaaatttcttcaacccagtttcccttgccaagttgatactaatgttaccagtttccaggttattccatacacaaatatacaaatagtaacttactatatccactgtatctgtcaggttgggttggaattttttttctttttcttttgggaccgtctcgctctgtctttcaggctgcagtgcggtggggcagtcttggctcgctgcgacctctgcctcccgggctcaggtgattcttgggcctcggcctcctgagtggctgggattgcaggtgtgtgccaccacgcctggctattttttgtgtttttggtggagacggggtcttgccgtgttggccgggctggtcttgagttcctggtctcgtgatctgcccacctcggcctcccaaagtgttgggattagaggtgtgagctcctggccattgtgctgggtattctatttgccctaccatctccactctccaccatgacctgtcttttagaagggtggcctctataaactgtaccacccatgctcccttcacctctacattaaaaaaatttttgggtttggccaatggaagtttgagagaagagcaatgtcagattattttgcttggctgtgtgatagcaatggttgtattcctctgccagaaaccatgccctcctgctgggggctctcttttacccctatacaatcagtctcggtttcggaaactactccctctcactgcacctttcaacctaaggatgatgatggcgtctccttattgtaagccatagagtgcttcaacgtcttgtagggttctttcacactgccctccactttgtaaaaagtccctccattggccgggcgcggcggctcacgcctgtagtcccagcacttttggaggccgaggcgggcggatgacgaggtcgggagatcgggaccttcctggctagcgtggtgaaaccccgtctctactagagacgcaaggaattagccgggcgtggtggcgggtgcctgtggttccggctgctcgggaggctggggcaggagagtggcctgggcccgggaggcgaagcttgcagtgggctgagatcgcgcaattgcactccagcctgggcgaaacagcgagactccgactcaaaaaaaaaagtccctccattaagcactcatatttttctgctggggttctgatggaccaagtctatcaaatgaatgcatcataatttgtttaaccaatatcttggtgcatatgttggtttcctatttttcattatgtaaacagttctttgatgaatctaggtgattttgcacactttcttgtacatcataggagacattactagaagtggagttaactgaatctgagagtatgttcttttgtaatttagagaaaagcgttcacattactctcctccgaagctgtaccaatttatagttccacaaaccgtaactgagagtaaggattgctctgggaggctgaggtggtagtggatactagcctgggccctatagcgagacaccatctatacaaaaacattaaaaaaagttctactactagggtgtgggagaatgcacctgtggtcccagctgcttgggaggctgaggtgggaggattgcctgagccagggggttaaggctgcagtgaattatgattgtgacactgcattccagcctgggtgacagagcaagacactgtctcaaaaagacaaaaaaacccaccccaaacaaccaacaaaattggaggccatgatttcacacccagtgatcctaatagctcaaattttgaattagagactgtggttttaacatctgctaaattccttatgttgaggaatcactgagtcaaaggtttcagcctctttccaagggggagagcacgtggacaattacatctcatgcaggcatttggttttatggactcacgtgcttgttacaaaactagacacagctttagggcttcttattaccttcccccacccgtccttggtagaagagtcaacaaatgacatctaagctgccaacacatattggaaaatgtttgaaacttgagatctgtggtttattatgaaacaggcagtgccctggagtttgaattttttcccagttggtcttagtaccctgtctgcagattgaggggaaagggcaggaaggggagtaaatgtagttaagagcatagcctcagctgggtgtggtggctcacgcctgtggtcccagcacattgggaggccggggagggtggatcgcttgaggtcacaggttcgggaccggcttggtcagcatggtgaaacccccgtctctactaagaaatgcaaaggttagccaggtgtggtggtgggtgcctgtggtcctagctactcgggaggttggggcgggagagtcgcttgggcctggggggcagaggtttcagtgagccggggttgtgccgctgcattccggcctgggtgacagagtgagactgtctc

SEQ ID NO: 386 - DNA, 3498 bp, Homo sapiens
ttttaaacttttaaaatgtaggatgaagacactgtttgaagagatcaaagcatcaattaaaaataactataaccaagatcgatcattttgtaggcctgttcttccttgggggggtgtttttactatcaaagctggccgcaaagcagtatcctgtacaccactctatgttgaaataagactgaaaaatacctgcaccatagatggattcttgatgttattatatgtcattcttaatgaaaatgaaaacttccctagggaactctctcttcattttggtagagagtttgtagactgttttctttacttaatggacacctacagttttacaactgtgaagctactttggatttgggacaagatggaaaaacagcaatacaaatctgaagtccataaagcttcattaataattgatttgtttgggaatgagcatgataattttacaaaaaatcttgaaaatctcatgtctaccattcaagagagttactgttccaactggcgatgcccaactcgagtgcaggaggatcagcagcgcacaattaatataaatcctccccaagaaattccacatggaaacttgataagactggctgtgaatgagttattctgttccaagattgaactgtgtgaagagcatgggtgtggtggcttaagagaattttcccaacgaattttctgccatggggcacccccttttgttgtcttaaatatgcaacattggaaatctgaagatctggcgtatgtaccctattacttggatttgtctgatcacaagtaggtgtttttgttgttgtttctttataaaactaataaaaaaaatttatcctgttatattatgattttgactagcccttaagagatattgttgaaaacaatcatatctgtctctaaatttatgtattctgaatagaatcagaatttattacagagagtcagttactagcagtgcacatagtgggtaggtgtgtggactacagaatagacagaattgggttcaaatcctagccccatcttttataagttaaccttgggccaacaacttaaccagtttacatgtcagttttcttatctataaaacagagatgatggtatcaacctagtgcaattattgtaaagacttaataagcacatactaagtgtttaagatagtacctgacacataatactggatagtataataatagcacagtattttgtgcctgacacatactggctaatacttgtatttcaagtcagagaagttcgtagtagtatgcaggtggtcataatttgaacataaaatgttacttgtcactataaataaaaatatctgcatacaaatcaggaaataaagggttcttttaacattttccctgtaaaagttttcttacgtgtttactcttttttaaaagaaacatacaggttataagttcatctgttaaaatatgtttttaagaaattcttaatttccacatttccaattttattacatgatctatagagatggatatctttttcagggaacagaatacaaacaatgtcaatgtttttattccttagttatgaatttaaggaatgtttatcttaacaaagtattaaattttctctcatactatattatttaatttgcaggtatttgttggaaggtgccacattatttaacaaagaggaacatcattattctgcagctttccagattggtggacattggatgcactatgatgggctcagaaatgtgaatttaattttgttaaataaacccccagagtttctcctcttgtcatcattggtttatattcgagcaacagagaaataaatatagattgatgctaaaagttgttttccctcctgcccatgctctcccagatgaagggcttttattttgtgtatacttggtatccaagaaaatagttcaactatactagtttcagaagtgtattttcagtgtttaaccccaggtaaatgttttatatagaggatctgtgcaaaaatgtttgtaatttttttatatttcctgagttatttttatatgagcatattttatgttggaataaaatatatcttgtggcctttgtattttttatttatatgtacctcaaagatttttacaattctgtctttgaattcaagaaatactttgtcatctgaattctaaatttctctttttggatattcgagtaaaacctaggtaaaagtattttaagtttatataatttaacagttcaaaatatatctgactgtatttctttgccctacctcactataatccaaagtgcactatttgatctagtatggatttgaatgtacaatttatcgatggcttagtttattagttcgatttgcctagtatccctgcagcaattttttaaaatgtctgagaaatttttcagagcttaaactatttctttataatggcaaattacttttaactacttcctaaagtattataaacctgccagtggattttaagtgatagctaagcttccaagcttaattcacgttattacaaataaattatataactatcttaaatgtttatcttataattaaatgtaatttgaaatgctctaatgtattttgcagataaaacaactataaacaatattaggcaactggatgtttactagtgtcggactagcaatagaaatgcactttaaatatatatttaaggggaaacgcgtgcctggaaatacttcttttcctagtgaagttttatattgacacagagaaaagaatacttaaaattttgagtgatgtctactggcttccttgtaagtagtgattgatagcatgcggctttgacttgcaatacaaatcattacgattttatagttatcagaacattacgtttctttataaagaccctaaggtcactcttctttttgcaacttaagggaaaaaatattctcaagggaaaatactttttgaaatttatcaccattttagtgtttacatttcaataaatagttcacttcaggtttgggattgagattagttgcaatatatttagaagctcctacatgacagcacagatcactgccatctgctgaactgctaaagtgcttggtgccatgttgagaaaacttacccaagaatggataaatatgggtgaaacattactgagaatgcctcacgttagcaaatactatgaaaattcttgtttatatatcaaactgatttattttacaaaaaaaaaaaattcaccccaagatttatttagtttcccaagtgtatctgattaggatttaatttagagtaaacttttctggggacacctgattgcatgaactgaagtatacaataacacaaatattacagtaaacataaatggtgtcattaacaaaattattcctaatgcagatttattctttcaggaaatgcactttatttggaatactagtttatcatgaaacaatgacttacctacctcacagggttgttgtgaggattaagatgtttgttaaaatcttgactaccttgaacatgctaataaaaaaacatttttctacctcttttatttgc

SEQ ID NO: 387 - DNA, 3872 bp, Homo sapiens
acgcagccttcgttgcagtcgtcactcgcatctggctaccagctccccgctgccctgcgctcggcgggctggcatcgggcccggggaaagcggagcagtagttcggtgtagcactgtttgcggcgaggagaaaggaaggagaggagaaaactgcactggatcaaggaggttagtgtcttcccataggcctgcagtagggctgtttaccattggaagcaagggaaagaggaggagatcaatctagaagcatggagatctgcctgcatgtctgctgcagggcttaagatcactggaagcaaagaaacaaagaggagattgctcctgatcagtatagactggtccagagatctcatgaatttatgtatctactttagggtgtattgccaagagaagcaagaggagaggagggaactgcctcggatcattacaggtccacctccagaggcagctgtagtggcctttgagtggctgaagaccagcaccctcacaggcctacacccacaactaccactctctttaccccagcccgagtgcgctctaccataccttgttcgtgcttttagcaggggtgattacatgggccgcattcaggaagtgggctgggtgactgcaggactggtgatctgggctggcacctgctactacatttacaaatttaccaagggaagagcccagagtgtgaggactcttgccagaaatggatccacagttaagatggagactgtggttggggtacagagccagaccttggccataaatgaagcagagattaagactaaaccccaagtcgagattggagcagaaactggagcaagaagtgggcctggggctgaagtagagaccaaggccactgctatagccatacacagagccaactctcaggccaaggcaatggttggggcagagccagagactcaatctgagtccaaagtggtggctggaacactggtcatgacagaggcagtgactctgactgaggtcaaggccaaagccagggaagtggccatgaaagaagcagtgacccaaactgatgctgaggctggcaaaatagttaagaaagaagcagtgacacagaccaaggctaaagcttgggcgctggttgccaagacagaggccaagagagaagcaatgacccagaccaaagctgaaactcatatattggctgaaaaagagacagagattaacagagtaatggttacacagagtgagaccttggcagtacccagggaagtggccaagatgggggccacgaacaagactggaattgtggatgaaaccaagacaagagctctggaagagactgtgttgatcccaagagcattccctagtaaaaacgcttcatgctgaactctatctctgggcctgcttcctgggaagccaacctgcaacagttggtacaagaagtggttcgagaaagcaaacactgtgatgaaattttggagatgaatcacctgctacccagctgtcaatgaagactccatcattggtggtaggtggagtagataggcctctggaataaggtagcagaggaattgttaaaattttcaatggtggttaactgggttggcatactggtaaaaggggacacattaactggtgccatgtatcagacctttgagaaatatgggatatattaaatataaggaaggccagaaaattgggcggctgttgctaagcagattgagctctggaaaagaataacaaaaagctgaattaaattaatcaacaattgaaagctatgtttgaaagtcagatggctttattcataacatataaagaggctctcatcttttccaggtagaaggtggagaaatctgaggagtagactcaggatttgttaaaagcaagcttcaaagaaagttaaaattctaaccaagacaagtcttctatgccgagttatgtgccatggttaagaaggaatgggactctgacacttggaatgggggacatctggattgatgtccctaaaaatcttatatccccagattcccctgagccccttgagatgtgtcctactcctccctattaagggccggcactccatcttgcttcaatatatggaatcctttcccctgtaagataacctgggtttccctcagaatctgcccgcacctcctatcctggccactgggcctataactagggttaagccacgcataatctagctggtgatgtgctgggtgtaataaggaaagaaagagaatacaccaacaaagagtttcgggacataacctagccagcatatactagaaggtgctgagggagtaagtatggcatcaaattctaaggagcttgatcaggagggctggaatataaacttgaatatgggagaattaatcaatttgaaagtgctttcccagaatacaggatttaataccctggagaaaaccacaggaaatgacacgaactcattactgcgatggctcctcgaagtatggaaaaagccatggcgtacataaagtgaggtgtaaatgccagagttgccatagaagatggcgggaaaagggatcaaagactcagagagacataaaggagaagatttgggagagggagaggattaatcctgatttgaactcttcgaatttgaagtgcttatgtactatgatttgaatatggtttatccccatccaaagtcatgttgaggatgggttcccaatgtgacagtgttgggaggtggtacccttaagaggcatttgtgtcatgaggaatctctcctgatgagggtatgaatgcagtctctttggagtgggagagttcttgtgctcatgggactggattagttactgtgaggaggttggttgttataaagtgagtctgcctcttgtgcttggtgtcttttgcgtgtacctgtttccccttttgtttctttgccatgttttgatgccctcaaaagaagttgtcggatgtgactgcccagtcttgaacttcccagccctcaaaactaacatatcttccagtagcttcctgagaaagtgtatatgcaaagcacacttctgagatctttcagatggttttgccacattgcccaggatggccttgaactcctgggctcaagtgatccacttgccttggccccccaaagtgctgggattacaggttgctatgaaaagaaaaatcatgatattaaattttagcatcgatattatggaagctatgcctggactcaacaacacgaacttctactcaccaaggctgatcttgtactaatactaagtgcccaacctgacaacagagaagatgatgagcctttataagacaccattccttaggggcatcagccagtcccatggtgttaggattattacatgggacacctttcatcatcatgaaaacagaaacttttcctcatggaaatgaatatgtattttagacacacatttaccttctttgctgacaatgattctgtcatcaccatctccatggacttccagaatgccttaatcatcatcagagtatcctacacaaagttgtctctgaccaaggaactcatttaatgggactgcatcccccagactccatttgtaattgacttctgcttgggtttggtcaatggaatgccctggcacagctttggagggaagaagagagaagacaatgtatttcttcactgctcccactctgatttgggctatgttttattggcagggactgcatcccttcaagattttagcttcttccagaagtcccctcctccatgactctagctctcactaggctccagaaatactatttcttcctcttgccctcttaggcctagggtaacagctacctgctattgctaacctctgggtgccacaaaattgcttgttgggtctcataatcttgcatatacctctgtaagtagtccctacattaaagtcccttgaaccatc

SEQ ID NO: 388 - DNA, 3824 bp, Homo sapiens
agtgctgtatctgctggtgcctggagagtcatctgccctgggcttccgcgtcctggtgtgtgcagtgctatatctgctggtgcctggagagtcatctgccctgggcttccgcgtcctggtgtgtgcaatgctgtatctgcgggtgcctggagagtcatctgccctgggcttctgcatcctggtgtgtgcagtgctgtatctgctggtgcctggagtcatctgccctgggcttctgcgtcctggtgtgtgcagtgctgtacctgctggtgcctggagagtcatctgccctgggcttccgtatcctggtgtgtgcagtgctgtatctgctggtgcctggagagtcatctgccctgggcttccgcgtcctggtgtgtgcaatgctgtatctgcgggtgcctggagagtcatctgccctgggcttctgcatcctggtgtgtgcaatgctgtatctgctggtgcctggagtcatctgccctgggcttctgcatcctcgtgtgtgcagtgctgtacctgctggtgcctggagtcatctgccctgggcttctgcatcctcgtgtgtgcagtgctgtacctgctggtgcctggagagtcatctgccctgggcttctgcgttctggtgtgtgcagtgctgtatctgctggtgcctggagagtcatctgccctgggcttccgcgtcctggtgtgtgcaatgctgtatctgctggtgcctggagtcatcttccctgggcttctgcgtcctggtgtgtgcagtgctgtatctgctggtgcctggagagtcatctgcgctgggcttccgcgtcctggtgtgtgcaatgctgtatctgctggtgcctggagagtcatctgccctgggcttccgtatcctggtgtgtgcagtgctgtatctgctggtgcctggagagtcatctgccctgggcttccccgtcctggtgtgtgcaatgctgtatctgctggtgcctggagagtcatcttccctcggcttctgtgtcctggacaagacatttcaaagaaagtattaaattcattcacgagtgccggctccgcggtgagagctgccttgtacactgcctggccggggtctccaggagcgtgacactggtgatcgcatacatcatgaccgtcactgactttggctgggaggatgccctgcacaccgtgcgtgctgggagatcctgtgccaaccccaacgtgggcttccagagacagctccaggagtttgagaagcatgaggtccatcagtatcggcagtggctgaaggaagaatatggagagagccctttgcaggatgcagaagaagccaaaaacattctgggtaaatataaggagcaagggcgcacagagccccagcccggcgccaggcggtggagcagttttccggcactggctccgctgacctacgataattatacgacggagacctaacgcaagcgacctgctgccttccttcccactgcttgtcttcagtgtgcccggctgggcaggggtgcggtggtggtggccgatgaggacaggaaagggagatagccagggcgaggtggggcgagggctccttcccccaagcaacaccgcccagctctgctccaggcccctgcactccgcccacccctaccctggctgcacctgagcttgctgcccccggggatgttgcccagtggctgtgcactgctctgtgcacgtgcgtgtgtgtgagtgcacttgtgtgtgggtgactaagtggatgcatgtgtgtgcctgtgtgagtgagggtatgtgcacctaagtgtgtacatgtgtgtatgttgtgaaagtgtctgtgcacatgaatgtttgtgtgtgtgtgaactctttcttactgctggaagtcacagaattcatattgctgcccgggttggtgtggccacctttccctttgtccaagactccacatggaaggcatttgagctcgacctccgaaaagctacccagcaaagagcagtctgtgcctctgagcagaccgtgagaactcaggggacgagtggctaagagcatggcctctcccagaacccacccagggtggtgtggtgggggcaacaggggccagactcctctagagggagggtggctctggggccctggaaaacgtgagagactgccctgagctggtccagtgggccagcactttataccaactcagcatttaagggaagtatcttagattgcctccatctcaatgtgaatgcaccaggctgagggttccctagcgccttgagtcaaggccacttttcagcccatcgagccctgagttctacttggtgtttgttctctggagctgattgcacttgagctctgtggtgggcaggcgcactttagcctaagttgggtgccccagggcaccccctcctctctgctccttgccagcttcattcactcccagcctctcgctgtcctcactttgcaggggctcctcctcaatatttgcatgcacctgcaagaattgggaagaaagagcatttattaggcactgtagcaatttgcattttaaaatgcctgagcatttattaagcttcttggtattcacttgggtttgataattgatctgagctacctcattgaatgtttttggaaaggtgttttttggtatgcaagtcagctttgcctcacagttgaaaatgttcggtcatgattgcttttgaaaccaaaggggaaggtaccgatatcattgagctatttaaagttgccagtttgggctccagtaatgctttctggtgggtaaaattccacattcaggccacgagagcatctacagtttgtactctggggctgcaggcatcctgggacgctgtacgcaattcagtggtctagtcctttataccgactcagattccttaagcatgcagagtcactcgaatgaaaaaacatactcgacctctccctaaaaagatgttgcaacccagtttctctgaattccaccacaaaaagagaccctgaataagaagagcagttttcctgtgcatatagagggtgtgtcaaaggtgagctttttggggaccgggaaaaacaaagttgcctgattccgcgcaggtgcacaggccccggatgtacacccggaaaggggagtgtggctgtagaatcatccatccgtctacggctaaaacaatttgccaataaagtacatgtttttcctaagccaaaaataaatacgttaacagaaaaatgatttaggatatagcttgaatgcttaaatatgtgcacctttacaaacctctcagtgtattcttggagttcttgaaatgttgttttaatatttgttgccagtaatgttctttcttcacagccgctccaggaattctgaagttctgggcctttctcagaagactgtaatgtacctgaagtttctgaaatattgcaaacccacagagtttaggctggtgctgccaaaaagaaaagcaacatagagtttaagtatccagtagtgatttgtaaacttgtttttcatttgaagctgaatatatacgtagtcatgtttatgttgagaactaaggatattctttagcaagagaaaatattttccccttatccccactgctgtggaggtttctgtacctcgcttggatgcctgtaaggatcccgggagccttgccgcactgccttgtgggtggcttggcgctcgtgattgcttcctgtgaacgcctcccaaggacgagcccagtgtagttgtgtggcgtgaactctgcccgtgtgttctcaaattccccagcttgggaaatagcccttggtgtgggttttatctctggtttgtgttctccgtggtggaattgaccgaaagctctatgttttcgttaataaagggcaacttagccaagttt

SEQ ID NO: 389 - DNA, 4234 bp, Homo sapiens
tccaaacatccctgcatctctgcctcagagcttttgctcaaaatatatagtgtgcttctattttccttcaagattcagctccagagctacttccataaaacttctcaagatatagcccattaaaattcatctttttcttctcatctctattaataatttggacctcgcttatagcagttagcacatttaccctgtggtatagttatttgcctgcatatgtgtatttttgattataagattccatcatttcatgtagttgacactcaatagatgttgactgaattgaatctaaactctctcattttatagatggggaaactggaatccagagaggacacgaagtgacagagccaggactaatttcagggtcttctgtcttttgtttcaacaagtttccgtctgcagtagcatgctgacatgcatcctatggatgctcagtgtactgatgttgggcaattcagtattgtggtgcagaacaaacaccaggtcccatctacaagtcttttatccatataaaaaagtacacgtgttatttgaaatctttgtacatacgaagattataatgtatttttattctgttttcagcttcatgtttcctgttgcaggtgggataagaccccctcaagcaggcctgatgccgatgcagcaacaaggatttcctatggtctctgtcatgcagcctaatatgcaaggcattatgggaatgaattacagctctcagatgtcccaaggacctattgctatgcaggcaggaataccaatgggaccaatgccagcagcgggaatgccttacctaggacaagcacccttcctgggcatgcgtcctccaggcccacagtacactccagacatgcagaagcagtttgccgaagagcagcagaaacgatttgaacagcagcaaaaactcttagaagaagaaagaaaaagacgccagtttgaagagcagaagcaaaagctcagacttttgagcagtgtgaaacccaagacaggagagaagagtagagatgatgctttggaagccataaaaggaaatttagatgggttttccagagatgcaaaaatgcaccctactccagcatcgcaccccaagaaaccagattgccccacatcatctcattctactaaaactgtctccccatcacctgcctttcttgatgaagaagaattcagtgactttatgcaggggcctgttgaagttcccccatgtgggccttcttccacgtcccagccctttcagtctttccacccctccaccccacttggccagttgcatacacagaaggctgggacacagcctctccctccaagtcagagtccagtgccttttgccttacatggcgtccctgggcaaattccttacttctctactgcttcagcctcacacagtgtaccagaagcaggcccttccttggaggagaagttcctagtatcttgtgatataagtacacctgggcaggaacaaattaaattaaatacttctgaagttggccacaaagccctaggcccaggttccagtaagaagtatcccagtttaatggccagtaacggggttgctgtagatggatgtgtaagtggtaccaccactgcagaggcagaaaatacttcagatcaaaacctgtcaattgaagagagtggtgtgggagtatttccctcacaggatcctgctcagcccagaatgcctccttggatttacaatgagagtttggttccagatgcctataagaaaatcttagaaaccacaatgactccaactggaatagatactgccaaactgtatcccattctgatgtcatctgggcttcccagggaaactcttggacagatatgggccttagctaatcgaactacacctggcagacttacaaaagaagaactttataccgttctagccatgatagcggtaacacagaggggcgttcctgcaatgagtcctgatgctttaaaccagttcccagcagctcctattccaactttaagtggcttttctatgactctgcctacaccggtgagtcagccaactgtgataccttcaggtcctgcgggctccatgcccctcagccttggacagccagtcatgggcattaaccttgttggaccagtgggtggagctgcagcccaggcttctagtggtttcataccaacctaccctgcaaatcaggtagtaaagccagaagaagatgacttccaggattttcaagatgcttctaagtcaggatcccttgatgactcattcagtgatttccaagagttgcctgcttcttcaaaaacaagtaactcccagcatggaaacaggtagaaaagagtttaatatatttaacattgcgtttaaccattaagaaagaggcatccataatagcaaggctaggtgtgagaaatttaaaaattaagactccttactctactactttctgtgtttattccctctgtattaatacttttacttttcaaacttctctcccctttgtccatcttaaacttcagctcctactgtttcctgtaagtacacacctgcctgccaatattcttttttacctgtgccaaacctttattatagctaagatcacctgtgcagtgatgacttcgtgttcctatattacagcaaggtcttcaactgttaaaaagttttttaggcaggagcacataattgcacatttttgtaatgttatgtactgttgcttttccacagaatcataattcagaactctaatcatattcattcacatttcttgtatatttgacattagtgtcttttaagccttcagatttctgttgtttgcatagacagctgcataaacatttctctaaggttttacacgccaccttaaccttcaggtacagtaactgattcagtatgttgtcagcatgtttagtttttttttgagatggagtcttgctctgtcgcccaggctggagggcagtggcgtgatctcggctcactgcaacctccacctcccaagttttcctgcctcagtctccttagtagctgggattacaggtgtccaccaccatgcccagctaattttttgtatttttagtagagatggggtttcaccatttcaccatgttggccaggctggtctcaaactcctgacctcaagtgagtctctctacttgacctcctaaagtgctaggattacaggcatgagccaccatgcccagacggcattttaaaaaaagtatttagatatttctgcaaagtggaacacatcagacaccagagtaagcgatatgaattcctttggttttatttttcgaatttgttattgtcagaatacatattccatgtctcctctgttcctgtttatgcagtttcgctcatctcttcccctttagccaattgattatctcttagtcagcactttgctgcatacacactgtaacaagaactaagggataggcattatagagaattacaaattaggaaaagagattattctcctgattttaaaaatatattaaatgcatgtacataacatatagaagaaacatataaggaatgtgaccatagagtgctggtatttccaggactgctgcaccaacacaagttaaaccttctagacgcataaattgtatttctacttcagatctcttccttcaaacaaaatttatatgtactactgctatctaagcatccctatctgaatgagtcaaggcacctcaaattcactgcatgaaattacctttagtgttttcctactcaaagccacataaaaatgtgttaaatcgttattcccttccttggtgaatgatgtcaccatattcagtcaccaaattaaaagcatgctatttactttggctctgtcatctctcctttaccaccattaactctgtcagctctgtgtgacagtgtgtgatcttaactcctgcccactctcaactcttgctattccccatgacttacactccagccttgccagcatgactccaaactgaccatgttctttcaagctttatccattctgttcgcttcagtctgaaatacccttacctgatctccctatagttatagttccatttcagaaatcagctaaatataggaagtttttcctaaccaattcccacctcctttgctactgctgtagtacctgatgaatgtctgtgccctaattgtaattgctggtttacctgactgtttccctttctaggctgtaagtatctgaagacaattattcatgtttatatatgtagtgcttggccccatcatatgtaattaataaagatctgttggatgact

SEQ ID NO: 390 - DNA, 3778 bp, Homo sapiens
tgaagaagaaatctcaatgctaggggaaataacccaccttcagaccatctcggaagatctaaaaagcctgaccatggaccctcacaaactgccctcctcaagtgaacaggtgattctggacttgaaaggttctgattacagctggtcgtatcagacgccaccctcttcccccagcaccaccatgtccagaaagtccagtgtctgcagcagcctgaacagtgtcaacagcagtgactcccggtccagcggctcccactcgcattcccccagctcacattaccgctaccgcagctccaacctggcccagcaggctcctgtgaggctgtccagcgtgtcctcccatgactcaggattcatatcccaggatgccttccagtccaagtcaccatcccccatgccgccagaggcccccaaccagaactcgtccagctcggcctcctccgaagcctcggaaacctgccagtcagtgagcgagtgcagctcccccacctctgtcagctcgggctccaccatgggtgcctgggtgtccacagagaaggactgggctaagcctgggccctatgaccagcctctggtgaacaccctgcagcgccgcaaagagaagcgagaaccggaccccaacgggggaggacccactaccgccagcggcccacctgcagcagctgaggaggctcagagaccacggagcatgactgtatcggctgccaccaggcctggtgaggagatggaggcttgtgaggagctggccctggccctgtctcggggcctgcagctggacacccagaggagcagccgggactcgcttcagtgctccagcggctacagcacccagacaaccaccccctgctgctctgaggacaccatcccttcccaagtttcagattatgattatttctctgtaagtggtgaccaggaggcagatcagcaggagttcgacaagtcctccaccattccaagaaacagcgacatcagccagtcctaccgacggatgttccaagccaagcgtccagcctcaactgctggcctccccaccaccctgggacctgctatggtcactccaggggttgcaactatccgacggaccccttccaccaagccttctgtccgccggggaaccattggagctggtcccatccccaccaagacacccgtgatccctgtcaagaccccaaccgtcccagacctcccaggggtgttgccagcccctccagatgggccagaagagcggggggagcacagccctgagtcgccatctgtgggtgagggcccccaaggtgtcaccagcatgccctcctcaatgtggagcggccaagcttccgttaaccctccacttccaggcccgaagcccagtatccctgaggagcacagacaggcaattccagaaagtgaagctgaagaccaggaacgggaacccccaagtgccactgtctccccaggccagattccagagagtgaccctgcagacctgagcccaagggatactccacaaggagaagacatgctgaacgccatccgaaggggcgtgaaactgaagaagaccacgacaaacgatcgctcagcccctcgcttttcttaggttcacaagaaatgcgccggtggggaatgaactgtttcattaataaaacctaatttgtcttgatccattccactctataataaaacaaaagattttgtaggcaactcggaatatagctcttttgaaagtactcgacacctttagataagaattaaaaccaacctatgtaactgacataatcttgatcttttaatttgtaaatattgacaattttctttctgcacattttaatcttagtttcccttttgatttttctgaaggtgccaaattccatttaacttttttacaagtctttgtaaaattttaaatgcataaagggggttggggcaggggaaccacgaagtagttaattttagaaaaggatttactatacttcactcttctttttttttccccacaagcttttgtagatgcattgtagtagtctagcttagaagcaaatgcaagttattttaatgtacaaactaaatgggtaagaggtaaaatcttcatttaaatatactatgttctggatgaaaagagcaggagtaacaattgatgagcaatattcagagtgaagtaaatctggaaatggtagactgtgttgggattggggggagggccatgggaggggtacatcgtcaacatagccgatcctgttacatttaagagtagcctcgtaggttgaatttcttctggtagcttcatggtaaatgcatccgaataagccatactggattgcagtgtttgtttctgtagggtgtttaaggacttgacttcctttctcccatgattcctctggactgcacacagcacccacaaccagccccatgcatgctgctgcctctgggcagtcgtagaatctcccacttcagtttctcgttgattgtactcacctttatggaatccaaatacatccaaaagggtaaggcagttttaaaaatgtgaaaacatttaaaaatgataatagcagggaattcttagattatagtaaatgccttttacttaactgtgcccagcaggctgggtgcgttaaaaagcccaagtattttgaaaaaactcgaacagatttgacaagggtagccagcttggagtctagcaacttgccaatgtgtttaccaatctgggggcttgtttttcttttcttctttcaaataaatggcagttaactggctttacagtaaacattgaagagaggaggatttgtttattgtcactgggaatctgaccactatactgtcctttttttgtattctgggtaaatgttttttggaaaagatttgtcttttctaagtggaagttaaatttgttatactgcccatcccctaaagccaacagagatttgtagatttaaagggatcacatttgaagacaatagtgtttaagaaagcaagcaagtcccttagcagtcaggtcataacagggcacatttctgaccgaaccctctcaaggcagaggaggagtttggtgggtttcatacaccctgcagattcctgttggctctaaccctcaattacctaatcttatgctttaacacataactgcattggatgtgagagtaacgtaccgtatggtcattgttctatatattaacattgaacactgctgcgattgctcaaggacattttatgttacggctttaaagcaaaggcatgattattagaaactatttaagcttttttctttgaaaaacaagctccttttacagaatataaacaacagtagtgcctgtggtttagcccaccaatcttgatgactaaaagtagctgatgcattgtgcatatgatgcttgagatggtttttgcaaaagcagaaatcgctgcaaggtaatcacaatagataaaagtggtattttaaacctttgaaataaatggatgtaactgtaccttggtacagcttttcacttgtttagtttttaaacgttagtataatctgaataaataaaatgttgccaaattcaatgtagaaagaatgtgacaacacaccttgggtagttctgcttgtgtttttgcatattgtaaaagcagtgtcacagctaaaaagaaagaaatcgtttctaacagtaaattattgtgctttagttgctagtttgtactgagagttgacctctccctgtgcagttttttgttctaaacttgtataaataacaattgtgtaatgtgtctccctcctacattgtaacaattgcttcagcctacgttataaataaagaaccactagatt

SEQ ID NO: 391 - DNA, 3531 bp, Homo sapiens
gatgtgatagctctatggaagtccaaactggagactgccatcgcatcccaccagcaggcgatggaagaactgaaggtatctttcagcaaagggcttggaacagagacggcagaatttgctgaactaaaaacacaaatagagaaaatgagactagattaccaacacgaaatagaaaatttgcagaatcaacaagactctgaacgggctgcccatgctaaagagatggaagccttgagggctaaactgatgaaagttattaaagaaaaggaaaacagtctggaagccatcaggtcgaaactggacaaagcagaagaccagcatctcgtagaaatggaagacacgttaaacaaattacaggaagctgaaataaagaaagaaaagtttgctgaagcttcagaggaggcagtctctgttcagagaagtatgcaagaaactgtaaataagttacaccaaaaggaggaacagtttaacatgctgtcttctgacttggagaagctgagagaaaacttagcagatatggaggcaaaatttagagagaaagatgagagagaagagcagctgataaaggcaaaggaaaaactggaaaatgacattgcagaaataatgaagatgtcaggagataactcttctcagctgacaaaaatgaacgatgaattacgtctgaaagaaagagatgtagaagaattacagctaaaacttacaaaggctaatgaaaatgcaagttttctgcaaaaaaagtattgaggacatgactgtcaaagctgaacagagccagcaagaagcagctaaaaagcatgaggaagaaaagaaagaattggagaggaaattgtcggacctggaaaagaaaatggaaacaagccacaaccagtgtcaggagctgaaagccaggtatgagagagccacttctgagacaaaaaccaagcatgaagaaatcctacagaacctccagaagacgctgctggacacagaggacaagctgaagggcgcacgggaggagaacagtggcttgctgcaggagctggaggagctgagaaagcaagccgacaaagccaaagctgctcaaacagcggaagatgccatgcagataatggaacagatgaccaaagagaagactgagactctggcctccttggaggacaccaagcaaacaaatgcaaaactacagaatgaattggacacacttaaagaaaacaacttgaaaaatgtggaagagctgaacaaatcaaaagaactcctgactgtagagaatcaaaaaatggaagaatttaggaaagaaatagaaaccctaaagcaggcagcagctcagaagtcccagcagctttcagcgttgcaagaagagaacgttaaacttgctgaggagctggggagaagcagggacgaagtcacaagtcatcaaaagctggaagaagaaagatctgtgctcaataatcagttgttagaaatgaaaaaaagagaatccaagttcataaaagacgcagatgaagagaaagcttccttgcagaaatccatcagtataactagtgccttactcacagaaaaggatgccgagctggagaaactgagaaatgaggtcacagtgctcaggggagaaaacgcctctgccaagtccttgcattcagttgttcagactctagagtctgataaggtgaagctcgagctcaaggtaaagaacttggagcttcaactcaaagaaaacaagaggcagctcagcagctcctcaggtaatacagacactcaggcagacgaggatgaaagagcccaggagagtcagcaaatgattgatttcctaaattcagtaatagtggaccttcaaaggaagaatcaagacctcaagatgaaggtggagatgatgtcagaagcagccctgaatgggaacggggatgacctaaacaattatgacagtgatgatcaggagaaacagtccaagaagaaacctcgcctcttctgtgacatttgtgactgctttgatctccacgacacagaggattgtcctacccaggcacagatgtcagaggaccctccccattccacacaccatggcagtcggggtgaggaacgcccatactgtgaaatctgtgagatgtttggacactgggccaccaactgcaatgacgacgaaaccttctgatgaagcctccagtggagaactgggcttgctcagacgcactcgcattgacacaacgtaacaccagcattgtgtgtgcagacttcaggagaactcatgttattttttaaccccgtcaacaaatctaggaaaatattttgatcttcaacaaattgccctttagtctccccgtatgagttagaataataaatatttagtaggtgagttttcacctcgaattttgttttcttgatttttacgtttgaagacattgcaccagatgccattacatttattggccccccgaccttgtagaaaaacccctaccctcacaataccttatttaagtaactttaaattatgccgttacttttcatatttgcactaagatatttccaggctgcatttgtatatttagattttttggttaagctttgacactggaatgagttgaaaaaatgtgccattttgcattttcatctactcatttaaagtattttattcttattcaaagaaatatctgagctctttgcactacctgttatcagtagtgcctttacttcaggcttgataatacttaggtgtgattataaaatcatgaagcaggtaaagggaggggcaagcccccaaactgctgtggggacattttataatctatatgctgcacccacttaatctactgtggtgttttgtttattagttttgcataatttcagcttctatatattgtatgtatatattttttaaaaatctatattttgggaaaaaaacgtacacaatgtgtctttccttttggacatttacctttttgaaaaagaaaacacttaaaatgatcattaggacataacagactaggccagacatagcatcttgtggctttgcaaccattttcatttgtttgttttccttttatttcttcaccagatttaaataactggaggaattttctccaatttttttttccttctctggcaggtatccccagcagtcaattaacaataagccagtataaaacacctaaataaccaatctacaatctcccttcacaagtttttttactgtttttagatgaatgtacgatgagaaattcaacgttaataattttggattttcttatcacaaaaaagaaaatgaaggacctcaaagcacctgaacagtttatcgaccagtttgaatctatttatcttcatttgaatgtcttctagaatatgtaaaaagtcataaaatgtatcttccatgctacatgtacaataagaacttctataattgtatatatgcctttgatgtattttcccctcaagattatcaactgtgtgttcgacagtgaatattcaatctggtaccagttgaaatttttggttataaatgtaatacgaattgtttcacaaacagaaaacatgtaaagcagtattaaaatttggccaaac

SEQ ID NO: 392 - DNA, 3679 bp, Homo sapiens
ttgtccatagcactcagaataaaattgcatatttgcattatcctgtatattccaatgaaatagaatgattttagtaccataatttgtgtttttatatttttcttcatcttataaaagttaatatggtgtgctttgaaatagcatgatgtaaataagggaagaaagcaactaggaaaaaaattattaaaattgtattcatataacaaattgaaaatagtgacatgatgatgactcatcaaacaaaaaagaaaaaagctggtatcacatttacctataacaaaataatggtagaaataactcaccttgtgtttgatatgtatatgtatatatacatttgcacaggtatgcacacaatctatttcaccaactgttgtagcaaagtatttcagttttttctttatttaaaaaaggcatatgcttttacactgaatatatacatatgcttttacactgaatatataatgcatagatactatctgcttccaattaggaatgagctcatcacatgcaacttaaaggtatagcctcaggaaaatagatgactctcccaacacaatccctttttggaacagcagggcatcagcgtaagactatatcgctaaaattcaggcccacagtcagctttaactcaaagcagacactgattttattggttgaatagtatactatttatagtacttgggcagcaaaatgatgaagccagtgaaagaatctttctccccacaacattagaactgggaggtgttgatgcttacaagatccccccccttgaaggcaaagaccatgtctctcttggatgtgtattcctagggtattacacagtagctgccacataataggtaccaaaaaacatcatgactattataaaaaatgctctttactactgagttatagcctaaaggtctaccatatacattttgtgctgtttcttttcttgattagggagaagatccaatttatccgaactgaagggactccaggattggtgcgcctttcaagcgatgcagaccttgttatgttgctgaggtacatacgtaacactcactcttgaagcagaaggtctcttgtcatcagatatcatggaacattgtagaaaataatatgccaatattcatagcctaaaaattgttcttattctttagacttgtggaaatattttgaagatttagggtgctgattgagtgatcattcacttcacgttgccatttgttacactgagatctgtttaattttgttttcaccctgctggcaagggagatggtattggaaaagggaaaggttgtaatgaatagaatctcccactcacagaatggaacagaagggtatctgaacaaggcatccaccgtttacccctcagtgtttaccctttcagtttaatattctttcaaatgtttttctcaaaatatgttttgttccccttttgctgactcaaggcattatttatttaccttgtggttttgagggtgtacgtttgggaaatcagatcagaaagttgacatttggtctatgctactcattgccaacttgatagcccttcataaaactgaccaattattttcacccccgcccctcaccctccaatggttaaatcagctttggttttaaattttagagtagtttagaaaggaaactggcaagttttcaaaagactttctcatttttttattatccctcaaatgtaggcaagccatagtaaaataatgctttgctctacccagtggttgggacgctcatccctgtaacctccagagaattaaaaggaacagcatactgagcctttcaggcaaggttttgtttatccctgagtgctaataacctcattcaagtattcatgatgatcttgaccctgaccatttctaattctccattccatagttgccatatttgttgccatatttctgacctcccatgtgattgttgtcagaaaattatttttctttgtgtgtagtcaaagcataactcaaagggatatattcactttctatagatacttcacttcagttgactctgaataggacctatggtgggggtagcttctcaacctaatgggtggcctctctcctgtggtattgagccagttgtgaaaccagcatatagtatgctaggtggtcaggaagactactggtcaattaacgttagagtgtgatgtttctatcatggtttggttggtgataaaatagttgaagtttctgttaacagaattctggccaggatatgctctttttcttcactatagaaagctaaggtttttttcttttaaactaagaattctgctttgggaatgagtaaaaacagaagtcataattatcattcacctatccatagttaaataatatttagatggtatagtcttaaatttattttactatagcttataatatttgtactttgataacacaacagtttgcatgagtttctatgtgttaagtagtagaattcaaatgtatttgaattcaaataattcagaactcattcatacataaagagcaaggctgcattttctcctctttgggaaaataagcaggttctgtaaagctaatgggcctttggagaagtgtgagaaattttcttacatataatagttctataattattgtatacaaatgatgtcattaaattctaggcttttcatgtgggtgatcacatgtgtttattattttaataatagtaaacaacacaatgtattatatgtacatgcttaataagtaatataattagtgattattgaaaaatttggggttttattcatgtcctcaattatttatttatttatttttgaggtgcagtctcgctctgttgcccaggctggagtgcagtggtgagatctcatctcattgcaacctccgccctctgggttcgggtggttctcctgcctcggcctcctgggtggctgggagtacgggtgcgggccgccacgcccggctaattttttgtattttaatagagacggggtttcaccgtgttgcccaggctggacacgagctcctgagctcaggcaatccgccctcctcggcctcccaaagtgctgggattacaggtgtgagccacagcgctcagccctttattttttatttcactttggaattggaatgatttgaattggtgactacaaacttcagtcagcatacttgtcacttacataatggaagcctttgtgtctattttaatgttttgtctaatttcttaaaaaggaaaaatcactcctggtacaaattgacttatcagtaagctgcaatgtagagatagtgttgctctaggacattattcaattcagaataaacgcatgtaaagttattttccaatagggctattttaaaacccaataatttttaaatgaccttgtttaatttgttattgatttttgtatttcatgtatcttttcactaactcaattcatgtaaaaaatatacctctatcagagctcatacaagaaatgattgataaatttggctacataaatatttttaaatggatataatgaaagataccacatataaaggcataaagaaagataatcaactggaagaatagatttacaacatgtaaaacaaagagatcagccaggcgcagtggctcacgcctgtggtcccggcactttgggatgccgaggcgggcggatcatgatgaggtcgggagatcgagaccagcctggccaacatggtgaagccccatctctact

SEQ ID NO: 393 - DNA, 4768 bp, Homo sapiens
tgaggaaacagattcaaaagcaagttgggagtgatatctcactagtatatccctgttgcactgatgcagcagaacagccagtgtccttctgattggttggtgcctaatataggtagagtaaggaaagttaattttaatgtcaacttccaaaccagtggctttaaccagtacaatgaaaatatccctcacttacccaacaagcaatgtggaagttccttgtgggcctgcagccttccttccatccaaggacataggcttgggccctgtcgctttctgcgtgaccccttgcatgcaatcggcagatacggggagagagaacatggaaagagcatggaggtgcccatgagccaggactcgcatggagcacctaatttccaccacattttattcacagaatcagccatgtagcagccgctgactgcaagggaagctgggaaatgtagtctacctggtttccctggaagaaaggaaggtggttttagtgaacacacagcagtgtctgccacatgaccatgctgcattggttattacatatttgaatatcacccctaggtaaagtcacaaaggtagcaagtggcagagccaggagtaggacctaggtctgtgtaacctcagatctggattctttgcagggcctctcatactcctttaatggctggctcaggttctgcacctctggatgcagtgggtgttgtgattgcctatgtggactctctttccaggcaccaacaattctataaaacatgtgactgctctccctttcccttccatggactatctgggctacaaatttgagagtaggttgttgggaatttttgtgagcagccaactcaggatcaggtctgtgaagctcctggcttatgtggtgctcagtggctctcttgggagtgaggggcgatagacaaactgtgtcactctccccaggagggctgggctgtcattagcattcagcaaggctgtgagtcttgttgtacaaatcagctgtttaaaggccttaaaaaaaaaacccctaaaactgctgaatgcctctcgtggttgaagctcttatgagtatggagctaacagtttcccacgactgctgaacagcaaaaggggagccatggtgtagtgttttccttttgattcatatttggagtcatttttagcaatacggcaaaatgtgaagatgctcttggaatgtgggcatttgttacctttgacaaaggagattgcttgtatttttgtttgtctgttttggtttttttctttacagctcttgatcttgtttattcagagaagcaagaaggatctgttggtttcataaatgtgcttctattcttgaaaaaatgctagagttagccacttctccccccacttcctcactggtctgtggcaggagactcaagttgcaaactaacgcagccccctttccttcctggcttctccctccactcctatgggggtcatcagggggaggggcagagagctaaccagcagagtccaaacacattatctcttttgtctgggtttcagagtcagtttattttcttccatcagttgggaaggtgattctatgcatagggattccttgtatgcaatctttcccaagatagggcttagtgtattgtgccagctttgacttcagtcactctgcttgctgatgcaactgaccctgcttcatcaggcctgggcaaaaacaggcccttttagtagagttctaatgggcactgcttgttcgatggtaattaactgggtattgggaatttcctcggttccagatgtctgggagttagaaacaaataacatctgttctcatcaaaaggtagagtggcaaagtacaaatcacaagtcactctcaataaatgcaggagctggcgtttgagatccacagtgaagccagattacctgtttgcagtactcctctatggatagaggaaacagagctaaacatttcctctgagcctggagctgacctggataagcctcttcttgcttaacagcacccctgagtcttcatccagatttgggaagaggatgaggttggttagcatgctgagtgataaggaagaaaaggatactgtggagcccagcacctgtctgatctagggagagaattcatgactagtagacagaggccagaattgactcgcttcacaggaatcaaggtgtaacattattccttccctccctcctactcttcctttcttctttccatttgtccgtgcatccattggtttagtcaacagacatttaaacagtactcactaaatgccagattctttgctaggtgactggaggcatgcaaagggggagatgtagttctgcctacaaaaagctcacagtccaataggggagtggagacatggacagaagtaatccattcccaaggtgaaaagtgactagtgccataagaaaaggacaagaaagtgtgagggaaggttggtggggatgaaaccaggaagggggtatggctcacttccagctgagcagatgggtgtgtaggtttggggaagttttcatggagaaagaagtatttgaactgagcactgaaagatggggtagatttcaactgcagaaagttggggaaagggttaggagcctcaagcagaaggacttgtgtgtataaaagtgtggaagctggaaacagcatgcctattttgtaatttattggtagagacatgccactcttagtgaattagtagaaaggcttcctttctccccctgcctctctctttcctttcggatttctatattttgtgttcttattattctttggaccatagaagaggttcatgaaatgaaagggtgggggctagagatggggtgggctttaccaaccattgacttttccctcttctttaagtttgatcacctaccaggggaagtcaaggggaaatgttgcctgttaattttccttgttataggttggttttgatgttgatgactggtattacttctctaggatataactttggaaacagcattggtgagggcattccatgtaaaacatcaacttcagcttttctgttgtagggtattttccgtgcttgactactgatggtcttgcaaagctcctgtattcaaatcctaggctgagctccagagtgcttcctcctagatcgaggctttggatatgctcactgctcattagcaacctgcagaaaagctgggatgcagtcttcactgatttggtgtgtaacggattccttgaagggaagcctgctttgctgatggggtcagcatacgtggcgtactgacatgggaatcatggcatttccagccagtgctcaactctgtggaatgcttcccctttcagcccaagtctcaaattgcctccaagtttcctcatttctgagaaagtgagccagtgaaggttgatattcaaatatataaacagctaatgtggcatttggcagtgtccaatcagaaccagtcatatagtgctagagcaaattgctgtgccaggcagtaactgttttgtggctggctcttggggaaggtttggatactgggggaggggtcaggataatgggtgctggaagcatctctcaagtaacttgggaaagcagctttttctaaaatgggaggaaatttgagtttatttatttatttatttatttatttggagatggggtttcactcttgttccccaggctggagtgctttgacacgatctcggctcactgcaccctccgcctcctgggttcaagtgattctcctgcctcagcctcctgagtagctgggattgcagacgcccgccaccacacctggcttttgtgtgtgtgtgtgtgtgtgtttttagtagagatggtgtttaaccatgttggccaggctggtctcaaactcctgacctcaggtgatctgcccgcctcggcgtcccaaagggctgtgattacaggcatgagctaccaagcccggcctatttcagtattttaagaactgatatggtggaaccagtgcataccagctaaatataaatgctgaaacgttttattttttttaaaagatcaactatgtcctgactacagcctaagcaaaagggttcctggtggtttctgcctgtcaacagggaagatctcacttcacagaggctgaaactggggctagttatggatgctgggccctgaacaggtagaatttcctatcttttagctatagtttaagccagaagttttcaaactttttggtcttaggactcctttatgcttgtaaaaattattgaagaccccaagggagttttgttgctataggttgtatcagttaatatttgccacaatagaaatttaaactgagaaaatttcaaaataattattttatttaacaatggcaataataaacccaattacataaattaacataagtagcacactttttgtgaaaaagaactacagactcttggtacaatttgttttagtccattcagactgctataataaaataccctagatggcatggcttataaacaatagaaatttatttttcacagttctggaggccggaaagtccaagatcaaggggccagcagattcagcatttggtaagggcccgctgccgggttcacagaccaccacgttcttgttccatcctaacatggtggaagagataagaaagctctctggactctctttcgtaaggatacaaatcccacccatgagggctctaccctcatgaccaaatcacctcccgaaggccccacctccctgggttaggattttagcatgtgacttcttttgtgtgtgggtggggggccacaaacattcagtctattgcagtttccaaagcaacagcc

SEQ ID NO: 394 - DNA, 3636 bp, Homo sapiens
atttgcagcgcaagcagcctagcgtgcggccgcggcgcccaggtcggaaaggaggcggcatcatggagctgaagaaggacatcaacgctgtatctatcgacatgctgctgatcgtgcactcggagaagcggcgcgccgcacagggattccaaggtgttggaaatggagtccgaagatggcagaaattagaaggaaatgactttcacgggacacaactgactgtggaagtccaccctcgagatgccatgccccagctgctcaagaagttctccttggctaaacgtttacaaggtgataaaaatggaaacacaagaccccggcaacctggagggaaagatgcccatgcctacccctgggatcgatctagcctgaaatccatgtccctggaaagggtccgcgccatctggatctggatatgccatcacatagagtatgacattgcagctgctcaggagaaggaccgccaagccttcaaacccactgacatcctgcggacccagaagaccaactgtgatggctatgctggcctcttcgagagaatgtgcaggctcgccggagtgcagtgtatgaccgtgcctggctactccaagggtttcggctaccagacagggcagagcttctcgggggagtttgaccatgcctggaatgctgtgtacctggagggaagatggcacctggtggacagcacctggggcagcggcctggtggacaccatcacctccaaattcaccttcctctacaatgagttctacttcctcacccaccctgcactgttcatcgaggaccacttcccagacaacaagaactggcagctgctaaaacctcctcaatctctgaggcagtttgagaacaacatgtatcacaagagtgaattctacaacaaagggatgctgagtgcccacccagagacttccatgatcagaacaggtgagcccggagcaggtgccagtgtgctagcagcaggaatggagcatttcgcactgtcctccaggagcccgcctgagactgcgctttcaaggcatgcccttccagacgcatggcttgtgagcttagcacaaagcttgtgtgtgcatgtggatgagtggaggctgctgaggcagcccaggccatcagggcagggaagggccataggccacatcagcagggacaaaagctcactcacactagcataaacccagaaagggatgtgtctgaaggctgcaggtttcctagaacttgaaggctgaacacacagcctggcatgtcacagaagccagggctgggcacttcctagctgggtgagtctctctcagttcacatagcagggaaaaggactacgtcaccctggctacacatagcctctgggctcaggtccccaacagaagctactggcctgctgtgttctcttccccaactcctgctggagagaatacatggcctcagcagagctggaatctgggtgttggtggtccaaccagcaaggatggggagcaacatgggtctcccaggacaggtgggggcagtcccacccaagacagagagttggggcagacttccttagggaggtggccactgagctgggtcttgggagaggagaacaggcctagtagctagacagagatggacatgttctaggcagcagaggagaggcggggacacagtaagcccccagcctccaaactcaggcacccctggatgagggccaagctccagcacctctgcctggctggctcagtacccctcccttctggaggtgggacccagccgtttccagcccactcccctggggcagtataggatacccagcttagccatctcccatggctggtctgggctgacatgtgctctcccaaccttcaccacggagccatggcagctgagtatgtttgcacactctgaggcatacgggggctgccctggagggccagaactggtcacaaaaaagcagggccttctctggaagattgtctcttatgcctctccaaggccttggcacctgatccagtgctgggcacacagcctgggcacgctgcacagccctgtaagtcgggtcagtccagcctcccacacctcagcaaaggactgcctggtggcaccgtctctgccactggggcctccatccgcccaggacaggaggtctgagctcacactgactattagcacagggtgcctgtgggtgggcccagagcccctggggagctccaacccacattgcagggcaatggggcagcggggagcacaggtgtccccaagttagttccaactgacttgtcccttccaccacacaatggcttcctttgccaagttgctgagctcttgcaaactcttccaactccaaatacctggcagctcctgcagctaaaataacagcgtgaagttgctcaatttgagaatccatttcctgtgcttacaacagatgcagggcttgttcaatgtatcataggccgtggaaatatcggaaagaactgaccaggtcaaagcaacaccaaactgatgtcattgagtggagtttgcctttttaagagacataaaaatataaacaccagattccttaatttatagaaatctaaacctaaatatgattccatatatctgatacttatgtacagagtatttctttgtggtagctagttctgttaagagaggggaggggaaggaaacaacaatagggaaactgagatgagcagaaaggaagggaaggaagagggcacctagataaggggctggaaagctgccaggctctaggagagtgccgtggaggggagaggggaggaggaggaggcagaggggactggaagagccgtggactcccatagaggtctgcaggggtggctagtcctttatttcaagtcttcccagtcattcaacacacctttggcaagaaccctctgggtgaggcaccacaaccaggcactaagacgtggcaggaaatgaaacaggctagccccttcaccacagagcccacaggccagcaaggagttcggacactacacaaaaatgatcacatgatgaattacagcagtggaacgttccctgaaggacagccagggctaggagagaagctgccagggaactcagcctcagctgaggggtccgggtgggctgctttgccacggggacattaccatgaagccttatccaggtttgggggaagtggtggggagggaggagagggtaggaggaccctgaggcatgaagggttgtggccttggaggatctgagagagtgcttgatactggcgaggcaggaagagacaggcttctccacgggtctccagcttgagggctctgccgtgagcccaggagtagccaggtggacgttttcaaaggagccctggggctgctgtgtggggtgctgggtggtgctccacaatcaaaggtgaatctcagggggatctgggcttcactgtgcagaaaagactcacagccagttgtgagatggaacaggaccaggggccgtgagcagtgaggagctgaggtagcttctgcccactgagctggttcagaagtgaggggagaggagggttttcaccaagaggggatagcaactctattgatcttggtcactttcctttggaggttaccatgggacagatgtggcatgcagtggctgaaggcagtagagaaagcatgtagacaaataaaatagcatgaaagc

SEQ ID NO: 395 - DNA, 3857 bp, Homo sapiens
ttgaaaactataatgcctttcaaaaatggcttattgcttggatctcaatatctcccacgtatcttgggtggaatattttgctgaagatctttctgtcaatcatttacaatcatgtgctgcaaaatgaagtttgggtcaacagtagaccacatatatgatggtggttccgtaagcgtataatggagctatccctatataggtataccatttttatcttttttttttttttttttttgagatggagtctcactctgttgtccaggctggagtgcagtggtatgatcccagctcattgcaacctccacctcccaggttcaagtgattctcctacctcagcctcctgagtagctgggattatagacacgcgtcaccacactcagctaatttttgtatttttagtagagatggggtttcatcatgttggccaggctggtcttgaactcctgagctcaagtgatccacccaccttggcgtcccaaagtgctgggattacaggcatgagccactgtgcccaggccccatttttatcttttacacagtattttaactatatattttccatgtttacatacacaaatacctgccattctgtgacagttgcctttagtattcagtacagtaacatacagtacaggtttgtagcctaggagtcctaagccataccgtgtaccctaggtatggtggctacaccacctaggtttgtgtaagtatacgctatgatattagcacaatggtgaaatcacctagtgacccatttctcaagctcctcacgtgggaagcaatgcatgactgcatatgaaagctcttaaatagggattgtttctaaattaatctcaaaacagtcattatttactatttatggaatttttttttaaaaaaaggagcaaaagtatcatttcagtgggaacttaacttggggctacagtgttttatttaacttttaccccaaagttgcaaagtgttttgaaatttttccctgtaaaataattattttaattcaatttaaataaaacccaccaaggagacttcaagctttaagaagtctagcttcctgtgaaatgtgagaggaagtcagcactcatttcagaaatctgattataacaatagctccatccctaaatgaggtgaatcttggaatctcttccattttattttattttatttttttgagatggagtttctctcttgttgcccaggctgaagtgcaatgttgtgatctcggctcactgcaacctctgcctcccgggttcaagcgattctcctgctttggcctcctgagtagctgggattgcagaaatttccaaggaaactatatttcttacattgatggaaatgtatggaaagcatacagttggaccgagaaactaattctcagagaaaataacttgactgaattacacaaggattcatttgaaggcctgctatccctccagtatttagatttatcctgcaataaaatacagtctattgaaagacatacatttgaaccactaccatttttgaagtttataaatcttagttgcaatgtaattacagaactcagctttggaacatttcaggcctggcacggaatgcagtttttacataagttaattctcaatcacaatcctctgacaactgttgaagatccgtatctctttaaattgccagcattaaaatatctagacatgggaacaacgctagtcccacttacaacacttaagaacattctcatgatgactgttgaactggaaaaactgatcttacctagccatatggcctgctgcctctgccaatttaaaaacagcattgaggctgtctgcaagacagtcaagctgcattgcaacagtgcatgtctgacaaacaccatacattgtcctgaagaagcatcggtagggaatccagaaggagcgttcatgaaggtgttacaagcccggaagaactacacaagcactgagctgattgttgagccagaggagccctcagacagcagtggcatcaacttgtcaggctttgggagtgagcagctagacaccaatgacgagagtgattttatcagtacactacgttacatcttgccttatttctcagcggtaaacctagatgtgaaatcactgttactaccgttaattaaactgccaaccacaggaaacagcctggcaaagattcaaactgtaggccaaaaccggcagagagtgaagagagtcctcatgggcccaaggagcatccagaaaaggcacttcaaagaggtaggaaggcagagcatcaggagggaacagggtgcccaggcatctgtggagaacgctgccgaagaaaaaaggctcgggagtccagccccaagggaggtggaacagccccacacacagcaggggcctgagaagttagcgggaaacgccgtctacaccaagccttccttcacccaagagcataaggcagcagtctctgtgctgaaacccttctccaagggcgcgccttctacctccagccctgcaaaagccctaccacaggtgagagacagatggaaagacttaacccacgctatttccattttagaaagtgcaaaggctagagttacaaatacgaagacgtctaaaccaatcgtacatgccagaaaagaataccgctttcacaaaactcgctcccacgtgacccacagaacacccaaagtcaaaaagagtccaaaggtcagaaagaaaagttatctgagtagactgatgctcgcaaacaggcttccattctctgcagcgaagagcctcataaattccccttcacaaggggctttttcatccttaggagacctgagtcctcaagaaaacccttttctggaagtatctgctccttcagaacattttatagaaaagaataatacaaaacacacaactgcaagaaatgcctttgaagaaaatgattttatggaaaacactaacatgccagaaggaaccatctctgaaaacacaaactacaatcatcctcctgaggcagattccgctgggactgcattcaacttagggccaactgttaaacaaactgagacaaaatgggaatacaacaacgtgggcactgacccgtcccccgagcccaaaagcttcaattacccattgctctcgtccccaggtgatcagtttgaaattcagctaacccagcagctacagtcccttatccccaacaacaatgtgagaaggctcattgctcatgttatccggaccttgaagatggactgctctggggcccatgtgcaagtgacctgtgccaagctcatctccaggacaggccacctgatgaagcttctcagtgggcagcaggaagtaaaggcatccaagatagaatgggatacggaccaatggaagattgagaactacattaatgagagcacagaagcccagagtgaacagaaagagaagtcgcttgagctcaaaaaagaagttccaggatatggctatactgacaaactcatcttggcattaattgttactggaatactaacgattttgattatacttttctgccttattgtgatatgttgtcaccgaaggtcattacaagaagatgaagaaggattctcaaggggcattttcagatttctgccacggaggggatgctcttcgcgaagggagagtcaggatggactttcctcatttggacagccgctctggtttaaagatatgtacaaacctctcagtgccacaagaataaataatcatgcatggaagctgcacaagaagtcatctaatgaggacaagatcctcaacagggaccctggggacagcgaagccccaacggaggaggaggagagtgaagccctgccataggaggagaacacagcccacctcaggcctcctgcaaaaatacatagaataaacaacaacagttactaaatg

SEQ ID NO: 396 - DNA, 3693 bp, Homo sapiens
taagataaagtcacccaccctgcgtttccagcacttgattttatctgaagccaaacccaaaattcctcccaacctttccctgctcactgcccaagctcaatgcaggtcagcaaacgcagacctttatcgttccttagggaacctctgagtgggccggggccaaggggaaggaagcatgcatttcatttccgtgtctttagccttaggcattctcagccaagaaggcaagcagcaggcttttggagaaaagacagcctaccctgcccttccccaccccttgccctccctgccagaatgagagcagcttctgaaaagctgggtatatccagccagaaacacgggaaggatttggttgcactggatagaaacacaaactatgaagggaatgagagcagcagcggccgcaggcgttaacagaacccctgtctcttcctcaggctggaagaatccatcactacctctctaggagactgtcgggctcccagaggggagggttagtgagtaaactgaaagaataataaaggtgtcccagcctagaagacgtattcagggcaacaaagaaagtattgccctgcagtgttcagattctgagccttttatctgtgcatcttatcaaacatgtgcctgtagcatcctggcacacactgttctgtcctgcagggttaggcagggggattctttgttttgaaggatgaaccaagataacacatacagtaactcagatgccctgtgtgtgtgcacgcattagcatgtgcatgcacgtggctggaggcagccacacagactgaaagaatgtgagctttggagtgattcattcacttgggtattcattccacaaatcttgctcagctcctagcatgtgaccacccattctggacatggggatacaggggtgaacagaagagacaagatctctgctccataggaacttgtgttctggagggaaacaaacaataaacaagtaaactaggccgagacacgggcttctaggccactccaccatggagcaactgtatcacacttgacctcactgaacctgcctctgtcagaggaggtgagaactgtcttgaagggatgtctgaagacttcaagggcctctcagggttctggcacgtagacaccgtgctgctgagggcaggagctctgtggggttgagactcttgtttgctaggcatgaagagacagggagagaagtgggatggaaagaaggcattcagaactcacaggcagccccagcgaggagaagtcaaagctccgtgccccttccagcacaaaagcaagtccattgaaccggtggctttttctgtcatctagctcctaaaaacaaaaacaaaggtaaattcctggagttcaacctaagtgttttgggtcaaaggtggggtcaaaggtgggctgtacaagtgttcatgaattgggaggccggagaaaagacactgagggtttgcagagagggtcttctgttctggagtctagttctattcagtctctctgagaggtagggtctttatcgtgtacttgtgcagtttacaaaaatgtgacaaagtttcataatgtaggttcactcagccatttaacaaatgttaatgaaatggggagctgaaatgtaaaagtgataaaacttctgtgccttcaagaatttcccagtcggtaagggagacagacatacaaattactatcatacaggccgggcacggtggccacgcctgtaatcccagccctttgggaggccaaagtgagtggatcacctgaggtcaggagttcgagaccagcctgaccaacatggtgaaacaccatctctaataaatacaaaaaattagccaggcgtggtgccatgcacctgtaatcccagttacttgggaggatgaggcaggagaaccgcttgaacccaagaggaggaggttgcagtgagccgagattgcaccactgcactctagcctgggcaacaagagtaaaactccatctcaaaaaagaaataaataaaataaaattacttatcatacagcatgaagaggcagatctcaggcatcttgggagtatggaggaaggaggaatccttggtcatactcccaagtattggccaagagagttaaagaaaatgtcagcaagaagatggcattggaggtgatgtttacattgggttttgaatgacccctgtgggtagtaggaaagattcacgctatccgatagtgggcaggattttattctcagtacttctcttgctttaattctcacagtcagtagacaagtagacacagttgaccttcgcatcttcaatagcctttcttccttgtcacagaacatgcaggaagagcacattgtgtacagttgcataatatagttggtctaaacgttagttaattggctttgacattatttctgagagtcctacaatccaaattattaaaaaggcacagtaacgttaagaaaagcctgtcaggaatctgttttatgataccccaatgtaagtgagaagctccgaattttgataatatgatcagtgtggacttgattctttaaaaaaatattgaaaataatacatatatttagaagacaagaccagggagaaagagaatacgcaaactgaaagaacctatgaaaccgttttttaaaaggcaaggttggtactgagcttcctagaggctgaagcaaaaatagtttaaaaccccactgttggttatcttactcgtatcagtgggcttgagggacatactcttctctcaatggagtacaaaaaaggttttcttgttccaaaaaaatttttttcatgtgtatttatattcaagaaagatacagcattaaagaatgtggatcacagtgaaagtacaaatgaaacagtaaatgtggttgttaagagcacagactttgatgtcaagattgacccaaatttacaatctggctctgcaactggttacaatgttaagcaaagttgctacacctcagtttccttttctgtcaattgggaggtaaaagtgccagtcacggggttgaatcagaaggccttggtgaagagatgctggtacagtgttgaatagtttctggcacccagtatctggaagctgtagtgatgattgcagtggggttcttgtgtcttcttatgttaagaggagccccgtctgtcatcccaatctgtgacctacctcagaggtgctcgtgacccacacacgcttttaaacccaggccagggcatgaatgatgatgaaggcagcccagtggagagcgagggatccaagggggaggcgaacaaagcaaacaccccctcacgctgtgcctgtcttatttcttgaaggtgaatgattccaattgtgaccaagaacttctttccctgctcctggatgccaagctgctggtgaagtgtgtctccactcccttctatccacgtattgttgaccacctcttggctagcctccagcaagggcgctgggatgcagaggagctgggcagacacctgcgggaggccggccatgaagccgaagccgggtctctccttctggccgtgagggggactcaccaggccttcagaaccttcagtacagccctccgcgcagcacagcactgggtgtgagggccacctgtggccctgctccttagcagaaaaagcatctggagttgaatgctgttcccagaagcaacatgtgtatctgccgattgttctccatggttccaacaaattgcaaataaaactgtatggaaacg

SEQ ID NO: 397 - DNA, 3825 bp, Homo sapiens
ggccaggaaacacagcacctgggacaccactgtgagcagggcctggaacaggctgtgtgggagcagaatccaggtgggcttgcgggccacttggctccctgagcccccactggcctatgctgaccaaggtcctgacctccatcttaggcaagacatttaacctctgtgggcctcagttccctcccactgtaaaatgggcataataataatgatgcctgactcatagagtgttttcaaggactaagtgaaacaggtatgtgccgaggcctagtaaatgtcactatcaccatctacagtgatgggagcacaaggggccccaggctggacggcagcccagactcctgggactggcctgtacacaggtcccgacttcctgggccccgtgtcctcgcctctaaagccaacctggtgccttctgccacaactgccccttccagacctcagagacagttgagagaaggaggagtgagaacccacgtacaagaggatttcaaagtagctgtctatgaacgagatccagatgaacacgtggcgccgccagaagtaccacagctgcggaggaagggaggacagagggctgtgaaacctgctctcccgcatgccccctgctggcctggctgagtgggagcctgccacccaggctagagctaagtcagcagctttggttttgggggactcatgaatacttctgatagctgagatagcttgggactttctttccagaaagagcagccacctaggcaaggccggggggtgcaggtgaagagcctgtgcactgcatgcaggaaggggaagagcacctttcccttcccttctccctggcctcacagggagcacccataccccagccaacctgcgtttggtgcccaagttctgcccactctgcggaggtcccaatgtcttggtgtccagcctgtgtcctgcaggcttacagcatttcccactgaagaggccctactgggggaaatagcctgaaccccacctacctctggtctctgtgctccccaagaggggagcttcccagctgaggggcctggctaggggcaggcgcttccagctccattcctgggggagcagagtctgtactgccaaggaatcagagaagctatctgctaccccaaggaaccccaaaagcacagcagaggggttcctggggactcagaaggcaaggccagaacctctggccctcagcttcagtgaggctggttgctctgggtgggactgggtattgtcagtgaggggatgcagctaactttctctaagccccctgaagcagaattctaggtttgcttcttggtaggagaaggggaggggcactcacctggcccacgaggaggtagatcccccctagcaggataaggatgtggcccgtcagcagcatggagtttccaacctccgctttcaggtgaggggcggcctgctgaagacacactcagatgagacctagggccttgggtcctctctcgaacagctcacccttcagagctgaagctgagggcctactctgagcctgagctgtggagaggctcctcagaacggcatgggaacatgggctccagggaaggacccctggatcctgagaggcacattgtgtagcatttcagtgtagggtctgaagccagactccctggattcagattccctctccacaccacttccattctgtgtgaccctgggcaagttacttaacctctctgtgcctcccttccctctactataaactgggggtgattataattcaccatctcaagggttttgggggacattaattagtcaacacatgtccatcacctagaatcctttttcacatacagtgagcactcagcaaatcttcactgtatcaccgttagtactgcagtgctggctcccataagcttgggaatgtcactccagcagcccatgcctcagcactattactgccccatcttcccccagggttgtttcaagcaggcctcccccaagatgtgcccccccaaacctcacgcccttgccttcttcagggtaggctgatggtaggcaacagcggtgaagatgaacatgtagatcagattacacaggaagtttaagaagaacttggggatgagcagatcccatttcgcctgcagcagtttgttcaggggctccaaaacgaccattcggtgtcggtgctggggtggggaggggagagccatgggtacactcaacaagtgcaaataggctgcccactccatgtcaagatcaaagcaagggcccaggaaatgaggagagaggacagggagcaggcttccacaccccaggagccccaaaggacctcgccaaccctcccagctacagtgtgactaaggggcttgccctccaaatgagatgctggttaacagagaggacctggatggttgccacgaggcccttggcatgatccccgtcttggatgggactagagtatggattgagtatggacccggtggccatggtcagggtcgtgcctgctgggacatgcagccacacccccactggcacaggaatggggcagatatggtccagcaggcagccccaatttgtggaccttgctggaaactctgctgggtcctctgcgtgcacccatgctcctgtgggctcaccgggctcttgcaatgaaaggcaatgatctccagcactgagttctcctcacagctgtccacagaagccaggtcatacagcgacacccggacaggcccatagcaccactcggtgaactttcgggaaaggtggctcagtcctgaaaactcccgctgcaggatgtgcctgaaaatctgcagggtggccatatgagcttgcattcatggtcccttcctggcactgatcctgggccaaggctgggaaacacccaggactcagcagctgcccacggtctgcagagctgcagctgacacgtgcacgtacccccatacacgcaggtccttgtttgtctaaactcttaaacacacacacgcacccagccacatctgccccagcctgccagccagcctggctcttccttcccctcccctgccctgtggccttccttgaactcctcaaatggcagattgatccctagccctggggtccttgaggcccctgagatcagagtctactagctgtatctgtgtgtgcactttcgcggtcagaatctagaattttcaacagactagaaagtggtccctaatccaaacaggttaggaagcagtctggtttcacgcgtgaggaatgggaaaggaggaacagatcagggcactgctttcataggccacacagcagtgcctctagacaagaaagtgaggttcacacaccccagggagcactccaaaaaacttgggagggcagcgaaaaagggttaaaacttctatttatgtttatcgtttccttaatctttcaaaaatctccactgtaagcccatgaggccagccctggtgagctattggcaaaagctatttggaacaggccattggtaagctatctggaacaaagtgggggctgcctcatgtttactcttcctaccagaataacttccagctagtcaaagctctaggcattaaaaatgcagctgcaggctgggcgttttggctcatgcctgtaatctcagcactttgggaggctgaggcaggtggatcaccagaggtcgggagtttgagaccagcctgaccaacatggagaaaccccgtctctactaaaaatacaaaattagccgggcgtggtggcacatgcctgtaatcccagctactcgggaggctgaggcaagagaatcgcttgaactccggaggcggaggttgcagttagccgagatcgcgccattgtactccagcctgggcaacaagagcgaaactccatctc

SEQ ID NO: 398 - DNA, 3226 bp, Homo sapiens
aaaaaggagccgcgtccccgatgtgggggagcgtctgtaaactccccttcgggctgcccgcgtccacccgaggacacgccggcaagcagcgggggaaaaaggaagccgagatctccaaaggctccccggatgcctggcggtcacctctccagccacaggtcccggaggtttccttggggtcaggtcctggggccgggggccaaagaccactgaggcctaaggatcctctgaagcgtcgcaggacggtgacgctcccgcgagttcagcgccctgtgaaaccccttgcaattggccagttcggggcggtaggcggggacaccttctcatccgcccaatgagctgaccccgtacaaaaggccgaatgcgagcatgaccgacgggaggagaagtgtggatgctccctaaaccgggggctggccctgggccggggcgcgggcgggtcgtgggggaccgcgagcggcgggggcggggcgagcccgtgggggaggggcgcttccggacccccctcccgcccacgcaacaagcaggaccgggtcgggaggcccccagacccgcgagcgcgcgggacagtccgttcgccaacgcgcgaccgtgctggcccccgggctctcccggcccccccgcccgcatttcgccgacggcggggccgcagccaaggtcacggtgtccgggtgcttggggaccgcggggagtgaccacattcattcattccctccctcactcattcattcattccctcccctactccgtcattccctccctcactcactaattccctccctccctcattcattcgatccctccatcactcaatcattccttccctctctcactccttccctccctcacttgctcattcattgccaccctcactcactcattccctccctcacttactcattcattcccactcactcattccctccctcactcactcattccctccctcactcattccctccctcactcattcacttcctccctcactcattcattcactccctccctcattcattcattccctccctccctcactcattccctcccttactcatttattccatccctcactcattgcctccctccctcattccctccctctctccctcattcattcattccctccctcattcattccctccctcactcattccctccctcactcattcattccctccctcactcattcccttcctccctcattcattcattccctccctcactcatgcattaattccctccctcactcactcattccctccctcactcattcactccctccctccctcactcattcccccaccacctcccacagggtccccagcgggcatttccctgtcaggcacctgcagcaggaggggcagccacacaccctgggtctgcctgcctgggaggcgcagccgtggggatgtgggtccagggcagcaggggcagcctcccccagaatccagtccctggaagccatgcacagccctgtcccaccaagaccagcgggggcctggcctggctgcaactcccaggctcagagcctccgtggcctgtctagatacctgctgtcctggcccccagccttgaggtcctgggaatctgctttttttttttccttttttttgtgagatggagtctcactgtgttgcccaggctggagtgcagtggcgccatcttggcttactgcagcctccgcctcctgagttcaggcgatcctcctgcctcagcctcccgagtggctgggattgcaggcgtgcgccgccgcgcccggctaatttttgtatttttggtggagacggggtttcgccatgttggctaggctggtctcgggctcctgacttcaagtgatccgcccacctcggcctcccaaagtgctgggattacaggtgtggaccaccacgcccagctgaaatctgcattcttaaccagccccctgggcaagcctggcagagggatatggccctttggcttcctgacatgggctaaggttccaacgccatctttctggcgaagatgccagcacagggctgtgtggggaggcgtcagccagtaaaagccgtggctgaagaaaagcaagacagccacgggcctcggtggatcccactgcagcctcaggcacagagagggcagggctggtgaggtggggggcttgtcatgagtggggcttggggagactgactggatgtggtgtgtggctggggagggcctgggcctgaacctgtgggccatgggagccatagaaggttgtggaacaggagaagtaagacaaggccctggttccctgtgtgtgtgtggtgagggactgaggagacatggctcaggcatctagagaattcctgtcctggtgggaagtagtgccaggaggggctggggtttggggaggctgtggcaggtgagggtgagggacatggagcaggtgggggtgagggacatggagcaggtgggggtgaggggcatggagcaggtgggggagggaagaggctccctcagttgtgcatcctcagcccacaagtgtcctttgagcagcctgcacctggcacacgttttcaaggagaggggacttgttgggtccagctccctgggtacaaaggagaaactgaggcttggagagggtggggggtttgaatcagtaactataagatcctgggcaaggcttgtggctgactgtgccaggcacgcgcccacctttgccctggtccccttgggaggggagcaggaagtgtgatgcagagctgcctgcggtagggcgggacctccagtgccctgggtgccccctccggggcctgctggggccaggctctgcacaggggtttgagagcagaggcctcttcactgagggccgattcccccagaggaataagggcctctgcagtagagtgaaggtggacccttaccccggagcacgcacaaaaaccagctcaaaagtcagcctcgggccaggcgcggtggctcgcgctggtaatcccaggactttgggaggctgagtagggcggatcgcttgagctcgggagtttgagaccggcctgcccaacatggtggggccctgtctctactagaaatgcagaaattggttgggtgtggtggtgcacgcctgtaattccagctacttcgagggctgaggcgggagaatctcctgaacgcgggaggcggaggttgcggtgagccgagatggcgtcactgcactccggcttgggcaacagaacgagacttcatttaaaaataaaaagaaaaaaaaatt

SEQ ID NO: 399 - DNA, 4683 bp, Homo sapiens
ctttgctaattaaacttcaccacaaactctcaggaaaacaaaactcctactatcctccttggcttgatgacatagaaattttaatccaaccagaaattcctaaatacagtcatggagatggtataactgccgtggaaagaattttactaaaagctgcatcgcaaagtagaatgaacaaacgcatcattgaagagatatgtagaaaagtgacccctcctgtaccacctaaaaaagtcactgcagcagagaagaaaacattggacaaagaagaaaggcgacagaaggctagagagaggcagcagaaattgcttgcggagtttgcttcacgacagaaaagctttatggaaactgcaatggatgttgattctcctgagaatgatattcctatggagatcaccacggcagaaccacaggtttccgaggcagtatatgactgtgttatttgtggacagagtggcccctcctctgaagatcgacctactggattagttgtactgttacaagcatcctcagttttggggcagtgccgtgacaatgttgagccaaaaaagttgccgatcagtgaagaggagcagatttacccttgggatacctgtgcagccgttcatgatgtgaggctttcattattacagcgttattttaaggatagttcatgtctcttggcagtatcaattggctgggaaggaggtgtttatgtacaaacctgtggtcacacattacatatagattgtcataaatcttacatggaatcattacggaatgaccaggttcttcagggcttctcggtggacaaaggagaattcacgtgtccactctgtaggcagtttgctaacagtgttcttccatgttatcctggaagcaatgtggaaaataacccttggcaacgtcctagcaacaaaagcatacaagatctcataaaggaagtggaggagctgcagggacgaccgggagctttcccatcagaaacaaatttaagtaaagaaatggaatctgtaatgaaagatataaaaaataccactcagaagaaatatagagactatagcaagaccccgggctcaccagacaatgattttctctttatgtactccgttgctagaaccaatttagaacttgaattgattcatcgaggaggcaatttgtgttcaggtggtgcaagcacagctggcaaaaggtcttgtttaaatcagctgtttcatgtattagccttgcacatgcggctttatagcattgactctgagtataatccctggagaaagctcacccagttagaagagatgaatccacagctgggatatgaagaacaacagcctgaggttccaattctttatcatgatgtaacatcccttttgctcatccagatcttaatgatgccacaacccttacgcaaagaccactttacctgcattgtgaaggtactttttaccctactgtacacacaggctcttgcagcactctcagttaaatgcagcgaagaagataggtcagcctggaaacacgcgggagctctcaaaaagagtacatgtgatgcagaaaagtcttacgaagtattactgagctttgtgataagtgaactatttaaaggaaagttataccatgaagaaggaactcaggaatgtgcaatggttaaccctattgcttggtctcctgaatccatggaaaaatgcttacaggacttctgcttaccttttctcagaatcaccagccttcttcagcaccacctttttggggaagatctacctagctgccaggaagaagaagaattttcagttcttgccagctgcctgggacttctgccaacgttttaccaaacagaacatccattcatcagtgcctcctgtctggattggccagttccagcatttgatattataactcagtggtgttttgagataaaatcatttactgaaagacatgcagaacaaggaaaggccttgcttatccaagagtcaaaatggaaattaccacacctactacagttgcctgagaattataacaccatttttcagtactaccacagaaaaacctgtagtgtctgcaccaaggttcctaaagatcctgctgtttgccttgtgtgtggtacttttgtatgcctgaaaggactttgctgcaagcaacaaagttactgtgaatgtgtactgcactctcagaactgtggtgcaggaacaggtattttccttttgatcaatgcatcggtaattatcatcattcgaggtcaccgcttctgcctctggggttccgtgtatttggatgctcatggagaggaagaccgggatcttaggcgaggcaaacctctctacatttgtaaggaaagatacaaagttcttgagcaacagtggatttctcatacttttgatcacatcaataaaagatggggtccacattacaatgggctgtgactctccacctcagcattgcatcgtatcatcattttcgctacgaatttatttttcaacaataagctttaacttaatttgggggattaacacttttgctgagggagaaaaagaaaacatacattatgaagcctttccaaaattaggtgcttggtaatcacgttaatggtataattttttttttttaatatctggagaacattaataacaagttaaattattctttagtggtcattttttaagtgcacaattaataagaagcacaacttgttcacaaactcattcagaaatgattctcccaacaatgcatatcagctattcattgatacttagagtgggtgtgatttatttgacattttactgcttctttctgtctgtgtgttttaatttgcatctgccaagcataatgcatcttttttcctctgccattcttgtgttgattggagaatttttctgtatgtaattagaaaaaaatgtaaaacatgatttatgtgaaatactgtatagtaaaagttggtctaatagtagaactttaaaattttttcttattgtgaggaatctgttaaaagtttaaagctttgctgaaaactgaattcattctcaggaatttcataaatcttctccccaggtaaataattgaaatagctgtaaaataagtagatagctgctgttaatataatacagtacattttggggggcatatgtgtggttggggggtccttaaaaatcaaaatttgccatttcagttggatgaattactagaggtaataacaaatcttactataaaatcaagaggtttaagaacattcactgggcagatgttgattccgtgcatgcccaccttttattaccaaacaaggttttgtttatatgattgtattagaaatgctcagacttccccagaaatgaaccataaattttggaacttcctttcagctcaagaggttcagctatattgtatttgtgcagtgtaatcactactatttctgctcggtttcctaaaaggaaaaaaaaggcgcagtggtgatgaccctcatgaatgagccacgcttctgcattcttcttagaaactgctgtgaaaaacaatttatgtttgcagggtttaaaaatcagtaaaaatgggaatgattgagctaaaacccactctatgagaaagaagattactgaaaagcatgtgacatattgctacaaagattttttttcctaaatgattcagtaattgaatgattatttaatatatagtgctatcaagcaatccctggtactttggacttccatggcttgttatataaaattacatttttacatgtaaaaataaactaaacaaatctaatgataaaatataatgtcagatccatgttctaaaaaatttttgtaatgacatgacattacaagagtataaaaatggacattaaatcatggccttgcattaaaatatggaaagcagagcagtacatattcaaatgtattcagaaagtcaaaagattacctatcgttctacaataaaatacatggaaatagcttgctatttttatatacatttccaaaatattaagataactttctgtaagagtcaatgattctgttcgactaaatagctgtcctttccaacacattgctacttttttaaatactgtatcataagttcagcctgtcatactttttgcattgatcgttatgaataccagaccatttgtaagtgtggttgaagagcaaaatgctaattgacatctctagtaaatactgttacaggattcatgaacttgaataattctacagtttgaaactctgatgctatatatacatggtataatgtattcagactttgattactacttatttaaaatggaatgttttatggttgtgcatatggatgtgaagtgaaaatattagccttaactttaaaatttgggtgtttgatagtgtttattttgatattggtgaattagtcaccagtaaattttaaaaaagcacttggttgaaaattgtacttgaatacatacatgcatgctgctaaactagaactttaatttttccccataacttttataagtcccatttataaacccacttttaaaaataacaggtccaagttagagtgatgtgtgtatattattcaaaaaaatgtactggtgtgatatcttgtatgaatgatcatttaaatacagtacattactgtagaagctaaattgatctttataattaagcagaaattacaaaactaggaataatcaacattgtaagatatgttaataaaaacctgctgtcatttggtttgtgaaaggtcctt

SEQ ID NO: 400 - DNA, 3392 bp, Homo sapiens
gtcggcgctgcagcctgagccgggcggggtcccgctgcactcgtcctggaccttctggctcgacagatccctccctggtgccacagcagctgagtgcgcatcaaatctgaagaaaatctacacagtacagacagtacagatattttggagtgtatacaataatatccctcctgtgactagcctgcctttgagatgtagttatcatttaatgagaggagagaggcgaccactttgggaagaggagagtaatgcaaagggtggcgtatggaagatgaaagtccccaaggacagcacgtccacagtttggaaagagttgctgttagcaaccatcggggaacagttcacagactgtgccgcagcagatgatgaagtaataggagttagtgtcagtgttcgggaccgagaagacgtcgtccaagtctggaatgtaaatgcctctttagtgggtgaagcgactgttttagaaaagatctatgaacttctgccccacataacttttaaagcagtattttataaaccccatgaagagcatcatgcttttgaaggtggacgtggaaaacactaattgcactctgtaaagaattctttgtcctttgctgattggttttggaaacggtcttaacaggagggagagtgaagagaagacttgccgaagccgatgctggtcaatttagagtgggtttctgtccttgcagatgggcaattaggactcaaagtggcaggtggggtggggggagattgtgtgggtttctaccgtcacattacttgctttttaaaaaaaacacacacaaaaaactttttttttggctttctaaattctctgttcttttcactctgatttttttttttttttttgccgtttaaaattccttattcagcctaattattgttttctacactcccctttcattgaggcacaagaaatgggtttccctttaagtagctctgctgtacctagttaatgagaatatgcataatcatgacaatactgcttttgaataccacactgtacaaggaggaacactagcttggagaaatctgtcttctgattatttgttgtgacacattcctatgtactgtgagctgggcattgtttttttctgtcccagggaaaagaaaaaccatacttaatgtgattttgcactgacagcacacaaatctttaattttcctttttaaaacatttttttttagtgataaaaggaaaataatagttggattgcataacatgaaaactataatcacaattcagtatcaggatataaatcaagctctaagtctttggaccctctgtggaaacatttctaacccgaattttaatttggccttttcaaccaaaggcttagagtggtagcaagggatttcttccaataggaaacctgatgtttctgatttaaagagaaggtgatattttaattgtttgaattaagctccttgcgaagttcgggtgtgtttacccacttagggctttctttcccagtcaacgctaacacattttgttaaatgatccctttccctgctcacattgtgtgtcatttctcatcatcagtagtcctccagcctgggcagctgtccccaccctttttcatgtaggtgcaggaagttaaatctcatttccaggatgcatgtgaacatttacaaagttgaactttgagtgcattctgctcatatgaattattgggattgttgatatatattgtattatgctaccaaagaaatattggttttattagaaggaaatggtcatcctctggaccatggagactagctcagaatacgctgatttccctctcctgactttgccaagcctttggctgcttttgcctgataaagggcagggccatctgaagacacttcccccagtcggctttggagtcacgggagctagtgcctgctcacacatttttcaaaagggcagtgcactcagaacttcactgtacctgggatttttaattcctcttgcagtgttgaccagcagagagacttgaggctactttaagcctccactatgtgtttgtagataaaattctccattcaaacattttaaaggactttgaacattatctgcttatggaagttgtgcccttcacttggttagtaaccacctcagccataatacttaccatcataggtttcttaaaatgcttttttttttttccctaaacttgagtttccttagtgatttcaaaatgaagtataagaatatcagatccagttagcaaaagcctaggacttgtttctccaaacattgtactaacattcaacttgttttaaaattatgactcaagaattttaaaaaattattctggacatgaattaaaacttttttataatataagtatttttctgattgaaaaaaggatataattgacttcactctaattgtcatgtatatttccataagtaaatggattttgaagtatttttattttttggactttatttaaagcatttgtgatgacatgttcaacttttgcatgtatgtagcctttgaagtaaaaataaataggaatgttaggctcacgttaatatttctagtttctgtttatgatcatggaacatgactagcacacaaagtagatttttgccccagtgaacttctgcaactgtttctgaccctttagaaaataccaactgtgagaaggatttaatttgcctaatgttaaaaacctatcatctaaattactttcagagaggattttgtcagattttggtttggaaattgttttaattgaatatttaatcataatagactttgtatgaactaagctgatttaatcagtttaaaaacctctcattaccttcttagattaaagaagctaatactgttttgagatagaaggaaatattttgtggggcatgtgacttttgtgttaaggcagtttacccatcttggctgatgtggggaaagtgcaaacttccagtagaatcccggtcttttcatccaagtgcttgcaggggcagccttgtagtctgcaaagaaccatgcagaaaccaaagagcttgcttttttgtctttgtaattccttagggtctgtgatatatgccaggaagtctgattgaaactaatatgctttttattctcccattattccctaaattgttatatcacaggcacttgcctacattgggaaagtaaggacaaataatacccatttaaagtaacttgcctatattttgactgtctttcgtaagcacttgctgaactgctgacttaactcagttttaagatttcctctttccccccaacttttccacatttcttaaatgagggtgtaatttactgcaaacatgtacatttaatataatattgctgttagactcatggtacactttatgaagcaaaaacatgaaaaggaaaccacaactctaataaactttaaattaaagatt

SEQ ID NO: 401 - DNA, 4077 bp, Homo sapiens
gcttccacccaacttcctgttaggacccacccgaggacgggtcaccatggctttggagcacctggtagtgtggcgtgtccacagtgaagaccagagtttcgttgtccttaagactgacctggggagacgtggctgcaggccattgaggaagacggcaccgaaagcgaaggaagctcctgctcctcctaaagccgaagccaaagtgaaagctttaaaggccaagaaggcagtgttgaaaggtgtccgcagccacacgcaaaaaagaagatccgcatgtcactcaccttcaggcggcccaagacactgcggctccggaggcagcccagatatcctcggaagagcacccccaggagaaacaagcttggccactatgctatcaagtttccgctgaccactgagtgggccggaagaagatagaagaaaacaacacgcttgtgttcactgtggatgttaaagccaacaagcaccagatcagacaggctgtgaagaagctctgtgacagtgatgtggccaaggtcaccaccctgatttttcctgataaagagaacaaggcatatgttcgactggctcctgattatgaagctttggatgttgcaacaaaattgggatcatctaaactgagtccagctggctaactctaaatacatgtgtatcttttcaccataaaagaataatgtttttcataagagtgacaacttaattagaatcaaatctataagctttaagattttacatttctgtaagtataatattagcttatttgactagaactcaagcagaataggaatttatgtttgttttatattcaagtgataactttgaagacatagttttattacaccaaaaattttatattaatctcatttaagtaagttttatccaaatcatgttaacttaaaaaacatttgatcagttcctatatttctaggagtttggtgaatatttatttataaatggttatttttttccaagccaagttagaatagagcacttttataggattttataaatgaattttgcagtgctatccggagttaagaaaatatcacatatacattacatacagtaatagatatacaaacacaaatagagatttcatagctttcatcctgaaatttcagccatgaatcaggcataaatattctgatggttaattttagacacctacttgattggattaagaaacatacatagctggtcaaacaatttcagccatgaaacaggcataaatattctgatggttaattttagacatctacttgactggattgagagacacacatagctggtgaaacacaatttctgggcatatctgtgaaggtgtttctggaagacactgagataaccctgacccagtgtggatgggcactgatatggtttgcctgtgtccccacccagatctcatcttgaactgtagttcctataatccgtacatgtcgtgggagggacccagtgggaggtgactgaatcatggtggttgttactgccattctgttttcatggcagtgagtgagttctcatgatccaatggtttcataaggggctgttcccctttggctcagcacttcttcttgttgctgccatgtgaagaaggacgtctttgtttccccttctgccatgattgtgaggcctctgcagccacgtggaactgtcagcccatttaacctctttgttctttataaattgctcagactcaggtatttcttcatagctgtataaaaatggatgaatacaggcaccatccaattggttgagagcccagatagaataacaaggaagaggaaaggtgaattatctcctgaaattgaaacatccttcttctcctgcccttgacatcagaatcagtgtctcagagctttggcctcagaatcagagttacaccattggcttccctgattctgagtcctttatatctggagtgagtcatgctgccagctttcctggttctccaacttggagacaggctattgtgtaacttctcagcctccataattatgtgaaccaattcccctaatgagtcttctctcatctatctacatatatcctattgattctgcctttctggagaaccctgactaatgttattacaataatacaaaattcactagtttatatagaagacttggtttttgtctttgccccattttgtatttgtattataactgtgtatctggaaaatggaacaagtttttatcttcttcatatgagggccaaagcttttttctcaccaatatttttggagatttttaagattttcttttgtttggacatacaatcttatggaggctgagaaataaaattttttctattttatttttcagccccagatgtttgcttttgcagattcttgagcacattgagagcatggagagcactccaaggcatggagtggggtgcctaaagtttcagtgattacagggagttgagagactcaactgggaaaggaaaagtctaaaaggaggcaatttggaagataaaaattttctcaaaggagcgattaaatttctaaataattcttagtaaaatcatgtaaacaggaaaggaaatagaattagttccatattggtggaacacatagcagaggtttgagaagggagaatttagtgtgtatgttaaccccatcatcccatcctagcaaagctgagaactcagttttgaaagttactctgtggtcccctcagccaagagtggttctgttcagtcagttgggagcttataatttaatttttgtttatcaatgctaatgcgaaagagtacgctgtcttcatggcagctgaatttgcaagaaactccttggatggggttaatggcagctgtatttttctgggagctctgctttaattggacaaagtaagttgtggtaagatttcttcttttatcttcagtatctcaaatgttttcatttaaataatctttataacaacttttgatgtctgagtggattcccatacagtcatctattgtaagactttctgattccgtttttttcctttggtcattatgaatagggcttatgtaaataattgcatggtagcttttgattggaagtaacatcaaagtagttgtcaaaatacttaggaatgttatttttggattgtaaggtgagacttgtttagctttggaaaaaaatgcccaacttgtaataggggaggaaaaataattttctgtttttggaattcttagatgggatgctctgtaaaaactgacagattaaaatgagaaaaacagaaaagttgaaaaacacgtataccttatggttacatgggagatattcagggaaaaatgagtaaatctccaacaggtggctttcaattcaagcataaatactgtcttcaacttaaagaaagaagatttgaggtgcagtattggggagttaaccagcaaaagcacattagacaagggtaaggttcattatacagacttaagtccatgcattctccattgataagactctttagtgatttagttatccttctcttcttggtgtcgagagaggtagcttttaaatggtgatttcctttatagatgtaaattttccttacacaagtgtaacttctctgttttcacaacttcctttgttagcattttttttttttcaaaataattagcttggaataattcttaagccaaagggacatattttggggttgcatattctggtttcctaccattatattttggggtggcatattttggtcttatacactgtgttccaccggcaatgaaaagagttcttgtttttcctccagcaatttgtcatttgttaaagagtttagcagttctaagagatatagaccagctgtgctatctttttgtggttttcagttctctagtatgttgagcatctttttgtaagtgtacttgccatctgtagatcttctttggtgaggcgtctgttcagatctgtgtgcatttttaattgggctgtttaacttattgtttagttttaacaattttttatgtattttgaatacaaattctcagatctgtattttgcaaatattttcttcaatatgtggcttgtcttttggttctcttaacaaggtctcttccagagtataaactgtaaatattaag

SEQ ID NO: 402 - DNA, 3452 bp, Homo sapiens
ggatgcctaatgtatatcacaaattcaaccaaaataacaaactctttttttccaccctatacatgcaacacacaccagacaccccatttcgccgatgacaatataatctttcagcctaacaggctgacagtttccaggtcaccttcacttccttgtgctacaaatctaatcagttgccaaatcaatttcatttctattttaaacatttttcaaaagttcctctttagtgtagttttccttttctttctgctacattgtcctagtccaggccctcattatctatcccctgagcaccccaatagctctggttgggaaaataggactgaaacctaaaaatcaacatcaacacaaagtaatatatgctaaaggatatgtgaatggaaaaaaaaaaagaggtccctaactggctatgcaaaagtcagatctggacacagatatgtttcatctgacctgaagatcatttttacactattgagtcaactttaaggaaagacaaaataaaaatctatatgttcaggttttctggtaaagggggtgatctggcaacactagagtctagtccattcagtgtagttgtcaactggagctgagctgcagtcccctccttagacatctgctctctgaggccccataggcatcaccattccctagcttcactcaattacttactttcacctggctctactcagccatgcttcttggtccccgtaggtggctgagtttgtaaattctgttgtaaaagtcagtgctaagggtttttgttggtaaggatgctagttgtgctgcatatatccttgacacctaacacttcatctctcacacagtaagcactcaataaatgttgggagaaagttttggaggtgcctatgggcaggcaaagtacaaaggtacacaaagaaagcaggatttaaattgagccttggccaaaacaggtggatttgattaacatacaaagaggagagaaaataatatttgagacaaagaatattctgttttaatcccaaatttggtacttgttgtttaatcttattgtttaatttacttaacttctttgagcctcggtttccctgtctgctgaattaggataacatatatgtcttagtgttattataactaaggtaaattagtaagattcaattactgaaatactgaaattactgaggtaaattacacagtagaattcaataaattgtagttattaacaacaacaacaagataataataataactccctgaataaagtcaccaatagatgtatacagtcagggcatgtgggtagcccaattagactgaagcaaaatgcttcacagagggaaacaatgataggtaaaaaaggagagagagatgacagaaaccagagtcagtcgccatttctctctccaaccaactcaaatcctaaagctaacaaatgcattactgagtttcctgtggaaacaaagtgtaacaaaggccagggactgtgatgtggtcctccaagtagaaagagcttgagctttgaatcagatacacatgggttctaatatcagggctggcacttactagctgtgtaaacgagccagattgttaaccgttctaaatctcatttgccttatctataaaatggggatgggatggccttttaaaatagggttgctgtattaaacagtaatataaatgctactcatgatgggaacacaataaatcttagttctttaaactgtaccacggttgcaccatcatgtgctatctatcctctgtccctttcttttctttctctcttgtttgtatttgccgcctatgtttttctctatctcttcttcactaggctcttttgcctccttatctatacctagtgtgttaagtgtttactaagattaatctcattcaaaagcatttatagactccttactgtaagtcaggcattatgctaatacacatgttagcacagctccctctccctctactggccctggaagtacttcaagctcattttcacatatgagccatgtcccttccaggtaaatcagtttgcaaagtatatcagcttgaagttaaacaaggccacattctgagccaaactgtgctcacattttctgtagttccaaaagactgtgtgggcatagcatagagaagaaccaggaaacctgggataggtatcactggaactacaggaagcatcagtgaacaacagtagaggaacaaaagtcaaaggatagccaggcaaatcctttgacccattaatcatatctgtcaattttgcctaaggaaataattatggatatgcacaaagatttaactacaaaatattccttccagacttgtctataatactacaaagtaaaacaaaccttaacatctaacaacagattaattcaattatgttttattcatgtaagctattaataaagcgtgtcacagaggaatatttattaacaaggaaagatgcccaggctgtattattaactgagaaaagcaggttgcaaggcaaaatatatgaatgaacctgtgtttgcaagtatatatgaatagagaaaagactggaagccaagcgagatgttaatgattgactctgaaggtgagattatgaatttttactttttattttgtgtttctagctttgtttccatgtaccacttttataacaagaagaaataccacacacacacacacacacacacacacacacacacacacacacaagtgttctgtgagtggagacagatgatagctagaaagctagcaaggtggatggatgatgatgatagatagatagatagatagatagatagatagatagatagatcgatcgatctatctccacatcagggaggcacatcaagccagatgtttaggaacacagtgtttaatgagccttatggggtatcattagtaacaggttaatgaaaacaggcaaaggtcctgcaacttgtgtccgagcctgttctttttgccatcaggtcgacgcccacggtaacattctcctcagcaccctggaaatccggaatgagacgagtggctcggaagtgctcacgagcgtgagcgaccccaaggccaccatgtactcctatgacagcgccagcatccagtaccgcaagcccctgagcagccgcgaggcctacgggcgcgccctggaccggcacggggtacccagcaaggggcgcatccgcaggcgtgcctcccagctcaaagtcaagatccccgacttgactgatgtgaattccatagacaagtggtcccgaatgtttttccccatcaccttttctctttttaatgtcgtctattggctttactatgtacactgaggtctgttctaatggttccatttagactactttcctcttctattgttttttaaccttacaggtccccaacagcgatactgctgtttctcgaggtaagaggttcagccatccaattggttttaggtcttgcatatcagttttattactgcaccatgtttacttcaaaaagac

SEQ ID NO: 403 - DNA, 3448 bp, Homo sapiens
tttgagacagagtcttgctctgtcatgcaggctggagtgcaatggcttgatctcagctcactgcaacctccacctctggggcttaatcgagtctcctgcctcagcctcccaagtagctgggattacaggtgtgagctgccacgcccggctaatttttgtatttttagtagagatggggtttcgctatgttagccaggctggtcttgaactcctggcctcaagtgatctgcccccgttggcctcccaaagtgctgggattacagacatgagcctctgtgcccgccaacaatctattaatgagagtgcagtcctcctctcctgcagagatttgtccactggggcccagagaccagagaggctacgcttccaactggaaacaacagaaaaggttcttgggaatacatggtgtcttgagctgggtcatgaaggccacatagtagtcaaggagttccaagtggagagtcctgatgggcaaaagtttggaggcagacagagggttctgtgagcagccagcaggacagttagggcagtggatgtggggttgcaatagaagaaaaggcttaaaggtggttgatgtggaccgtgggctgcagagtctgggtaagatgatctgtgcatgggaggctgttggcagtgaacattcatttattcacttggcaattatttactgagtacctgccctggaccaggcctttggaacccaatagaggctgggaagacaaggtcctgccctgtggttcttacagggagtgggaaacagataaaaaccaagggttccaagggaagcctgcagggactgacttggggactcaagcaggaaagcaggaatgctttccagactaggtggttaggaacagctgaggagcaaaattagagctgagacctcaaagtggaagcctggcccccgtgtcatgagaaggggtggaggtggcagccatcaggaaggaagggggctggggagagggctgcaggtatccttcagtagtgagtgtgatgcctcttgatctggtgtcagtccctaaggatatgggctgtccccctaagatgatacatggacactcagaatgtcactgagggaccactggagatcgtgcaggctgagactagggaggatggggtgcccctgaggttccccagtatgcctggcaatggtaggattctgcccactgctcctcgcaggctctgatggctggccttgggcttaggagcatgttgctctgacaagtagggctgtggatggcccatcatggcctggttggagctgctgttaaaccagggttgccatatgggccccacaggctccagattgctgccagggagcaactgccagccagcaagcaggcccagggtgcagcacaggcagaatgaggccagggcctgagaggtctcctgggtggaggtaaggcaggatgccagtgttttcccttggcacccatgcagtgggtaagcagatggaggcacccttaagggcagaatggggcctagaaactgccctcgttactttcagtgaaaggttttgtccttggaacttgagaacgctctcttactctttgttctagaggaacattcagaaggcctgggtggatgcccctcttgccaaaatcagaggtaggaagctcgtaggacaaaggcagcggagggcagaagatagctcctggggaccggagacaggcccagaggtgctcactgagtgctgcttcctctccccgatgccagcctcaagcagggccgtgggtacaaggaggagcaaatctgcaccaggctttctgccttacccaggaaggaaaagtgcttggtacaggcagaccaggatcagtggtgggggaggttcctggaggagagggggctgcacctgctggacagtgaggggtagggaagatttggaaaggaaggtgtgggggtggctgttagctgaggaagaggggaaaaggcatggaaattgcgtaaaggttctggccttttctgtagatccttctgaatcccagggtctcaggggagggaggagggcttggggcaagggctgagaggtggggaccacaggggctggggctggggctggatccacttgctcagggtggcaggggctaggccagaagaccccagagttcctgtcacagcctacccacaggagagcaagggagcacccctacatgcaaccctggacaggaggggagagtgaggattgataccctagtttcttttcaggttttgggggtcctgcaggaggagctctgggccaggctggaaatcaaaccagattcaagctgtgaatggggcacaaagaatgtgggaggatttggggtaaaccacagggctgtgctttccccgaggcagaggtagtcatgctcctggtagtcagaaactgccagtttagggaagagcaggatgatggcagaagtccctggattccccgcccaaggtggtcccccaagtcttacccacttcctccctctcctcagggcattgtacagggtttcttactctggcctagaggtcctagatgttttctcaggctgcctaggccctcatcttcaaggttgtacaatgggggaccggacctaggggccttcttaggttcctcttgcatcagagtttttgggagttgacctgggctgatgcctaggggctccagtcccccacccctaccttagtccactgggggccgtcagcctcccataggaactccggagaccaccagctcagggccttgcctagagccactgctctacacgctacagagtctggccactgcctgtctctggttctttttacatgttgtagagacggggtgtcagtatgttgcccaggctggacttgaactcctgggctcaagagatcctcctgcctcagcctcttgagtaactgggactgcaggcatgtgctaccttaccgggtccctttactttttgcctgcatgtggctttgagcctgggaagagttgaggggagggaatgtgctgaagttttccctttcttcttcagccctggggagccacaggcaggtgctgagtggctggagctacagttagtattggcagcccagccaataggtggggcccaccagtccccaggccgggcctgtgtgggctcccaggctggagggagcctcttgagtccccagactcagtctgggcactgtctgcagctaacaatgtcaaaaggaggcatggggccggtgtggtggctcacgcctgtagtcccagcactttgggaggccgaggcgggtggatcacaaggtcaggagttcaagaccagcctggccaacatggtaaaaccccatctctactaaaaatacaaaaattagccgggtgtggtggtgcacacctgtaatcctagctactcaggaggcttgggcaggagaatcacttgaaccttggaggcgaaggttgcagtgagccgagattgtgccactgcactccagcctgggtgacagagcaagactctgtctc

SEQ ID NO: 404 - DNA, 3793 bp, Homo sapiens
atttattgtaatttactttgaagtaaattccaaaaacatctgagattttaacactattgttttcccctttatagctcaggcatttgaaaggatgatgagtccaactggttctaatcttaagtctaatcattctgatgaatgtactactgtccagcctcctcaggagaaccaaacatccagtataccttcaccagcaactttgccagtctcagcacttaaacaaccaggtgttgaaggactatgttccaaagaacagaagagagtatggtttgcagatggtatattgcccaatggtgaagttgcagatacaacaaaattatcatctggaagtaaaagatgttctgaagactttagtcctctctcacctgatgtgcctatgtatttcagattataggttactgtgtgatattaacaagtatgtctgcaataagattagtcttctacctaatgatgaggacagtttgcccccacttctggttgcatctggagaaaagggatcagtgcctgtagtagaagaacatccatctcatgagcagatcattttgcttcttgaaggtgaaggctttcatcctgttacatttgtcctaaatgctaatctactcgtgaatgtcaaattcatattttattcctcagacaaatattggtacttttcaaccaatggattgcatggcttgggacaggcagaaattattattctattgttatgtttgccaaatgaagatactattcctaaggacatcttcagactatttatcaccatatataaggatgctctaaaaggaaaatacatagaaaacttggacaatattacctttactgagagttttctcagtagcaaggatcacggaggattcctgtttattacacctacttttcagaaacttgatgatctctcattaccaagtaatccttttctttgtggaattcttatccagaagcttgagattcctgggcaaaggtttttcctatgcgtttaatgttgagattgggtgcagaatataaagcatatcctgctcctctaacaagcatcagaggccgaaaacctctttttggagaaataggacacactattatgaacttacttgttgaccttcgaaattaccagtataccttgcataatatagatcaactgttgattcatatggaaatgggaaaaagctgcataaaaataccacggaaaaagtacagtgatgtaatgaaagtactaaattcttccaatgagcatgtcattagcattggagcaagtttcagtacagaagcagattctcatctagtctgtatacagaatgatggaatttatgaaacacaggccaacagtgccactggccatcctagaaaagtgacaggtgcaagttttgtggtattcaatggagctctaaaaacatcttcaggatttcttgctaagtccagcatagttgaagatggcttaatggtacaaataactccagagaccatgaatggcttgcggctagctttacgagaacagaaagactttaaaattacatgtgggaaagttgatgcagtagacctgagagaatacgtggatatctgctgggtagatgctgaagaaaaaggaaacaaaggagttatcagttcagtggatggaatatcattacaaggatttccaagtgaaaaaataaaactggaagcagattttgaaaccgatgagaagattgtaaaatgtaccgaggtgttctactttctaaaggaccaggatttatctattttatcaacttcttatcagtttgcaaaagaaatagccatggcttgtagtgctgcgctgtgccctcacctgaaaactctaaaaagtaatgggatgaataaaattggactcagagtttccattgacactgatatggttgaatttcaggcaggatctgaaggccaacttctgcctcagcattatctaaatgatcttgatagtgctctgatacctgtgatccatggtgggacctccaactctagtttaccattagaaatagaattagtgtttttcattatagaacatcttttttagtgaaagaatgtgccatattacatattgcaacctaatttgttaaaactaactccagcactaaagctgaaatgccacaaacactaaaagtataaatatgtctgatttttgaaacacataagctttgctctttaggcaggaatgatcttttcaaatcattagcacaatatttaaatatctaaaaatttaagagatccatactttctgtagctttacaattaatttaagtactaaaaagacaaggatttcttttaagaaatttatagcatttactgtgttatttaaatgctaagccaaagtatctgcacttaggtatacctctttatgccaataatgattttaatgaaggctcttttcagatgtaaccttatgaaggaaatatctgctttgtgtatatgccagttagaatactggtttctaaagtctgtcaaattgtatttcagtggcacaaaaaccagttttgaggtcttagacttataattctttgaataaaactgataacttatttgtataattggagtggagacctacctccataattagataaactctttttggattataatcagaattttgccttttttcttctcaaattattacatatgtatgtattatatatccacatatatagttttccctgattaaatggatattaaaataattgcgggtgcttcaggactttttgcttctatatttaagtatattgtttttatagcaagaacatattctgaatgttttataaatctttaataatttatatgtaggtaatatttttgtatcacaatgcattatttttttcctcctttccttccaaactataccactgtatttaccacttctaagagtgactgacgacgggccagatgacccttgaagtagtcattatgtagcaataaatgaagcctgaaacaggtttttttacttccactttaatccttagaaatttcttggcaacttcgcatattttcattgacaccggtgtataagtataaatttaaatgaactaattacttttgcatattttaaattctttatatggtagttattttttataacaggatattaacataagttaaatcctatgtatttgaaattgttacagagctttcctctttacttcaaacagcaaaaaagtggggggcatattgtagtcctgtcatttaagttatgtaaaaaatttaatcattattttgatgctttaaacattctcatgtgtaatatatgtttttgtatcaaaaacactcatatatttcaagaaaaagaaattatgttaaatagccctgttttaagaaaaatatttatgaagcatctcaacttgaagatcaagtcaaagttataactcaggatctgaggtctcaagctaggagagactgagaattttaatcagtttgggcatatagtttggactgaatcacatctgtagtacttagccaaagacaatttggaggagaatatcagccttctggaagtagctacttcctgaacaatgtaaagtgtcgcagatattcaataaaatggcaacctgttataatttgtgaaatttattgaaatggtgtaagatgaaaacaattgcatatcaaacccaatttatgttttctaaatatagtgtatgtattctgccatgtaagtaattgaacagtcttaaaataaccaaatggtagagggctgttccatgatgggacagctttggatttgttttcataaaatctctacattcaataaaaattggaattatgtgcctgaagtttggaggcacattttgaagtattctttgtagac

SEQ ID NO: 405 - DNA, 4084 bp, Homo sapiens
cccaggtctaggcgagggatggaaataaggacagtgccactagggccccctgtctgtacaggaggggccctgagacagctcctcaaacccctttcccattatacggatggtgcagatggggacactgaggtacagagagacagtcagttgtcctcagaattggatccagaacctcgtcttctggcatggccccccagtgcagcaccacatgtggcctccgaattcccagtctgggattgggggagctctggtccttgggggaccaccatgctcttttggagttgtcaacttggtaggaaccctctggttccaacgctgtgcctttgcggccctctcctggcatctgctgtccctttaggaggtcctaccacccttttcttctgagcctggacaactccttcccttgcccccaggagcccacagccggctaaaccaactggtcagctagaaccaaccagcaggggaggtgcgctccaggggggcttctaagaggaggcagttttggagtcagaggtgaagtgtggggagtgggattgggtgatagggaagtttctccagcaaagacactgggcaagcctcttccttggcccccagataaagggctgcagggtggtctccgtgtaagagggtggggctctgccctctgtcaggcccttcctggccctccgagcacaggagaggccctggctccacctgtgtcttgcttccctgacttcctcccacctctacattctagcctggggcagaagtagggtggaggggtgggtctagcctccttgatgacacagttggggttggaggtgggggctacccctattctgggcctggtgctgtccctgaagtcaggggtcagcctcacaccgagctctctgccaaaaccccggatcacaagcatgagctccagcaggtccgcttgagtgaacaccgctgatcctgcctgcaggggtataggcctggggcctgccagccgtccgcactgtctgtggggtgttttgggttgcaggttccatgtcctgaagcaggagagccctccccatgccacctcctctgcccagcctcttagggacagtgcctgagatgccctggctggagtgaggactggggtgtgctttcagcccatagctggccctgggcataaaggcatctgctgtggtgctgcagccaaggccaggctgtgctctgtgcttgtgtcggggagcccttggcagtggccaccccacaggtggctttttattccctcctgctgctgagtgtcacgcgtggggctgagggcctgcacgccttcccggcctcatcctctccgacgattcacgccctcctaaggctggcaggataggagccatgctcccctggggtggctctggaacgtgggccccgtgcacaggctatgtagtctgctcacacccttgctgcctgccacccgggcacccaggacttgagcccagaccctggccaccctgttgttgtgggagtattaggggaagttgccactaaggctggcaggtcctggagttccacccaggatggggacatgggggagggaagaggaggtgcccctcagagcctgaggccaggaccaagtggggtgatcaggacccctccaggtgggtcccgggtgcggatggccagttgggcgcatgcttattgggcctgcatccgttggccacggaggctctttgggacaagcaaatagaatgccccagaaataaacttggcccaagtttgtgacggttctgggtatgaaagaagtcagtgtttcccaagtgcctgctatgtgcgaggctctgtgctggggcgggtgcatgtgtgcgttgggggcgtggacaggaggggtgggaaaggcctgtgacatttcctctggtggtttccacgaacccaggcgtcacccctcggtggagataaagtggagccacccagctccaccgtgtctcagcctggggtcggcctctgctgcttctggactcagtgaccctgggctgtcagggagcttctgagccttggttttcctgtcgagtaagatggaggtaatcgtgtcttatggggttgttttgagggttaaatgagctggtggctgtgtgggaaagagctctgcctcccgcagggaggaactgtgctgttcttattattgtgaacttagtgacaagtgtggcactattacccatttccttgtctgcccccaaccctggggtcttgggcagagaacaggagttcttgccattttctcccagctcccaccttgtgctggcttgcgggtgctgaggtcatatttgctgggtgaaagggtgcaggccagatatgagccaggcctggcagagagggttttggtcagcagtgatacctgcagtgttctctgcagttggtttgggctggccctgctcctgagaactcctgggttgtcccttcaggcaaccagggaaggctccttggagcagcagcatctccccttaccactcgccgacaccagctcccgcctgacccagagaaggagtttggggacagccacagcacgtccagggctcccaaggcagctggcagagccaatgaggagaccccaacacccatccgacggctgcagctctccctgacgtgtgtcacccgcagccctggtcccagccgctgtgcttctcagggcctgcctgcccagcccgggtggatatggtgcccaggcgggccccggggacacaatgagggccattctcagagccaggcagagcgtgtggggctgtcctgtcagtcctatgtgcaacagctgggatattgtttagggagtgctggcatcaggctggggctctcctcctctggccctgccctttgggatgagcaagcccccaaaggccttcctgggttcctctggtgcacgtgccctggagttacccttctgaaggaggtagacttgtcctcctgtcctgggtgcctggggtgcaggggtgtgaattgggctatgtcaagatatgctgggcagtactgtgaggtgggggcagaggggagaaggtgtcccaggaggagccttcctggaggggatgatagtccagcatgttctgaagtgggagtagggtgcggcaggagtagggtaccagagaatgagtgagtcaggcagcagcctccactgcgccttggacacaggtggctgacagtgtccacctggactggctttgcaccccttctgaggtcacagttgtgtcccttgaaaacttgggcaggagcacctgactggcccagcttgggtcatgccctaggcccagcagtgcgggaggccaggaaagtaggcttggggaggctggcctctcctccagtttgaagcatggcaggggttccgggggaggctgctggggggcctgcgagcatgtccagagcaggaatgcttggggtggtgtgtactttgctcgtctgggcttatctggccgtggggaagctggttgtgcggatgacgttcactgagctgtgcacgcatcatccatggagtctgcggtgtgagtccttttgccgctccagggtcacagcctgcctccctgctccagccccctggctgaggcccttcctctgccccatgctcttctcagacaggaatcctgtggaatgtcatctctttggggaggccgtctctgaccctgtatgcaaaggccttctcccacattatttttggcaccccactttcttccccgtgaaagcaaattgtttggtgtctttctgtcccactacagtataggcccggttcagacagaggccttgtccactaggcctgcgctatctctgcggagcccagccaaagcaggggccaggcgaatcttttgttaaaagaacaatgcgcgctgggcacagtggctcacgcctgtaatcccagcactttgggagtccgaagctggaggatcacttgagcccaagagtttgagaccaccctgggcaacataaggagaacccatctctacacaaaattagctgggcgtggtggtgtatgcctgtagtcctagctacttgggaggctaaggtgggaggtggctgaggtgggaggatcacttgagcctgggaggttgttgcagtgagagccatgatcgcgctactgggcaatagagcagaacccagtctc

SEQ ID NO: 406 - DNA, 3862 bp, Homo sapiens
attcacacttgcaggcgtgcaggtcggtggtgttacacacattcacactgttgcaggcgtgcaggtccgtggtgttacacacatgctgttgcaggcgtgcaggtcggtggtgttacattcacactgttgcaggtgtgcaggttggtgttacacacattcacactgttgcaggcttgcaggtcggtggtgttacacacattcacacttgcaggcgtgcaggtcagtggtgttacacacattcatgctgttgcaggcatgcaggtcggtagtgttacacattcatgctgttgcaggcgtgcaggtcggtggtgttgcacattcatgctgttgcaggcatgcaggtcggtggtgttacattcacgctgttgcaggagtacaggtcagtggtgttacacacattcatgctgttgtgcagctatcacttccatctccagagcccttttcatcttaaaactgaagctctcccatcacacagtgacccttcatgtccctccccagtccctgaaaaacactgttcaggtttttcttcctggacctcattgtgtggagttcctcgtgtgagtgcagtcacacacgatttgtccttttttttttttcgtttgttgagacagagtctcattctgtcactcaagctggagtgcagtggcgtgatctcagctcactgcaacctccactcccaggttcaagtgattctcctgcctcagcctcccaagtagctgggattacaggcgcctgccaccacgcccagctaatttttgtgtttttattagagacagggtttcaccaagttggccagactggtctcaaactcctgacctcgtgatccacccgcctgggcctcccacagtgctgggatgacaggcgtgagctaccacacccggctgatttatccttttatttgggctcctttcactcagcgtctttaagcttcatacgcgaaagatgcttcagagattcctttttcaggctgaatatctgctgcgtggctaggccactttttgtttaatcctctctcctctggtggacaccaggactgtgctgttttggttgctgtaagcgcgggtgcacacgcctgcctgaggctgtgttttggccgttgtgagtgtgggtgcacacacctgcctgaggctctgctttgttgtgagtgcgggtgcacacacctgcctgaggctgtgttttgggtgttgtgagtgtgggtgcacacacctgcctgaggctgtgttttgggtgttgtgagtgtgggtgcacacacctgcctgaggctgtggcgcgatctcggctcactgcaacctccacctcccgggttcaagcgattctcctgcctcagcctcccgagtagctgggaccacacccaccaccacaccccgttatttttttgtatttttagtagagatggggttttgccatgttggccaggatggtctggaactgacctcaggtgatccacccactggcctcccaaagtgctgggattacaggtgtgagccactgtgcccggcctctttttactttgttaatggtgtattttgatagataacagattgtcattttcatgaagcacagctggtcagtttattgttgctcatgtatttggcctcatgttcgagtccctgtttttaatcatgagctggacacagccctctttagagcaactgtgaccacttgtggtgagaagtgcagcccacaccatccacgtgaggctcccatgcagacatttagaaggcgttttcactgcagctcagaaaatggccccaggcccccatgggcacccccatgtcaccagggcctctggttgctgccggtacacagggataggcagccaggcctcgaaggtgctgggcatgggtttgggtgtctgcgttgggtagagacccggagcgcccttgctgggcgtgccctaacatcccggtaccctgtgcccctctgtgggccaggacgcctggtgctgccagctgggcgtaagccctgaggagctgagggtggctgtgatttggaggatgagtaggagctcaccaggagggcgtggagccgaggcgtttaatatcatcaggagcaacactgggctcagaaggcaggcacacttgccgtccctccagagccatggctgacggccaggcctggtgggctctcgtgaggacagtgcctgtggttgtcagatgctgtcccttcgagtaagggatgagagccatcctgaagatgggtcagctctgtggtgaccacccgttgggagcagtgacattcaggtgcgttgcactggtggctgtgtggctgtgtggtacggccaccaggagccatgtgggcaaggacagctgtgggctgggcacagagctctctctgctgggagtcagtcggtgctggggcgaggggaggcagagctcacagagcccctctacagctcaccctgcagctcggccctggccagtaaacccaccatccccctttctgccgcaggaggcagtggagaaggtgacacagcacatccacggcctgtctgggaagaaggatgggctggtgcccatgttcatcaatacccacagtggcctcttcacccacctgggcgtattcacgctgggcgccagggccgacagctactatgagtacctgctgaagcagtggatccagggcgggaagcaggagacacagctgctggaagactacgtggaagccatcgagggtgtcagaacgcacctgctgcggcactccgagcccagtaagctcacctttgtgggggagcttgcccacggccgcttcagtgccaagatgggacgctggctctgggcgtctaccacggcctgcccgccagccacatggagctggcccaggagctcatggagacttgttaccagatgaaccggcagatggagacggggctgagtcccgagatcgtgcacttcaacctttacccccagccgggccgtcgggacgtggaggtcaagccagcagacaggcacaacctgctgcggccagagaccgtggagagcctgttctacctgtaccgcgtcacaggggaccgcaaataccaggactggggctgggagattctgcagagcttcagccgattcacacgggtcccctcgggtggctattcttccatcaacaatgtccaggatcctcagaagcccgagcctagggacaagatggagagcttcttcctgggggagacgctcaagtatctgttcttgctcttctccgatgacccaaacctgctcagcctggacgcctacgtgttcaacaccgaagcccaccctctgcctatctggacccctgcctagggtggatggctgctggtgtggggacttcgggtgggcagaggcaccttgctgggtctgtggcattttccaagggcccacgtagcaccggcaaccgccaagtggcccaggctctgaactggctctgggctcctcctcgtctctgctttaatcaggacaccgtgaggacaagtgaggccgtcagtcttggtgtgatgcggggtgggctgggccgctggagcctccgcctgcttcctccagaagacacgaatcatgactcacgattgctgaagcctgagcaggtctctgtgggccgaccagaggggggcttcgaggtggtccctggtactggggtgaccgagtggacagcccagggtgcagctctgcccgggctcgtgaagcctcaggtgtccccaatccaagggtctggaggggctgccgtgactccagaggcctgaggctccagggctggctctggtgtttacaagctggactcagggatcctcctggccgccccgcagggggcttggagggctggacggcaagtccgtctaactcacgggcccctccagtggaatgggtcttttcggtggagataaaagttgatttgctct

SEQ ID NO: 407 - DNA, 3612 bp, Homo sapiens
aggatgtgcttcaagttaagttgttactcaacggaaaacatattcaggatgctgcttgctatttgtgtgttttgttttgtttgagacgaggtgtcgctctgtcacccaggctggagtgcagtggcatgatctcagctccctgcaacctccgccttgcgggcttaagcaatcctcccacctcagcctcccagcactttgggaggctgaggtgggaggattgcctgagaacaggaattcaagacatgcttgggcaacatagcaagaccctgactccacaaaaaaaatttaaaaattagcctggcatggtagtgcacacctgtagtcgtagctactcagaggctgaggcaggaggaccgcttgagcccaggagtttgaggctgcagtgggccataatcatggcactgcactccagcctgggcaacagagtgagaccctgtctcagaaaaaaaaaaaatggggctgatatcggtaagaaacctgcctgtgatgtgcagagactgcctatggacacctgtgctgccatcatcagtgtgaggggaggaggatgggggaccagggaatggggaacaagacagacgttcttcttcctttgtgctcttgtgtttctcgagttttctgcccatgtgcacaaattgtcccctggattcgtctaacagttctccttggtgtccctgcaggatgaaattgagtttggctacatcgaggccccccataaaggcttccccgtggtgctggactctccccgagatggaaacctaaaggacttccctgtgaaggagctcctgggcccagattttggctacgtgacccgggagcccctctttgagtctgtcaccagccttgactcatttggaaacctggaggtcagtcccccagtgaccgtgaatggcaagacatacccgcttggccgcatcctcatcgggagcagctttcctctgtctggtggtcggaggatgaccaaggtggtgcgtgacttcctgaaggcccagcaggtgcaggcacccgtggagctctactcagactggctgactgtgggccacgtggatgagttcatgtcctttgtccccatccccggcacaaaggtaagctagcctcctgaggctggagtgaatggggtagcggcaaaccaatatattaccagcccctgccagcagagggcaagagctagaggaactcgacagcataaaggaaggaggaagtaggctgaagctggtttgcatgttgttgctgtggcaggtaaaattttaaccccataaatccaaaatgttagcattgcaacacataatcagcctaaaaattattaacgagagatttaaattcttttctcatactaaatcttcaaaatctggcaaagattttactcacatgacacacctaaattcagactagccacagctcaagtgttcagtagtcacataaggctagtggctattgtgttggcggtaatgctttagagagaaatagggtatgcacctgtggcactggaaagaggttctttcattttcttatgggtacgacttcataccctggaaattctctgcaaattgtgtggctgcttggcaacttggagatgtcctgtccaagtccacctttgactctgagccttgatctggtgacattgctgagatagaggaaaggtgagaaatattcctctgaagcagagaacaccctccccgtcagcctttgccactcggcatgggaggcctgaggcaatgagcaggcaaggcactgggtcctcagcgcagggcctccccgtgctccttgggtgccttcccactgctgactctgtccctctggactgtctcttgcagaaattcctgctactcatggccagcacctcggcctgctacaagctcttccgagagaagcagaaggacggccatggagaggccatcatgttcaaaggcttgggtgggatgagcagcaagcgaatcaccatcaacaagattctgtccaacgagagccttgtgcaggagaacctgtacttccagcgctgcctggactggaaccgtgacatcctcaagaaggagctgggactgacagagcaggacatcattgacctgcccgctctgttcaagatggacgaggaccaccgtgccagagccttcttcccaaacatggtgaacatgatcgtgctggacaaggacctgggcatccccaagccattcgggccacaggttgaggaggaatgctgcctggagatgcacgtgcgtggcctcctggagcccctgggcctcgaatgcaccttcatcgacgacatttctgcctaccacaaatttctgggggaagtccactgtggcaccaacgtccgcaggaagcccttcaccttcaagtggtggcacatggtgccctgacctgccaggggccctggtgtttgcctccttcgcttagttctccagaccctccctcacatgcccagagccttctgctgacatggactggacagccccgctgggagacctttgggacgtggggtggaatttggggtatctgtgccttgccctccctgagaggggcctcagtgtcctctgaagccatccccagtgagcctcgactctgtccctgctgaaaatagctgggccagtgtctctgtagccctgacataaggaacagaacacaacaaaacacagcaaaccatgtgcccaaactgctccccaaagaattttgagtctctaatctgacactgaatgaggggagaagggaaggagattctgggattgccagttcttccagcagccatgctctgaaaatcaaggtagaatccatggaaagggaccccaggaccccgggaccctagacgtatcttgaactgccatcgtcatttcaaatacatctccctcagggtttccaggtggccacccccaattattcattccttaccaacctctcaaatcctcttggctttctctctgcagtgtggacactgttggctagtcctccccactccctgagggtccagtaagttagcttagaaccttcctggaaacatttcatctgagcaggtttccccacgtgtgggatgctccttttgcctcatctgtctcagggatgcaggctcccccgcatgcatggggatttctccccagaccagcatacttgtgacctgagagttcaatgcgtaaagatgcccctggtcagccatatccatcttctcttgcctggtccttgattctctggccgctccctgaccttcctccttccactgccttgactttcttcctttttattcctggtgccatctgtccaggcagctagacaagaacttgttcaccagcagccggattcaggccttcccaggggcataataagtgaccagcccctcctctccggacatcagatccaacacataaggaccctggcctaccctccagcccaacagccagttctgggtcagctgccaacttaggggtggtttgattatcccattgaaattcaccagtgcctttgccaaagaccctctcatttggacatacccagattcattccctggctccaactgaaaagactcagtttcaatctttaaaagttcctttagggccagaagaataaatgaattataatcccattttgaagaaccgatttataaccaatgaaaaggttataatgtaattt

SEQ ID NO: 408 - DNA, 4600 bp, Homo sapiens
acctacgtgcggctggagaatggcgagccccgtggactccccatcatccaagacgtcatgctagccgaggcccagtggcggccagaggagtccgaggactatgaaaccactatcagcggcctgaccccggagaccacctactccgttactgttgctgcctataccaccaagggggatggtgcccgcagcaagcccaaaattgtcactacaacaggtgcagtgtttgccaagaacttccgggtggcggctgcaatgaagacgtctgtgctgctcagctgggaggttcccgactcctataagtcagctgtgccctttaagattctgtacaatgggcagagtgtggaggtggacgggcactcgatgcggaagctgatcgcagacctgcagcccaacacagagtactcgtttgtgctgatgaaccgtggcagcagcgcagggggcctgcagcacctggtgtccatccgcacagcccccgacctcctgcctcacaagccgctgcctgcctctgcctacatagaggacggccgcttcgatctctccatgccccatgtgcaagacccctcgcttgtcaggtggttctacattgttgtggtacccattgaccgtgtgggcgggagcatgctgacgccaaggtggagcacacccgaggaactggagctggacgagcttctagaagccatcgagcaaggcggagaggagcagcggcggcggcggcggcaggcagaacgtctgaagccatatgtggctgctcaactggatgtgctcccggagacttttaccttgggggacaagaagaactaccggggcttctacaaccggcctctgtctccggacttgagctaccagtgctttgtgcttgcctccttgaaggaacccatggaccagaagcgctatgcctccagcccctactcggatgagatcgtggtccaggtgacaccagcccagcagcaggaggagccggagatgctgtgggtgacgggtcccgtgctggcagtcatcctcatcatcctcattgtcatcgccatcctcttgttcaaaaggaaaaggacccactctccgtcctctaaggatgagcagtcgatcggactgaaggactccttgctggcccactcctctgaccctgtggagatgcggaggctcaactaccagaccccaggttccagtgtccccagttgcccgaatacctcaagtatgcgagaccacccacccatccccatcaccgacctggcggacaacatcgagcgcctcaaagccaacgatggcctcaagttctcccaggagtatgagtccatcgaccctggacagcagttcacgtgggagaattcaaacctggaggtgaacaagcccaagaaccgctatgcgaatgtcatcgcctacgaccactctcgagtcatccttacctctatcgatggcgtccccgggagtgactacatcaatgccaactacatcgatggctaccgcaagcagaatgcctacatcgccacgcagggccccctgcccgagaccatgggcgatttctggagaatggtgtgggaacagcgcacggccactgtggtcatgatgacacggctggaggagaagtcccgggtaaaatgtgatcagtactggccagcccgtggcaccgagacctgtggccttattcaggtgaccctgttggacacagtggagctggccacatacactgtgcgcaccttcgcactccacaagagtggctccagtgagaagcgtgagctgcgtcagtttcagttcatggcctggccagaccatggagttcctgagtacccaactcccatcctggccttcctacgacgggtcaaggcctgcaaccccctagacgcagggcccatggtggtgcactgcagcgcgggcgtgggccgcaccggctgcttcatcgtgattgatgccatgttggagcggatgaagcacgagaagacggtggacatctatggccacgtgacctgcatgcgatcacagaggaactacatggtgcagacggaggaccagtacgtgttcatccatgaggcgctgctggaggctgccacgtgcggccacacagaggtgcctgcccgcaacctgtatgcccacatccagaagctgggccaagtgcctccaggggagagtgtgaccgccatggagctcgagttcaagttgctggccagctccaaggcccacacgtcccgcttcatccgcgccaacctgccctgcaacaagttcaagaaccggctggtgaacatcatgccctacgaattgacccgtgtgtgtctgcagcccatccgtggtgtggagggctctgactacatcaatgccagcttcctggatggttatagacagcagaaggcctacatagctacacaggggcctctggcagagagcaccgaggacttctggcgcatgctatgggagcacaattccaccatcatcgtcatgctgaccaagcttcgggagatgggcagggagaaatgccaccagtactggccagcagagcgctctgctcgctaccagtactttgttgttgacccgatggctgagtacaacatgccccagtatatcctgcgtgagttcaaggtcacggatgcccgggatgggcagtcaaggacaatccggcagttccagttcacagactggccagagcagggcgtgcccaagacaggcgagggattcattgacttcatcgggcaggtgcataagaccaaggagcagtttggacaggatgggcctatcacggtgcactgcagtgctggcgtgggccgcaccggggtgttcatcactctgagcatcgtcctggagcgcatgcgctatgagggcgtggtcgacatgtttcagaccgtgaagaccctgcgtacacagcgtcctgccatggtgcagacagaggaccagtatcagctgtgctaccgtgcggccctggagtacctcggcagctttgaccactatgcaacgtaactaccgctcccctctcctccgccacccccgccgtggggctccggaggggacccagctcctctgagccataccgaccatcgtccagccctcctacgcagatgctgtcactggcagagcacagcccacggggatcacagcgtttcaggaacgttgccacaccaatcagagagcctagaacatccctgggcaagtggatggcccagcaggcaggcactgtggcccttctgtccaccagacccacctggagcccgcttcaagctctctgttgcgctcccgcatttctcatgcttcttctcatggggtggggttggggcaaagcctcctttttaatacattaagtggggtagactgagggattttagcctcttccctctgatttttcctttcgcgaatccgtatctgcagaatgggccactgtaggggttggggtttattttgttttgtttttttttttcttgagttcactttggatccttattttgtatgacttctgctgaaggacagaacattgccttcctcgtgcagagctggggctgccagcctgagcggaggctcggccgtgggccgggaggcagtgctgatccggctgctcctccagcccttcagacgagatcctgtttcagctaaatgcagggaaactcaatgtttttttaagttttgttttccctttaaagcctttctttaggccacattgacagtggtgggcggggagaagatagggaacactcatccctggtcgtctatcccagtgtgtgtttaacattcacagcccagaaccacagatgtgtctgggagagcctggcaaggcattcctcatcaccatcgtgtttgcaaaggttaaaacaaaaacaaaaaaccacaaaaataaaaaacaaaaaaaacaaaaaacccaagaaaaaaaaaaagagtcagcccttggcttctgcttcaaaccctcaagaggggaagcaactccgtgtgcctggggttcccgagggagctgctggctgacctgggcccacagagcctggctttggtccccagcattgcagtatggtgtggtgtttgtaggctgtggggtctggctgtgtggccaaggtgaatagcacaggttagggtgtgtgccacaccccatgcacctcagggccaagcgggggcgtggctggcctttcaggtccaggccagtgggcctggtagcacatgtctgtcctcagagcaggggccagatgattttcctccctggtttgcagctgttttcaaagcccccgataatcgctcttttccactccaagatgccctcataaaccaatgtggcaagactactggacttctatcaatggtactctaatcagtccttattatcccagcttgctgaggggcagggagagcgcctcttcctctgggcagcgctatctagataggtaagtgggggcggggaagggtgcatagctgttttagctgagggacgtggtgccgacgtccccaaacctagctaggctaagtcaagatcaacattccagggttggtaatgttggatgatgaaacattcatttttaccttgtggatgctagtgctgtagagttcactgttgtacacagtctgttttctatttgttaagaaaaactacagcatcattgcataattcttgatggtaataaatttgaataatcagatttcttac

SEQ ID NO: 409 - DNA, 3637 bp, Homo sapiens
tctttctttatttccttctcttttcaaggtggagtcttgctcttgtcacccaggctagagtgcagtggtgtgatcttggctcactgcaacctccacaccctagattcaagcgattctcctgcctcagcttcccgagtagctggggcgtgtgccaccgtgcccggctaattttttgtatttttagtagagatgggggtttcaccatgttgcccaggctggtcttgaactccatacctcaggtgacccacccaccttggcctcctgagtagctgggattacaggcatgagccaccgtgcccggcccaagccaagattcatgttggacctgaactcatgcagcaagcagtccctgagcacatattccgcaccagagttgatgttagctaacaggggcccatggaggaacaactcgggttttgtcctcagggaaatcccctgttggataggggaggcagatggaggcactgaaggtttccagctgtcgcctcaggaggaagtccagggcacccaagggcccagggaaggaggcagtcagcctaaatgaggccaggggcagtgtcaagcctagctttaaggctctgagttttggatggagccctgcgaggtggcaggggtcagagtggaggtgggcatcccaggagaagggcattttgccagcacagaaggggtggaacagcctgggtagttcagagaacaggagacagcttggttggaagctggctggctggtggtgagggtgtgggctggagggtgggcacgctgctgttaatgaggccacaggatctcatgggaaaggcaacaacaagcagtcacaggggctcggagctggagagtgacacactcagctttgccacatggtgctgatggacatcagacggagacttccagcaatctgttggttttgcaagtctgaagctccgggcagagctgagcctgctcctccagatggagcaggtgcgccggatccccgaggaatactctctggggcggatggcagaaggcctgagccaccacgaccccatcatgaaggtgctgtccattcgaggcctggtcatcctggcccgcaggtctgagaagaccgccaaggtgaaggccctcctgccctccatggtgaagggcctgaagaacatggatgggatgctggtggtggaagcggtccacaacctcaaggctgtcttcaaggggcgggaccagaagctgatggacagtgcggtctatgtggagatgctgcagatcctgctgccgcacttcagcgacgcacgagaggacgtgcgctcctcctgcatcaacctgtatgggaaggtggtccagaagcttcgggcaccacgcactcaggccatggaggagcagctggtcagcaccttggtgcccctactgctgaccatgcaggagggcaactccaaggtaagccagaagtgtgtgaagaccctgttacgctgttcttacttcatggcttgggagttgccaaaaagagcttatagccggaagccctgggacaaccaacagcagacagtggccaaaatttgcaagtgccttgtgaacacccaccgagacagcgccttcatattcctcagccagagcctggagtatgccaagaactcacgggcctccctccggaagtgctcagtcatgttcatagggtccctggtcccctgcatggagagcataatgacagaagatcgtctgaatgaagtgaaagctgcaactcctagagggcagagatttcatctgctctgcccaccgctatatagccagccactagaacaggccggaagcgcagaaagagctaagaatttgaaaaggtccccctatttatgacgagagcgccatcagaaattgatcccagggagaatcctgacttggcttgtctccagtcaattatttttgatgaggagcgttctccagaagaacaggccaagacctataaagatgagggcaatgattactttaaagaaaaagactacaagaaagctgtaatttcatacactgaaggcttaaagaagaaatgtgcagatcctgatttgaatgctgtcctttataccaaccgggcagcagcacagtactatctgggcaattttcgttctgctctcaatgatgtgacagctgccagaaagctaaaaccctgccacctcaaagcaataataagaggtgccttatgccatctggaactgaaacactttgccgaggccgtgaactggtgtgatgagggactgcaaatagatgccaaagagaagaagcttctggaaatgagggctaaagcagacaagctgaagcgaattgaacagagggatgtgaggaaagccaacttgaaagaaaagaaggagaggaatcagaatgaggctttactccaggccatcaaggctaggaatatcaggctctcagaagctgcctgtgaggatgaagattcagcctcagaaggtctaggtgagcttttcctggatggactcagcactgagaacccccatggagccaggctgagtctagatggccagggcaggctgagctggcctgtgctctttctgtacccagagtatgcccagtcggacttcatctctgcttttcatgaggactccaggtttattgatcatctaatggtgatgtttggtgaaacaccctcttgggacctagagcaaaaatattgccctgataatttggaggtctactttgaggatgaggacagggcagaactataccgggtgcctgccaagagcaccttgctacaggttctacagcaccagaggtactttgtaaaagccctgacaccagcatttttggtctgtgtaggatcctctcctttttgcaagaattttctccgggggagaaaggtgtaccagatacgatgactaagccagggcccctggatctcctcccttaccctcctctgctgggaacctagcacacctgaatcagctggacatactgctggagtccagtgctttctttccgtcaccctggggatagtccttcctggcatcgtggtgggggaggagcctctggcttccctaaactgcagcctctctggctggtcttcactttcctcagttgatataaaactctgggtcttggccatgatgtccttggactccatcgctaaagggaccatctgctgcagttaccacagcaactgacctgagcggcaccctggtctgtggagatggactcaggatccagtgacatgattctgaacttttgtggagtttgacaccttagagaagctacccctcaaactgcacatctacacacaaacaaacaatgcataggattccaaggctttaaagctgagagaccctggcctcaagttatttcatgcgcacagagggaagccatgtggggttgctgaagatgccttgaggtgaaatgggggcaggaaagccacatcttgctctgcatttataaagaccgtacaaactgagatccttggtacccctaaaaagattgccaattttcttcatctttgccatatggaggactgtgacagactttggacagtggcctcttgagttcctctgcagttttgacatttaggattttgtgtcttttaaactggaaaatcttctagcatgttgggttgttacagagtatatttttgtctgcagctgtttgttgccccattcctaagaggagtttatccatcctg

SEQ ID NO: 410 - DNA, 3387 bp, Homo sapiens
ttccaagcgaactggccaatgagatccccgtgtgagtagagctcggcgccccccgctccctctcactcccactcctccatccttcctggtggggagcagagtccggagcccccggggaactttccatcccttgtggcggaggatgggggtccggcgctatttggctgcaagaggccgtttcctgcctcagaagtgcagtcgcccctcccagggcacaggccgagggtcgccccacagccaacccccaccactgaggctgtacacacctgtgcgcatatgcatgcatgtctgtgtccgtgtgcacgtccgcgtgtgtgaacatgcagctgtgtctgtgcgtgtctatgtatatggagtggatgtgcaagtgtgtgtgaatatccagctgtgtgtgtgcatgggtccatgtatatgtgtgtgtgtatatgtgggggggacatgtagatatgcgtgtgtgactatgcggccgtgtgtgtgcatggctccatgtatgtgtgtgtatatgagggagacatgcaggtatgtgtccgtgtgtgtgtgtgtgtgcatatgggtccatgtatgtgtgtgtatatgagggagacacgcaggtgtgtgtctgagtgtgtgcgcacatgggtccatgtatgtgtgtgtataggtgagggagacatgcatgtgtgtgtccgtgtgtgtgcatgggtccatgtgtgtgtagtgtgtacacatgggtccatgtatgtgtgtgtatatgagggagacacgcaggtgtgtgtccgagtgtgtgtgcatgggtccatgtgtgtatagtgtgtgcacatgggtccatgtatgtgtgtgtatatgagggagacacgcaggtgtgtgtccgagtgtgtgtccatgggtccatgtatgtgtgtgtatatgtgggggagacaggtgtgtgtccgagtgtgtgcatgggtccgtgtatatgcgtgtatatatggggggatatgtagatgtgtgtgtgtatgaacaggtgtaagtggggagcactcaggtgtgtctgtgtgtgttcgtgtacacgtgtgtatatgtgtgaacatggaggggtgtgtgtgtccgtgtgtaggtttgcgtgcatgcacacatgcatgtgtgtactggggcatccaagcccctggtctccactccattccaccctacgcctacctccttgatctctgcgcccagccttggctgtgctcccctgctgtctgcacgtgggtgtctgcacgtgggtgtctgcatgtgggtgtctgtgccctcaagtgtctcgtgtctgcacgtgggtgtctgcaccctcacgtgtctcgtgtccgcacaagcatgtgtaggtgtccctgctgggctctttggtgggcggccagtgatcctcgaggtcacgcatgtcttctgtgggtgcctgctccttgcaccccacagtgttgagatgggtttgcattggccccgcctgtcccctgctcacccgcctccctctcttcctgcttctaagccccgaaactctggattccggggcccttcacaggtgagcacgtggcagcagtgcctgcagacccctggctggcccatctgtcctcccgcccctctctctgatctctctctgccaggctgcccctgtctccatccctcttctccctcccactgtcggtgtctgcccaccagccacccctgggtcccgtcacagcccttgtggcctccgcagctggggcccttgtcctcccgcctcccccaccctgtcctgttgccaccttcctagaggccctgacctgccctctgccctccagcgagaaggcactgcagagcaaccactttgaactgagcctgcgcactgaggccacgcaggggctggtgctctggagtggcaaggccacggagcgggcagactatgtggcactggccattgtggacgggcacctgcaactgagctacaacctgggctcccagcccgtggtgctgcgttccaccgtgcccgtcaacaccaaccgctggttgcgggtcgtggcacatagggagcagagggaaggttccctgcaggtgggcaatgaggcccctgtgaccggctcctccccgctgggcgccacgcagctggacactgatggagccctgtggcttgggggcctgccggagctgcccgtgggcccagcactgcccaaggcctacggcacaggctttgtgggctgcttgcgggatgtggtggtgggccggcacccgctgcacctgctggaggacgccgtcaccaagccagagctgcggccctgccccaccccatgagctggcaccagagccccgcgcccgctgtaattattttctatttttgtaaacttgttgctttttgatatgattttcttgcctgagtgttggccggagggactgctggcccggcctcccttccgtccaggcagccgtgctgcagacagacctagtgctgagggatggacaggcgaggtggcagcgtggagggctcggcgtggatggcagcctcaggacacacacccctgcctcaaggtgctgagcccccgccttgcactgcgcctgccccacggtgtccccgccgggaagcagccccggctcctgaatcaccctcgctccgtcaggcgggactcgtgtcccagagaggaaggggctgctgaggtctgatggggcccttcctccgggtgaccccacagggcctttccaagcccctatttgagctgctccttcctgtgtgtgctctggaccctgcctcggcctcctgcgccaatactgtgacttccaaacaatgttactgctgggcacagctctgcgttgctcccgtgctgcctgcgccagccccaggctgctgaggagcagaggccagaccagggccgatctgggtgtcctgaccctcagctggccctgcccagccaccctggacatgaccgtatccctctgccacaccccaggccctgcgaggggctatcgagaggagctcactgtgggatggggttgacctctgccgcctgcctgggtatctgggcctggccatggctgtgttcttcatgtgttgattttatttgacccctggagtggtgggtctcatctttcccatctcgcctgagagcggctgagggctgcctcactgcaaatcctccccacagcgtcagtgaaagtcgtccttgtctcagaatgaccaggggccagccagtgtctgaccaaggtcaaggggcaggtgcagaggtggcagggatggctccgaagccagaaatgccttaaactgcaacgtcccgtcccttccccacccccatcccatccccacccccagccccagcccagtcctcctaggagcaggacccgatgaagcgggcggcggtggggctgggtgccgtgttactaactctagtatgtttctgtgtcaatcgctgtgaaataaagtctgaaaacttt

SEQ ID NO: 411 - DNA, 3705 bp, Homo sapiens
atttccttaaatgccttaaagctagtagttgcaaacttgggatatgaacttgcttctgtctgtcttgaaagtctgttctcataaccattttaccatgttgtcttgttttcgagtagggcaaaatggttaaaggaaaagtagattaaaagaaaaggataaatatctttggagtcatcctacgcactggtattataaagatgaatgagacctgatccttattgtctagcaagagagacaaacacccagtttctaagcacaataatagagacaaggagaattcagagatgtcatgtgacttctgggtttctttttttttttcctgagacagagtctcgcactgtcactcaggctggagtgcagtggcgcggtctcagctcactgcagcctctgccaggttcaggctattcttctgccccagcctccctactagctgggattacgggtgcctgccaccacgtctggccgattttttgtatttttggtagagatggggtttcactgtgttggccaggctggtctcgaactcatgaccttgtgatccacctgcctcagtctcccagggtgctgggattacaggcgtgagccaccacgcccggccaaattctgggtttcttgaaaaataaacaatgttttcagggagaggagaaagtgtggataagccatggaaagggtctgatatttatttgaagtacattatcttgtgggcagaggtaggaaatgaaacaggttggggccagattaggccaaattaagaagaacctggattggtatgagaaaatttttttctgatatccagtattagttattgtaaatgcaataattaaaacctggctatggccgggcaccgtggctcacgcctgtaaaccaggcgctttgaaaggctgaggtgggaggattgcttgagcccaggagtttgagaccagccagggcaacaaggtgagatcctgtctctacaaaaaaaaaaagaattggctgggtgtggtggcttgcgcctgtagtcctagtacttgggaggctgaggtgagaagattctttgagcctaggagtttgaggctgcagtgagttgtgatcgtgccactgcattctagcctaggtgacagagaccctgtctcaaaaaaaaaaaaaaaacaaaaaaaaacttggctacaaccttagttaggctattttcatgttgcattttgggctttataagaataaagtgtccatcaggaaatttctgaagaagcatcatttattgtcataaacaggagccctaagcagtgtcagatgacagtacttaaggatggatagacaatagagagattgcagtaatttgttttaaggaacgcaaagatggtgttgtgttgagcagttttaaatgttctgggcattgttctcattttactgcttaaatgagcagtatttcaaatttgtatattaaaaagcagtattttaaatttgtgtatgcagcagttttttatagctatgtataagtgcctttaaactcaataacctttttttccccgtattcaatagtgaattgaatgcaggaattataaaaacagatcaaaactatgaaaagatgatgtttaaagaagctttgaaaacagggttttttgagtttcaggtaggctgttgattcttttggtagctataaaacatgtcaatgtgaacattatgtattttcccccttttttcttcctgctatagcacaattactcgcctaaagtgtagactgaaaatcctgccagaaaaattttaaattcttcaataaattgtgattttaagttattatctttggtattttttctattgtgtccatttaatttaataattctgctcctagttaagctatgagcattaatataaaggagattaaatctaaaattcagctatactttccaggaaaacatttcaaaattgataaaaacaaaggcaaaattgtaattaattgccattaatttgagagcaagcgttttctgaggttttccacaaggtgtcagtatttcctcaagtttggcatttaaagtgcttaaagtaaaaatgtagctttacgcaatgagctgtgtaaaatatcacattgagttttatataacttggttttcagagttgtggttaaataaggataaatggctgggcatagcaatgtgttgtatttatagtctttttttatatttaatatcctatatgctgctaagagcagtcacccttaatatacagttaaagttgttcaacttttatgtctcagttacaaactgtctgtaaaaaaattctttttttgagaattattagtataaaactgccatatactttggacaaagataaatacttgcagattcttaaagtaaaacctttacagtaatttgttatggatttttaaaagactagaaacttaaaaatgtgttaaaaccaagatactgcaatttttccctttatttttattttaaagaaggtgagggaaatggtaaataatttcaaattttataggccgcaaaagataagtaccgtgaattggctgtggaagggatgcacagagaacttgtgttccggtttattgaagttcagacacttctcctcgctccattctgtccacatttgtgtgagcacatctggacactcctgggaaagcctgactcaattatgaatgcttcatggcctgtggcaggtcctgttaatgaagttttaatacactcctcacagtatcttatggaagtaacacatgaccttagactacgactcaagaactatatgatgccagctaaagggaagaagactgacaaacaacccctgcagaagccctcacattgcaccatctatgtggcaaagaactatccaccttggcaacataccaccctgtctgttctacgtaaacactttgaggccaataacggaaaactgcctgacaacaaagtcattgctagtgaactaggcagtatgccagaactgaagaaatacatgaagaaagtcatgccatttgttgccatgattaaggaaaatctggagaagatggggcctcgtattctggatttgcaattagaatttgatgaaaaggctgtgcttatggagaatatagtctatctgactaattcgcttgagctagaacacatagaagtcaagtttgcctccgaagcagaagataaaatcagggaagactgctgtcctgggaaaccacttaatgtttttagaatagaacctggtgtgtccgtttctctggtgaatccccagccatccaatggccacttctcaaccaaaattgaaatcaggcaaggagataactgtgattccataatcaggcgtttaatgaaaatgaatcgaggaattaaagacctttccaaagtgaaactgatgagatttgatgatccactgttggggcctcgacgagttcctgtcctgggaaaggagtacaccgagaagacccccatttctgagcatgctgttttcaatgtggacctcatgagcaagaaaattcatctgactgagaatgggataagggtggatattggcgatacaataatctatctggttcattaaactcatgcacattggagatttatcctggtttcttaggaatactactactctgattgtgtctactgattggctatcagaaccttaggctggacctaaatagattgatttcatttctaaccatccaattctgcatgtattcataattctatcaagtcatctttgattcctggacctaataaattttttttccctttc

SEQ ID NO: 412 - DNA, 4211 bp, Homo sapiens
tactggtgcaaatcaaagcagaatggctgtgtccaaaaccgtgcttattccacctgaactgaaaactgtagaaaaaccaaatcccaatataaagacaacacaggtatttgacataaatggaactgatgttactccccgacctctttaccatccagatccacttactggtacagcaaaaccaagtaaactcttgacatcacaagaaggatcacttggatcagaatttatatcttcctatagcctttatcagaatacaataaatcctagtacgttagggcagtttacaaggtcagttttaggaagcagtacagtttctaagtcaagtgtatcagcaagtgaatcaatagcagaagacctggaagaaccatcctataaacgggaaagattgactagtttcacaggtaatgaaaatatacttgtttatttcagtaacagtccgttatttagtcaatatgcttattattggttggatacttgagataaaagaaatatggtaatgatttccaaatgctggcttgtgaagtcgcttcaagagaattaccaggggaatatctatttttttaagttccctgggtgactgttttgaatcatcagcctgaggaaccaatggcgctttgtgttagagctcagctgctgcttctgctgctgctgttgctgctgctgcttctgcttcttcttcttcttcttcttcttcctcttcctcttcttcttcctcttccttttcttcctcttcctcttttcctcttcttttcctcttcttcctcacttcttcttcctcctcttcctcttcttcctcttcctcctcctcctcttccttctccccctcttcctctccctcctcctcctccccctcctctccttcttcttcttcctcttcctcctcttcctcctctgcttccttctcctcttcctcttcttcttcttcctcttcttctttcttctttcctcttttttttattttgagacagagtcttgctctgtcacacaggctggcgtgcagtggcacaatctcagctcactgcaacctccgcctcctgggttcaagcaattctcctctctcagcctcccaagtagctgggattgcaggtgtccgccaccatgcctggctaatttttttgtatttttaatagagacggggtttcatcatgttggccaggctggtttcaaacttctgacctcaaatgacttgcctgcctcagcctcccaaagtgctgggattacaggcctgagccactgtgcctggcctcttctttcttcttcttctcaggatctcactctgtcacccagactggagtgcaatcttggctcactgcaacctctgcttcctgggctccagcgatcctcccacctcagcctctgaagtacctgggaatacagtcagagaaacaagaattatgaagtcctttgtagaaacagattaggcaatgacctatatgttgaaaggatgatgcagactttcaatggagcaccaaagaataaagatgttcaatgtgataaaatcataatggaagataaaggcataatgtccactgcctgggatttgtatgattcttacaatgctatggaacttgtatctttatcagtaaaacaatctgtggttgagtcaagcagtaaagcaaatgtacttcctaaagatcaggaccaaagattgccagggagcactacagaaaaaaatagtgaaactagttctctaatggacatagaaaatgtaattctggcaaaaatccatgaagatgaggaagaccactcagatgcaatattaaaatctgacaaatttcatcaggacttattttttatggaacgggttctgatggaaaatatatttcagcccaaacttgcagcttatcgtcagcttcctgttttaaaagaacctgaacctgaagagcctgaagatgttttagaaagtgcaaaacatgaagaggtagaggaagaatctaagaaggaggaggaagaagaaatacatgcagaagaatcaacaatacccgccaacttggaacgactttggtctttttcctgtgacttaaccaaaggcctcaatgtgagcagccttgcctggaataaaacaaatccagatcttctggctgttggctatgggcactttggatttaaagagcaaaaaagaggactggcttgctgctggtcaataaagaatcccatgtgaatcacctcaaaaacatttgggacctgtatggcaactacagtggatagaacaagatcgaggaacaacaggagatggcaaaagagaaatactagtttctatatcagcagatggaagaatctccaaatgggttatacgaaaaggactagactgttatgatttgatgcgattaaagagaactacagctgccagtaacaaaaaaggaggggaaaaggaaaagaaagatgaagctttgatatctcgacaggctcctggaatgtgttttgcttttcatcccaaggacacaaatatctatttggctggcactgaagaaggtcatattcacaaatgttcttgttcatataatgaacaatacttagatacctacagaggacataagggtccagtgtataaagtgacatggaatccattttgtcatgatgtatttttaagctgttctgcagattggggtgttattatatggcaacaggagaatgtcaagccatctttgagtttttatccagctacttctgttgtttacgacgttgcctggtctccaaaatcatcctatatacttgcagctgcaaatgagaacagggtggagatttgggaccttcatatcagcactttggaccctctgattgtgaatactgctaaccctggaatcaagttcacaaccattctctttgccaaacaaacagattgccttctggtaggagacagtgatggacaggtttctgtgtatgaactgagaaatatgcctactgttttggaaactggccggggagatataatggatactttgcttggatccaagtcaaaccaatcagcataattcatcattcctaatatttttcttgtagttgttttaaaaaaggaattaacatccagtattctgtattacatactgtacaccagattttgatttcagaaaacaatatttgatgtataacttccacttaatttaaatttaataaacttttatttcagagatatttgattagtttacaatctaagagttattcttaagagtttcagtggaattttcttaatttttctaaagatattcctactctcttgatcatattctaagtacatatgagtacatgtacattcttatacaatgtctaaatgggttagaaaattattatacctatagaagcgaaacttggaaattaatagaatcacttaaaccaaaatctttataagacacaattctattgattttaaagcttctgctttccaggctctgttttccagagtttataattacgtagtttttagtagatgaaaataatggattcttgtacctaacattttatcctcttagatctaagagccgaagctatagaactttgttagactatttggcaagcaaaatatatgacagtaaatatcagaactttatggtttgaccagcgcttatcacattcccaattcagtgagaaaaattcatctgggacacaacagggtactcttctctgtttgcccagaatcagctctggattttaagcccagacttcagtggacccagatagaaaatataaagtctctgatctataggccacatcaggatgttattttatgaagagttctagagcaaggttgcggaaatcggggtggagatggggagcagtgactcctccaaatattcattgctaacaggccattctatgcagtttgttttaacaaatcctgggttaaactgaggccacaggacatgatgggctgttctataaagcattctaagtggagaggagacgatagggcatatgaaattcactaaactctctggaaaaaaaatatgtatatattaaaaaccaagactggaatcagtgcaacagtgggaactaccttttacaagtatccattgcttcataaactccatttgtttggaccaatcccttaaacaaaagcaaggcaaattttacatggatttagagcctaggtcaggttattaggattataaattttccactggtatgtcattgtgattatctttgtttttgtctttctgaaagattggattttctataacaccttgtgtaagaaaataaaaaacttgatctaactg

SEQ ID NO: 413 - DNA, 3666 bp, Homo sapiens
atggacagcgacgacgtccgccaggcggcccggctgctgctgcccggcgtggactgcgagccgcgccagctcagggccgacgactgcttttgtgcatctcgaaagctggatgcggtggccatcgaagccaagtttaagcaggacctgggtttccggatgctgaactgtggacgaacagacctggtgaagcaggcagtgtctctgctggggcccgatgggatcaacaccatgagcgaacagggcatgactcccctgatgtatgcctgcgtccgtggggacgaggcgatggttcagatgctgctggatgccggagctgacctgaatgtggaggttgtcagtactcctcataaatatccatccgtccaccccgagacccgccattggacggctctgacttttgctgtgttgcatggacatattcctgtagttcagctcctcctggatgctggggccaaggtggaaggctcagtggagcatggcgaggagaactactcggaaacacccctccagctggcagctgctgtaggaaattttgagctggttagtttgctgttggagcgtggtgccgatcccctgataggaaccatgtacaggaatggaatttctacaaccccccagggtgatatgaactctttcagccaggctgcagcccacggacacaggaatgtgttccgcaaactgctcgcccagccagagaaggagaagagtgatatcctgtccctggaggagattctggccgaggggactgacctggcggagacagccccgccccccttgtgcgccagccgcaacagcaaggccaaactgagggccctgagggaggccatgtatcacagcgctgagcatggctacgtggatgtcacaattgatatcaggagcataggcgtcccgtggactctgcacacgtggctggagtctttgcggatcgccttccagcagcaccgcaggcctctcatccagtgcttgttaaaggagtttaagaccattcaggaggaggaatacacggaggagctcgttacccaaggcctgcccttgatgtttgagatcctgaaagcgagcaagaatgaagtgatcagccagcagctgtgcgtcatcttcacacactgctacgggccctaccccatccccaagctcacagaaatcaaacggaaacagacctcgcgcttggatcctcattttcttaacaataaagaaatgtctgatgttacatttctggtagaaggaagaccattttatgctcacaaagtgctgttatttacagcctctccaaggttcaaagcactcctctccagcaagccgacaaatgatggcacctgcatagagattggttatgtgaaatactccatctttcagctggttatgcagtatctctactatggtggcccagagtcactgctcattaaaaacaatgagatcatggagcttctgtctgctgctaagtttttccagctggaggctttgcagcggcactgtgagattatctgtgcgaaaagcatcaataccgacaactgtgtggatatttacaaccatgccaagtttcttggagtcacagagctctcagcatattgcgaaggctactttctcaaaaacatgatggtcctcattgaaaacgaagcattcaagcagctcctgtatgacaaaaatggtgaagggaccggccaggatgtgctccaggacttacagaggacgttggccatcagaattcagtccatccacttgtcgtcttccaaaggttccgtggtatgaaacgtctagtgcagggaatgcttcccgggaactttccagttctcctgccgcattggctttacacaaacacagacaaattccacctggcacctgtttttggctgggccaaggagctgcctctactgctcccacgtgttcctgttgaaaaacaaaggactttccactggtctgcagatcagatcagctgggtccagagtttaatgggcaactggacaaccaagttaaccccaattgaaagcacccctaggaccattgaacacccactgccggggaccactgtccagtgaatggattgaggccttttaaaggtcactcaggttccaggttgacagttggaggacctcaccgtaccaaccctgaagagattgtattacacattaaggaccttggtagctgtgcttcagcaaacgtcaaccatggtagcaaattggtgaggctgtgaccaataatgaggaaataatctggcaaatttttaggggtgggaacttttttaaatgttcatttaaaaaaaaacaaaaacagggcagtcttgtagtttaaaatatatttctaaaagcttaacagttcgttttcaactaaattgtgtttagggatctgtgtttgagatttttctttatttcttttttttttttaaatagtaagtcacaggtccacactgtgtaaacatgcatctgataagatactgctgatattctaaacaagttgaaataatcttgccttagtgatcatgattacacaaaagaggtgcactgccaataagtatctctaattcaatagttgaaagcaacctgcatgctaatcgtggtttcggggtgagaataaaacacccccacataacatgcatttgcatgggcccgaacctgtgaaatgttacgtttgtgcttcatttttgccaaggtaaaaatgttccatcatttctagctaaaactccatttggtgaaaccaacatatccatttcttttcctagttacggatgatttggggatgcttttgcagaaatgtgttcatagatgatgctgaatgggggaggggggcagcacgtcagagaatttactattaatcccagagttttctctgtattctcagaagatgttaatagtttgttactagccagagagtatgactatggtagattatttttaaagatgaaacatgtatgataggatggattctttctgtattctgagagtgtacagtacaggattattataatgaaagtttatatcaacagggtttcgttggctctgccatatattataagcaaaagagattggtaaagtgccacagtattccagataacttttcagttgcggcctttcttctcgttctttaatttgaaacctagatacatgcagtaaaaactaggagaatgacttttacccttggggacagccaagttttgttgataaacctatttcctagcatgccttcaggaagttgtgccagaccctagattgtgaaggacccactgttcttctgttgtacgagctccctgaaccattgttcagaggaccaatgtcacatcgcttcatgggcatggcccatggagcatctgggtgatatctgtctacagtattggctcttctgcgaggctgatacacaaggcctctcttccacatgatcatttgcaaacctcccccagcccctaccatccaatgtggaaggaaaacaagaactgcctgaagaagagtccaagctacagatacacagcgtgtgcattgcggctgtcaccttcctcctcccacttctgtatcctcagagatgctgcgtggatgtttccttaacctcagctgacttccctgtgaatgtctaatgctagttcagggcctccaggcattgatttgtacagtggtaactcccaatgaggcttctgttatcatttggtgtgctttctctgtcattaaaagaaatgattttccc

SEQ ID NO: 414 - DNA, 5259 bp, Homo sapiens
gtgacaaggatctcattttgcccaacggtggtactccagcaggtacttcaagtccagcttcttcatcttcccttctcaacagacttcagcttgatgatgatattgatggtgagactagagatctcttcgttatagtcgatgatcccaagaagcatgtgtgtacaatggagacttacatcacctataggatcaccaccaaaagtactcgggtggagtttgacctcccagaatattctgttcgtcgaagataccaggattttgactggttgaggagcaaactggaagaatcccagcccactcatctcattccccctcttcccgagaagtttgtggtaaaaggtgttgtggatcgtttttcagaagagtttgtggagaccagaagaaaagctttggataaatttctaaaaagaattacggaccatcctgtgctgtctttcaatgaacactttaatattttccttactgctaaggacctgaacgcctacaagaagcaagggatagcattgctgaccagaatgggcgagtcagtcaagcacgtcactggcggctacaagctgaggactcggccgcttgagtttgctgccataggtgactacttagatacatttgcactcaaactgggaaccattgatcgaatagcccagcggatcatcaaagaagaaatagagtaccttgtggagctgagagaatacgggcctgtgtactccacatggagcgccttggagggtgagctggccgaacccctggagggtgtgtcagcttgcattgggaactgctctacagccttagaagagctggcagatgacatgacagaagacttcctacctgtgctcagggaatatattttatactctgactccatgaagagtgtattgaagaagagggaccaagttcaagcagagtatgaagccaaactggaagctgtggctctgcggaaggaagaccgccccaaggtaccggcggacgtcgagaaatgtcaggatcggatggagtgtttcaatgctgacctgaaagctgacatggagaggtggcagaacaacaagaggcaggacttccggcagctactcatggggatggctgacaagaacatccagtattatgagaagtgcctcatggcgtgggagtcgattattccactactgcaggagaaacaagaggccaagtaaagttctttcttgggacggagactcttctacctacacagggcctggcaccctataccggaatgtccctgcagtgccagagacgcagtgctgggaaaacaaccacagaaacatctctcctttgtgtatttttccctcccccacctttcaccccacagtggttttcaattagtatttattccatggtggagtctgtgaggctagaatatctctcagcaagagcagcatacctccatgttatgaaggcatctgttcagtgaagcactacgaaaatttgaaaccaagggacaagacaacttgcagctgacgctctgacatttcatgacagtttcctctttagggacagctgagttgccagttgtgggagagaacccggggcctgcttttcaaggatgaggaggaggcaggaacagaaggcagctgctgctttctgtggaaacctggcccctctggaattggcctctgtgggcattgacttgtcttggcctaggaggcattggtgcctccctggcaagtccttaacgtacagtacctgtagctgtgagtgtggcctgctgcctgcttgtgatgagtgataccgtcttactgtttctgtttcacatagggacatttaaatcaatgtcaatgtgcgtccatgcttgagtgagcaagccagcgtccttgtcctcctgcaatgcctttgggaagctcaggggaatgctccccaagcttgtttctgacactagaatgcaacagattggaaactttttgtgtaaaatgaaaaaaacaaagtgctgttttttttttttttttctgtgaaggtcttcagtgttttgcttgttcactgtcatcagagcagggattagacctgttagggaatatctattgtcttgaagtcagagtagctccccattgttgagattagtgggcatataccaagctccacccccagtgtcagctttgtgcaatttgcctttacctcaccaaaaatacctactttaatatttcctcctgtgtcctctgaatgtctgggcgagcttttggtgagagggctggtatgtcatgttgttatgatacagtcgaaatttgtcaatgcagtgtgaatgttctacataaagtgctttaaccgttaacatttcctggtcaggaaggaaaatcagtacctggacgggcctcgaaaatgacaaatgcaacagcgagccctttgtgtccagctaagctaaagtctcctcagtgtgcagccagattcctggggactgctgagtgtggttacaggctgcatttcagacaatgaccaggtttacttttcatatcacaaagcaaacagtcaccaaggatctgtcttccaactcttttttttttctgctgaaatgaagctacatgtcatgtttgtgttctttcatctgtggctcatccctgtaaaactacgaatctgagcctcaaataagcagtagtttttttgttgtttatttttaatgaaacagctgtgttaaggcgctgcttcagatgcaagttcacctggaaatactggtcagcgggcagcacgtcaaggtcacttaagcccacttttaactgcaggtcatcctcgcatcagccaaggctgtggtgctgttgatgccgcagttggacagcataggacggcttggttctgtttcattgtgtttgacaatgttgcagtttaaatgataatgtttaaatcaattggtacttgcctgtagtgttaaaccctatttgtgccattctcaagtcctttgatgtgaattttcagtttggtacagttagaaatgactcattgatgcggacaggtaagaacaacccatgtacccccgagtgattgcatgctttattctacctctaagccatcgtgttggcgtgggtatggacgcctgggtctgacctgacactgtgctgggagaatcaggatgtgtgtctaatggcgagctgacagccctctgctgatatttggcagaaggcaccagaccagcccagcagcaaatgctcatctttgggaacataggaagctttaccttggggaaggtatgctttacaaatgtccagtgtaatgaatgtttggaaaaaactggagttacaggaaaatgaaatctgactatctgctagttgccaaaacccagaaacattcctgtgtaatggttagttgggaaagaaggcagcacttgaaaaaatttaccaggttcctcactgggagatgtgggaaggggcgtgggacgcacgcggtcactccctctcctagtgagaggcagatggctggctctgaagggaggcaggcaccgtgggatttgggcttgctctgcttggtccccatgtgatgccctgtgctgtaagatatcagaaagacctggaacaaggcaaactttatgtcttcctggcatgttattgataacagagccaggaagtccagtgtacattacagattttctgggagaaatagtccttccagagaaaggattccttcccagcctccaggctggtgtctcatgaggtgaggaggctggcccagaaggaaggggacgttaggtggtgaagcaggctcccctgggcctctgagggccagcagtcccaaccatttgcctcttcgttttgaccaagcacaaaagagatattccctagaagtgtcacacggaggcttctgtgccaaagactgccttgtagaggtctcatcacctcacacttcttgacttcacaaaattgtggccctgagatcagtactcctctcttaagtatttattattattattatttactttacctcaagcagacagacataggttttgaggcttgaatacatggcagtggaatacaaggccctccctagcagccgccccaggcctggaaagtgggagatttcattcgcccgggttaaaaatccagaggaagacagaagagaggagtcctaggaactgagcagattttagagacgcaaatgatgtttaagagagccttgtttcagatagaaattctctatgggttgaaatgccaaaaacagaaaacatgatgttgactcatgtaatttagtccattttagcagagcctttagtgttaacaccagtggcgaggagcattgcatattctctgtcagcagcagcactcccacaccaggtggttctgggctctctgtaggctggtcctagtaggtgacacccagcaacacccctgttggacaggattgattgttcgcagtcttagaccaacacttcagtcagaaatgttactgggaggaggaaaggaaaatcactttttttcctccatgtggaaatgaggagagaggaaagtggattgcaaaccaaaatgtgagtcagtgtgatgaagcagtggctctgtcatctcggcctttatccaataacaaaccagcatctcttaaaggcgcttttggcctagacacccctgaagtttggatgaagtctggtggattccctgtccgttgtatttctgtgtgcctgttcccttcattgctgtgagttgggagtgcattgagagatgatgtccatctgatatattcctgtgaaataaactgccagcaaactttctaacttgtattttaactgttaaagaagagattaaaaacttcggctttggacatgtccacattatggactgtcatcttatttttaaaagtcattctttacgtttaaaattttaaaataaaaaccttctgaggtattgatgtagtccaccgtgtaaatgttaccttctctccatgctgccattatgccaaaacaaaagctgtgataaaaaaagtgcttgagagagtgtgttgataagaaagtgatttatttacagatggaagtctttgtttcatgaagctaccaaactttaaaaagaatgtcacccttttttttgtttgttatggaaaccagagattgtaaaatggaaaaagaatcgttttttttgttgactttttgatgctggcacgaggtttttgtccacttttttcatatatctgtgtataaaaaaattgttgtttactatggaattagtattacattttgaggtaaacaaaagaatttgtattgcttgataaatattagcttgtaaatttaaagtttctttacttcaattaacttaaaggaccaataaacccataaaagatgctttcttt

SEQ ID NO: 415 - DNA, 3761 bp, Homo sapiens
ggcgcgcccgcccatcccccgctgccctttttctcctggccgggtgcgagggagcatgcccgcgcctggcctcggccagcgaagagttaacctgaggggcgagccgctgcccccacctcgggggcgtgcccccctcccccgctaggcggcccgccccccgcgccagggtatggcccctggccccggcccgggacccgaggtcccgcgcccgggtcagtgaaaggcgtcttcccgttcccgccctccgcctcctctcgccggccagcaacatgggatgtaatatgtgcgtggtccagaaaccggaggagcagtacaaagtgatgctgcaggtgaacgggaaggagctctccaagctgtctcaggagcaaactctgcaggccctgcgctcctccaaggagcccctggtgatccaggtgctgagacgcagcccccgcctccggggggacagctcctgtcacgacctgcagctggtggacagtggcactcagaccgacatcaccttcgagcatatcatggcgctgggcaagctgcgtccgcccaccccgcccatggtcatcctggagccccccccaatcagccatgagtattatgacccggcggagtttatggagggcggcccgcaggaggcagaccgcttggatgagctggagtatgaggaggtggagctgtataaaagcagccaccgggacaagctgggcctgatggtttgctaccgcacggacgacgaggaggacctgggcatttatgtcggagaggtaaatcccaacagcattgcagccaaagacggccggatccgtgagggagaccgcatcatccagattaacggtgtagacgtccagaaccgggaagaggcggtggccatcctgagccaggaagagaacaccaacatctccctgctggtggcccgacctgagagtcagctggcgaaaaggtggaaggacagcgaccgggatgacttcctggatgactttggctctgagaatgagggggagctgcgtgctcgtaaactgaaatcaccccctgcccagcagcccggaaacgaagaggagaagggggctcccgatgccggcccaggcctgagcaacagccaggagctggacagcggggtgggccggactgacgagagcacccggaacgaagagagctctgagcacgacctgctgggggacgaacccccgagctccaccaacaccccgggaagcctgcgcaagtttggcctgcaaggggacgccctgcagagccgggacttccatttcagcatggactctctgctggccgagggggcggggctgggagggggcgacgtcccgggcctcacggatgaggagtatgagcgctaccgtgagctcctggagatcaagtgccacctggagaacggcaaccagctgggcctcctctttccccgggcctccggaggcaacagcgccctggacgtcaaccgcaacgagagcctgggccacgagatggccatgctggaggaggagctaaggcacctggaattcaagtgccgcaacatactgcgggcgcagaagatgcagcagctgcgtgagcgctgcatgaaggcctggctgctggaggaggagagcctctacgacctggcggccagcgagcccaagaagcacgagctgtccgacatctccgagctgcccgagaagtcggacaaggacagcaccagcgcctacaacactggggagagctgccgcagcaccccgctgcttgtggagcccctgcccgagagccccctgcggcgggccatggccggcaactccaacttgaaccggacccctcccggccccgctgttgccacccccgccaaggcagctcctccaccggggagccccgccaagttccggtccctctcccgggatcctgaggccggccggaggcagcacgcggaggagcgcggccgccgcaaccccaagacggggttgaccctggagcgtgtgggccctgaaagcagcccttacctctcgcggcgccaccgcggccagggccaggagggcgagcactaccacagctgcgtgcagctggccccgacgcgaggcctggaggagctgggccacggccccctgagcttggccggtggccctcgggtgggcggggtggcggccgcggccactgaagcaccgcgcatggagtggaaagtgaaggtgcgcagcgacggaacccgctacgtggccaagcggcccgtgcgagatcggctgctgaaagcccgtgccctgaagatccgggaggagcgcagcggtatgacgaccgacgacgacgcggtgagcgagatgaagatgggccgctactggagcaaggaggagcggaagcagcacctgatccgggcccgtgagcagcggaagcggcgcgagttcatgatgcagagccggctggagtgcctgcgggagcagcagaatggcgacagcaagcccgagctcaacatcattgccctgagccaccgcaaaaccatgaagaagcggaacaagaagatcctggacaactggatcaccatccaggagatgctggcccacggcgcgcgctccgccgatggcaagcgggtctacaaccctcttctctcagtcaccaccgtgtgagctgcccgggcgggtacacggcccaggcccagggaaccccctggggccccggccctcactctcctatagagattgtgtgtgtgtgtgtgtgcgcgcgcgcgtgctcgctgtgcgcacgcacacatctcgtctgggtgtgcgcacagggctttgttagcagagagaagcccctgaggagaagggacgcttttcttccttctgcccaagtaaagtgaccatgccagtggccagcactgggggcacacctgtgatgggcaccccttcagctgtgcgtgtgcattccccatcccccatgctcttgcgtgtgcttgcacgtgcacgcacacacacacccagtgctctctccacccgacccgtgtacttgcagacagggaagctgagctgaaaggagcacaagagagtgtccggcttcgctgctgagcgcggcctctccccgccgctgcgcactgcagttatttgtagacaaaggcacccctgatttttgtggtttttctccctttctgtgcttgccaatagttgttttgttttgtggacctgccctgggggctggcagctccttcaggcagcctggcagaagtggaactcccctctccactgatggctgggaagggagttggggaggaagagtgggagggagggctggggatggatgggagggaaggggagggaaaggtgggaggaatgggaagcagctgttctggtggcttccactctgaggtgtgggaacggggagcctctggggggcacctgtttccccagtgactcagagagagcaagactgcaggaacggaggggtcctgcagggtgtccaccaagaagtcacagagcccgttctgcgccccacaccatctggagcaggggcttctcttctgagtgaactgaggaaggtgcttagatggtgagggctctagaaaccaagccccatgagcagcagtggaagacctcgggccatgcggcctggggaggacttggtggcgatccgcaacctggaccccagtgagaggcggtgggctgactgggaaggagaggcccccaacctcctcaggatttgcacgtgtgaactaggctgcctgtggggtgccccttaggcttggagagccccagattggaggcagacagactgcaccaccccttccccccctgcatctcaagaataaagcaagctgcctttgtacttggttg

SEQ ID NO: 416 - DNA, 5394 bp, Homo sapiens
agttggaatgcattttaagaatttcaaggctgtttttgagctttgttatttttaacacattaccatatggttgtgataattcaactttttattttaaaatctggcaagagacatcatcttttaaaaaataatggcctttgctgtttctgccagcttaatcttccagatgagttttcattatcgatattttcaagctatatcaggcacctaagtggtcatatacatgttgttttgttttgttttgttttgagacagggtctccctctgttgcccaggctggagtgcagtggcatgatcataggtcactgcagccttgaactcctgggctcaagtgattctcctgccttagcctcccaagtagctaggagtacaggtacacacccccacatctggctaatttttttattttttgtagagatgggcctttgccgtgttgcccaggctggtctcaaactcctggcctcatgcaatcctccaatataagttaaaaatagaaacatagtttatggctttactttatcatatcagcctttttggtttttagaatttctgatttaggggagaaactcatatcctaagttaaattaataccaatggatttaatgaattttaatgctgttcaatatgtagtctttttttttttaatcattgaggaatgtgattgattcttggtagatttatcttatatctacaacttgaattcactgccttctagtaatttttgggttactatttttacagtcactattatatttttttcctttccatatatttatataccatttttcttcttgaaaaactactctggcaaattagaatgatgaaaatggtcatctttgattttttttttcctatgttatttaagggagtgactatattatagactggcttttgatatataatatatgcttaaaacccaggggtcagtttcaatacatatattcctttcattagccatttttttcctccattcactctatgtatgtgagtgggatgggggcattattttattatttgaggttaagagcagaggtttaataggcaaaagaaacagaaaggagaatagctctctctcctgtgagggagaggggtgcctgagtgggacttcccacttttacttttaaaatctcttttgatgcaacttactcatggtatctgtacagtaagtgtttatgttttcacatatttgaaaatctgtgagatttcccaagattggcaagcacaatgtagtatgttcttcagcctcattcagcaaaataggagtcttcaaaagacagtcctggccgagtgtggtggctcacgcctgtagtcccagcactttgggaggccgaggtggttggatcgcctgagttcaggagttcgagaccggcttgaccaacacagtgaaaccctgtctctactaaaaatacaaaaaattagccaggcatggtggtgggcgcctgtagtcccagctactcgggaggctgaggcaggagaatggcgtgaactcaggaggcgaagcttgcagtgagtcgagatagtgccactgcactccagcctgggtgacagagtgagactccatctcaaaaaaaaaaaaaaaaaaaagattgcttctggtgacggaaaaatgaatattgtgtgttttctgctctcaaataaatcatagtattcagactgtcatttgatgtctttatcaatgttatcagaggaaaggggaaactttgaggggaagtgttttggggaaactattggagttacttttcagatgattctggatctttcttaattttatggactattggaattccagaattaaaagctaccttgggatgatccagtataaccttgcacctgatagtagtgttttcttataccatttctgccacgtggttacccagtagctacttgtacatgcttagtaatatgccagccatttccattacaggtttagtaccccttatccgaaatgcttgggaccagaagtattttaaattttggatttgtaaagattctggaatatttgcatagacataatgagatatctcagggatgggacccaggtctaaatataaaatttatttatgttcttccttgttggtatagtggttagttttttttttttaaggtattttatttatgtcccatatacacctatagcctgaaggtaactttataaaatattttaaataattttgtgcatgaaacaaagtttaccttaagtgcttatgtgtggaattttccacttgtgtcataatgtgggctctcaaaaagtttcagattttggagcattttggatttcaaattttcagatcagaaatgctcaacctgtattagacactggaagccttagaaaattctccttactgtaagccccagtttactacctaataactaccacctagttatatcttctgtgcaacaaatatggtcactgcacatgggtgcccacctgaggagggcaggggctgaaacccagcttcattctgcatgtcaaaccatgcacctgcaggactgtagaaacggctggtgccgttttctaattggcacagagctgctgtatggactagctggaggtctaacagcaaaggaagtattgatatattcccttccaaatcacaggctttacacaatacaactaggagaagaaagccaaactaaaattcaaatgtactaaatttttttcctatctctgggtgactttgggcaaatcattgaatctttcaacctcagatttattataagtaaaataaagtaacacctctcttaacctaccttaatgggtccaaaagctcatgttgacaaaacggttctctgactcactgtagggtcagaattactggctgtgactgcacataggagaatcatttctaatttttataacattttgcttcacagggaggctgagaagacaaaactccttatagctgcacagaaacaaaaggttgtggaaaaagaagctgagacagagaggaaaaaggcagttatagaagcagagaagattgcacaagtggcaaaaattcggtttcagcagaaagtgatggaaaaagaaactgaaaagcgcatttctgaaatcgaagatgctgcattcctggcccgagagaaagcgaaagcagatgctgaatattatgctgcacacaaatatgccacctcaaacaagcacaagttgaccccggaatatctggagctcaaaaagtaccaggccattgcttctaacagtaagatctattttggcagcaacatccctaacatgttcgtggactcctcatgtgctttgaaatattcagatattaggactggaagagaaagctcactcccctctaaggaggctcttgaaccctctggagagaacgtcatccaaaacaaagagagcacaggttgatgcaagaggtggaaatgttctccatatcaagatgtggcccaaggggttaagtgggaacaatcattatacggactcttcagatttacagagaacttacacttcatctgttccacctctcctgcgatagtcctgggtgctccactgattggaggatagagccagctgtctgacacacaaatggtcttttcagccacagtcttatcaagtatcctatatgtattcctttctaaactgctactcatgaatgaggaaagtctgatgctaagatactgcctgcactggaatgttaaacactaaatatataacaagctgtgttttcctaagctgagatctgttgaataatgtttacattcgtcccccggggaaatgtatgctcagccaccattcaagagatgactgagaaggagatggtaagttcaagaagactgattgcacctgggacccaggccctttctttgggatccagtcccagccttcatccatgtgattaagatccaggccgctgaagttccccaggaaatgatcttccacttgagcaaccttttacttgatacgatttgcacctttctgttttcctgcagtcagggtggtggcctgcagggacctgagctttgctccccaaccagattcctcatagagattcctaatcactagtttcttgtattcataaactcagagatacagagggcttggtttgaagttggggtgagatgaaacctttgctctgagccaaagctctggggccttgcattccctgcattgggttgatgactgtcagcatcactgccgcaggccatgcttgactaaggtacctggttttagccacagccacctccttgtatgttacctttcagctctggccaagagtgggacagggttttaaccacaaataggagcagcatgcaattcctagtgacttgctgcacagtattgtatcataattacaggaagtttttatttttaaaactggatctggggtatattcatttgccccatcacctctgtctaaaggcccaagtcctagggctgccatggtcacaagcacactgatgctccttaagattgtttatctggagcccacatagtgtggaacaaaaagtcacctagaaagcatccttggtcatcattgtctccttcccacctggcccagagatgcttaaatccaagttgtttctccagctgtcacctcccccaggagatcaggattccactgacgtcctgggcagccagtgaatttaattttccatgagaaacaacagagttaacctgtggcattaggagacctacttcatgtggaccctttttttccttcagtttaacttttctggagcagtgtgctgcgtagttcggcctgagtttgtgcagcttgttaaggcaactcttgtgtacgctatgttgaagctcaacaaaaaagtcatgggaccacttctagaaatctttcagctgtcaggcctgtcagtctcatgacagtttgttggttgtgccaaacactttatttgggaaaggaaagcccagatttgaatgggtctttcccctgggccttatcctatagaggcatttgtaatatggagaaaataatttttcatttttgctcatttaattctataaattctctttataaatgaattttgtgttctttagttctccttaaaagaacttttgaattataaaaataaaatctttacctgtcgaattgttgctgcagatgattgttgtggaaaatctggatcattgacctctgtgctttcattcctagagatgttttatagttacatgagcaaaagctgttgccccaaagtgatggccctggaggcggggctgaggaacagggaaatgccgctgtgaagtcttaaagcacttctgcttaaactcccatgtgtgaggagtgtgcctccctgtgccctctcagctctgaggctggccgtctttcggggtgttccttttggcaaatatacactgtaatcttgagtctaaatttatatgttgaaatgctaccttttttaaaataagaaactaaataaaattattttactatc

SEQ ID NO: 417 - DNA, 3604 bp, Homo sapiens
agtgtgggcaccagtgtggcccagcctcccactccaaggctccagcctgcctctatcccagacttccaggcccatgagctggctctgccaccatcatcctgcctcccgccagctcccgctccttaggtccacactcactggtaataatgctcaaaagtggtggccatctccaagccggagaaaatcaggacagcttgcaggcattgctgcagctgtgccagcctctccatttcctgggctccaccgatccggctgccctggatctgctggtcaatgtgccgggcgaactgctcactcacctgagcaatggcagagcacaggaaagccatgaatgagcgagcagagcaggcctgctcctgcccacctgcttctccaccacggcccgccaacagcgcgtcaggtttctcatgatgctgcttggaaggccccgggtagccaaggagctccagtcgtggcttctgtttctgccttctgtagagaccaagaaagtggcagaggcaaggagggtgcagcccctccactcccaagtccccatccaagggggttccctgaggcctttcctgacatgctgccacccaaaatgatgttcatggatggaggtgacacaaacctggaagatgaacaggctgagcccatagggaggggaaggatggggatggacagaagcctgtggtgtacacatggggcccaggaaaacgctcctgactagagctccccacctgaatctccactactcactgggccgaggagtggccaccacaggagggggtgcctcacggggctcgacatgcaccagcaggcactcgaaacgttattactgaaacctgcacaaccggtgatctgcaaagcactttcaccttaagtatctcgtctgaagaatttcgccctatgagaaagcaacacttgtagaggaaaaagctgaggctaagtgtgccttatccaaggtcacggacctgcatgactcctgaccagactcgcaactcccgcctcgcatgcccgcagaccccatctccggcagcccgaatggaagcagccttcttcccggccaagctgctcggtgctcctagatgacgttgactgtccggcgccgtcgctctgcaataacgtaaaaggaggcgggcagaaaactggagcccaagctggatacacacctcctttcctacctgaacgccgtgagagccaatccgcgggcagctctaatgtcgcgtgactaggaaacaggccccgcccccccagacccgtcaaaacaattgcctcgagcggcagccatcatggatttaaaggggtagtaccggcaagagcggcagccacaccggcagattgcagaccgggcaaggtcccccaggccaggatgtcaggcctggtgttggggcagcgggatgagcctgcaggccaccggctcagccaagaggagatcctggggagcacacggctggtcagccaagggctagaggccctacgcagtgaacaccaggccgtgctgcaaagcctgtcccagaccattgagtgtctgcagcagggaggccatgaggaagggctggtgcatgagaaggcccggcagcttcgccgttctatggaaaacattgagctcgggctgagtgaggcccagaatctggagctcaggggatgtgcccacctaggtgatgctggctctagccagccacctgagcacagtggagtcggagaaacagaagctgcgggctcaggtgcggcggctatgccaggagaaccagtggctgcgggatgagctggctggcacccagcagcggctacagcgcagtgaacaggctgtggctcagctggaggaggaaaagaagcacctggagttcctggggcagctgcggcagtatgatgaggatggacatacctcggaggagaaagaaggcgatgccaccaaggattccctggatgacctctttcctaatgaggaggaagaggaccccagcaatggcttgtcccgtggtcaaggtgctacagcagctcagcagggtggatatgagatcccagcaaggttgcggacgttgcacaacctggtgatccagtacgcagcccaaggtcgctatgaggtggccgtgccactctgtaagcaggcactagaggacctggagcgcacatcaggccgtggccaccctgatgtcgccaccatgctcaacatccttgctttggtgtatcgtgaccagaataagtataaggaagctgcccacctgctgaatgatgcccttagcatccgggagagcaccttgggacctgaccatcctgctgtggctgccacactcaacaatttggctgtgctctatggcaaaaggggcaagtacaaggaggcagagcctctgtgccagcgggcactggagattcgagaaaaggtcctgggcacgaatcatccagatgtggcaaaacagctgaacaacctggccctcttgtgccaaaaccagggcaagtatgaggccgtggaacgctactaccagcgagcactggccatctacgaggggcagctggggccggacaaccctaatgtagcccggaccaagaacaacctggcttcctgttacctgaaacagggcaaatatgctgaggctgagacactatacaaagagatcctgacccgtgcccatgtacaggagtttgggtctgtggatgagccggcaccatgagggtgggacaccctatgctgagtatggaggctggtacaaggcctgcaaagtgagcagccccacagtgaacactactctgagaaacctgggagctctgtataggcgccagggaaagctggaggctgctgagaccctagaggaatgtgccctgcggtcccggagacagggcactgaccctatcagccagacgaaggtggcagagctgcttggggagagtgatggtagaaggacctcccaggagggccctggagacagtgtgaaattcgagggaggtgaagatgcttctgtggctgtggagtggtccggggatggcagtgggaccctgcagaggagtggctctcttggcaagatccgggatgtgctccgcagaagcagtgaactcttggtgaggaagctccaggggactgagcctcggccctccagcagcaacatgaagcgagcagcctccttgaactatctgaaccaacctagtgcagcacccctccaggtctcccggggcctcagtgccagcaccatggacctctcttcaagcagctgacattcaacccggcccccaggtctgctgggtccccccacccccacagccctcacagcattccccattgctcctggctcttccccacccctaggtgggacagtgaaggggagcagtttaaccagaagattgctgctgcccttagggtctcagctccctcctcaggaatccctcttaggaaggaccctcaggacaccctctctgcaccctgtgatcctctagagtagctagctctgaggccccaaggtgggtacaaagcaggtatggccctcagagatgcagcctgctgctggcttttcagtcagagggttgggggctggccagccaagctgccttgccctggccgctcttactccctccctctgctgtctcacttcaggtccatgtatttcacttttcttaaataaaagaatcaggt

SEQ ID NO: 418 - DNA, 4514 bp, Homo sapiens
atgggtaaggcgagcgggccgaaaccgaacgctcggccctcagtcccgggctgagggccgcggccaggcggggtggactgggagctgggggagacgccgaggccgccagtcggaactggggcccgaacccaggatgggcggggactgcctgggactcgggggctcccggggtcgtcatggcaacgcgccccctcccttgttccggcccgttcccgcccgggttctgaggcatagtggccgagggctcgaggtgccacggcgtccaggagcgaggacagggccaggcagggtgtcactcccgggtcggggagcaggcggggaggggcgatgacttttcaggtttgggggtggcggagggaagacgcatctcaggttttggcctgggtgcctgacgccgagggcgggagacggggaatgctgacgcgcaggagcctggctacaaaagaccccacagctgtagagagagcaaacttgttaaacatggctaaactgagtatcaaaggactcattgaatctgctctgagctttggccgcactttggattctgactatccccccttgcagcaattctttgttgttatggaacattgcctgaaacacggtcttaaagtaagaaaatcatttttgagttacaacaaaaccatctggggccctttggaactggtggagaagctgtaccccgaagcagaggaaataggagctagtgtccgggatctacctggtctgaagacccctctgggtcgagcaagagcgtggcttcgattagccctcatgcaaaaaaaaatggccgattacttacgttgcttaattattcagagggatctcttgagtgagttttatgagtatcacgcactaatgatggaagaagaaggagcagtaattgttgggctgctggttggcctgaatgtgatcgatgctaatctgtgtgtgaagggagaggatttagactcacaagttggagtgattgatttttctatgtatttaaagaatgaagaagatattggaaataaagaaaggaatgttcaaattgctgccatattagaccaaaagaattatgttgaagaattaaatagacaactgaacagcacagtcagcagcctccattcaagagttgattcattagaaaagtcaaatactaagctgattgaagagttagcaatagcaaagaataacatcattaaactccaggaagaaaatcatcaattacgaagtgaaaataaattgattttaatgaaaacacagcagcacctagaggttaccaaagtagatgtggaaactgagcttcaaacatataagcattctcgtcaggggctagatgaaatgtacaatgaagccagaaggcagcttcgagatgaatctcagttacgacaggatgtagagaatgagctagcagtacaagttagtatgaagcatgagattgaacttgccatgaagttgctggagaaagatatccatgagaaacaagatactctgataggccttcgacaacaactagaggaagttaaagcaattaacatagagatgtatcaaaagttgcagggttctgaagatggcttgaaagaaaaaaatgaaataattgcccgactagaagaaaaaaccaataaaattactgcagccatgaggcagctggaacaaagattgcagcaagcagagaaggcgcaaatggaagctgaagatgaggatgagaaatatctacaagaatgtctcagtaaatctgatagtctgcagaaacaaatctcccaaaaggagaaacagctggtgcaactggaaactgacttgaagattgagaaggaatggaggcagactttgcaggaagatcttcaaaaggagaaagatgccttatctcatcttagaaatgagactcaacaaatcattagtcttaaaaaagagttccttaacctccaggatgaaaatcagcagttgaaaaaaatatatcatgaacaagagcaagctcttcaagaactcggcaacaagcttagcgaatcaaaacttaaaattgaagacataaaagaagccaacaaagcattgcagggactggtttggctgaaagacaaagaagcaacacattgtaaactttgtgaaaaggaattctcactctctaagagaaagcaccactgtagaaattgtggggaaattttctgtaatgcctgctctgacaacgaactacctttgccttcttcaccaaaaccagtacgggtttgtgattcctgtcatgcattgctcattcagagatgctcatctaacttgccctgagactccagaactaaatccttatgtatgaaattacctacaatgaatgttatgatgttgtatacaaaggtaaccagacagctctccttaagcggctttcggtcagtatttggtaccagtttatcttctacatattcagctcatggaaattacaagttatatatttccttccccattgtttttcaaaatgtattttcaacagagcatgcttaaaaatcatgtaactcattaaaaggccagagagcagagctaacacaacttgccttatcttgtaaaggccttaaaaataaggcttcagattgtttttttcttctgaattctgtcaatttggtatttgatggtgcctgcagttctcttaatgcactttaaagcttcacagttctgaaactggaaacgcataaaacttttaaaattattaatattctaattcaacagattttcattatctttgtaagatttcaactatatttatttgccctttcttctccccctctccctttgcctcttgcattagacagggccaatattttgtcctacaaaatttcctcttggtctctttaaaaatcagttattgtcgtgcttgctgaagattttcagctacagtggattaaattaaagggggcattatttggcctcggcctctacttttttccttttaatcttgaaaggaagttacatataaccatctttcttttcctgatttataaatcttcccatatgctgtttcactaaattgctgtttttttaaggggtgactcagaccccaattcaaagatgaaaacacaaatccttccccagaaaaaaaagtatgtaatagtaggggatgttacaggctccttataaaggtcctctcctctaagcattaaaagtgagaaaaaaatcaggactttgctttggtaatgtattagagttcagttcaaaaaattttgtattaacattttcattggagtaaattttaggaagtatcacattgtagtggcctacctgtatacatccacagtaaaatttcaccatgtccattgagcacctctatgccaagggtgttgagatgatgaaatatacacttgacctatttcttttttttttcgagatggagtttcactcttgttgcctaggctggagtgcaatggcacgatctccacctcctgggttcaagcaattctcctgcctcagcctcccaagtagctgggattacaggcgtgagccacagcacctggccagtacacttgacctatttcaagctgactcaatgaacactaatccaagttatattgcttatggcatactaagaatttaacttgtataaattacctctgaatagttacataaacactatcaccattcagtatcctattttttacattaatttttaaccatgcactttaagtttgtgagcctataaaatacatagaaaatttatggattaagagcattatatttagtggttaatcctaggtacctccctgcctacaaaggagttcttattaatactgcaggatcttttcttcatgaatatatgcttccatgaaatttaaatttttctgaatagcctaagtatgaaatgaatattttacttgaagatctattttttccaaaacccgtaaatttccagtcagcttttgaggtgtcagatgtgacacagatttctagatggtctttcttgaatactgacagaaatgtcctcaagagaggattatattcttgaaccattttgtattgataggtgggatgggctaacatttttatgattactgaataaacaaaaaatgaaattttcaaatatgcttttttattactgtgcttagaacaaattttaaaatgtgacttaagttgcttaaattccaaggctaatttcattcaacaaaccatgattttgtcatcctttaagtaagtttctcacttttcaaaactcatgtatcaacactgacttacttgctttttttttttttttttttttttttttaaggcagcttttatgacagcaacttgctccatgtagttttggcttatttaaaaactatactaactttggatttttctgttacaagacttttaacaatctgtatttcgtgattgtgaactcgtattcattttacttttcaaaaacagacttaacataccattccctcacctagcagtactaccacaataatgctatcatggtgccagggaattacaattgtaattcttctaacctataatgtttaaaaaataaaatgtgaattttatgaactaaataaatatttggaaaattagcgtgcttt

SEQ ID NO: 419 - DNA, 4479 bp, Homo sapiens
atttcataggctgtttgggatgccagaggaagagaaactcgtcaactattactcttgcagctattggaaggggaaggtcccccgtcagggttggatgtacctcagcattaaccacctttgcttttattcttttcttatgggaagggaagcgaaactggtcatccggtgggtagacatcactcagctcgagaagaatgccaccctgcttctgcctgatgtgatcaaagtgagcacacggtccagtgagcatttcttctctgtattcctcaacatcaacgagaccttcaagttaatggagcagcttgccaacatagccatgaggcaactcttagacaatgagggatttgaacaagatcgatccctgcccaaactcaaaaggaaatctcctaaaaaagtgtctgctctaaaacgtgatcttgatgccagggcaaagagtgagagataccgtgcacttttccggctgcccaaagatgaaaaattagatggccacacagactgcactctctggactccatttaacaaaatgcacattttggggcagatgtttgtgtccacaaattacatctgttttaccagcaaggaggagaacttatgtagcctcattatcccgctccgtgaggtgacaattgtggaaaaggcagacagctccagtgtgctccccagtcccttatccatcagcacccgaaacaggatgaccttcctatttgccaacttgaaagatagagactttctagtgcagaggatctcagatttcctgcaacagactacttccaaaatatattctgacaaggagtttgcaggaagttacaacagttcagatgatgaggtgtactctcgacccagcagcctcgtctcctccagcccccagagaagcacgagctctgatgctgatggagagcgccagtttaacctaaatggcaacagcgtccccacagccacacagaccctgatgaccatgtatcggcggcggtctcccgaggagttcaacccgaaattggccaaagagtttctgaaagagcaagcctggaagattcactttgctgagtatgggcaagggatctgcatgtaccgcacagagaaaacgcgggagctggtgttgaagggcatcccggagagcatgcgtggggagctctggctgctgctgtcaggtgccatcaatgagaaggccacacatcctgggtactatgaagacctagtggagaagtccatggggaagtataatctcgccacggaggagattgagagggatttacaccgctcccttccagaacacccagcttttcagaatgaaatgggcattgctgcactaaggagagtcttaacagcttatgcttttcgaaatcccaacatagggtattgccaggccatgaatattgtcacttcagtgctgctgctttatgccaaagaggaggaagctttctggctgcttgtggctttgtgtgagcgcatgctcccagattactacaacaccagagttgtgggtgcactggtggaccaaggtgtctttgaggagctagcacgagactacgtcccacagctgtacgactgcatgcaagacctgggcgtgatttccaccatctccctgtcttggttcctcacactatttctcagtgtgatgccttttgagagtgcagttgtggttgttgactgtttcttctatgaaggaattaaagtgatattccagttggccctagctgtgctggatgcaaatgtggacaaactgttgaactgcaaggatgatggggaggccatgaccgttttgggaaggtatttagacagtgtgaccaataaagacagcacactgcctcccattcctcacctccactccttgctcagcgatgatgtggaaccttaccctgaggtagacatctttagactcatcagaacttcctacgagaaattcggaactatccgggcagatttgattgaacagatgagattcaaacagagactgaaagtgatccagacgctggaggatactacgaaacgcaacgtggtacgaaccattgtgacagaaacttcctttaccattgatgagctggaagaactttatgctcttttcaaggcagaacatctcaccagctgctactggggcgggagcagcaacgcgctggaccggcatgaccccagcctgccctacctggaacagtatcgcattgacttcgagcagttcaagggaatgtttgctcttctctttccttgggcatgtggaactcactctgacgttctggcctcccgcttgttccagttattagatgaaaatggagactctttgattaacttccgggagtttgtctctgggctaagtgctgcatgccatggggacctcacagagaagctcaaactcctgtacaaaatgcacgtcttgcctgagccatcctctgatcaagatgaaccagattctgcttttgaagcaactcagtacttctttgaagatattaccccagaatgtacacatgttgttggattggatagcagaagcaaacagggtgcagatgatggctttgttacggtgagcctaaagccagacaaagggaagagagcaaattcccaagaaaatcgtaattatttgagactgtggactccagaaaataaatctaagtcaaagaatgcaaaggatttacccaaattaaatcaggggcagttcattgaactgtgtaagacaatgtataacatgttcagcgaagaccccaatgagcaggagctgtaccatgccacggcagcagtgaccagcctcctgctggagattggggaggtcggcaagttgttcgtggcccagcctgcaaaggaggacaagctgcactgcgaggacatcggagaggacacggtcctggtgcggagcggccagggcacggcggcactgccccggagcaccggcctggaccgggactgggccatcaccttcgagcagttcctggcctccctcttaactgagcctgccctggtcaagtactttgacaagcccgtgtgcatgatggccaggattaccagtgcaaaaaacatccggatgatgggcaagcccctcacctcggccagtgactatgaaatctcggccatgtccggctgacacgggcgccttcccgggggagtgggaggaaagggaggggagggattttttatgttcttctgtgttgagttttttctttctttcttttaaattaaatatttattagtacctggcttgaagcctagtgttttcataatgtaattcaatgaaaactgttggagaaatatttaaacacctcaatgtaggtacattacactcttgttgcggggaggggatttaccagaatacagtttatttcgtgaattctaaaaaacaaaaagatgaatctgtcagtgatatgtgtgtattataacttattaatcttgctgttgagctgtatacatggtttaaaaaatagtactgtttaatgctaagtaaggcagcagtcatttgtgtattcaggctttttaaataaaattagagctgtaaggaaaatgaaaagccacaaatgcaagactgttcttaaatggaaggcatagtcagcgagggtaaatcctataccactttaggaagtattaaaaatatttttaagatttgaaatatatttcatagaagtcctctattcaaaatcatattccacagatgttccccttcaaagggaaaacatttggggttctaaacagttatgaaagtaagtgatttttacatgattccagaataacacttgtattgaccaatttaaacagataccagaccaattttgcatttaagaaattgttctgattatttacgtcaactcattagaattcagtgaaaagtaacagtcttttgtcacagagaatctgaaagtagcagcaaagacagagggctcatgacaggtttttgcttttgctttgcttttgtttttgaaagagtaaaagtactgatgcttctgatactggatgtttagcttcttactgcaaaaacataagtaaaacagtcaactttaccatttccgtattctccatagattgaagaaatttataccacatatcgcatatgaccatctttccatcaaatcaatgtagagataatgtaaactgaaaaaaaatctgcaagataatgtaactgaatgttttaaaaacagaacttgtcactttatataaaagaatagtatgctctatttcctgaatggatgtggaaatgaaagctagcgcacctgcactttgaattcttgcttcttttttattactgttatgattttgctttttacagatgttggacgattttttcttctgattgttgaattcataatcatggtctcatttcctttgcttctttggaatatttctttcaacacattcctttattttattatacattgtgtcctttttttagctattgctgctgttgttttttattctatttacaggatgatttttaaactgtcaaatgaagtagtgttaacctcaaataggctaaatgtgaacaaataaaatacagcaaatactcag

SEQ ID NO: 420 - DNA, 4657 bp, Homo sapiens
gcaaccgaacccactctgtgttcaacctgatttatgaaaaagcagaagacaaatgggcatatggaccttcacccccggctcccatcacgcactctggacgccactgcccaccaaagccgtggctatgcgcagcttctcgggccacgcaaggtggggcacccttacatcaggtgccctcctgctcctgagtgtatccagtgagctgtagccatgggcaggcgtgttccccaccccttgctcccgacgtccgcgtcgtcccctccttcctgtacggaatgttcgctcatcgccgcctcctccttgtctcctcagggaatcccctcttctgtcctggaaaaggctcctgtaccagcagtttgggagtgccgtccacgaccctgacagtcccagccctgctgccccatggccacgtgcccacagatgtgctgttggtccaggtgtcccagtctggccacagccctgcctccgccctcacctacatgccctcccagcccctcccatctctggacgaggcctccttcctcaggttcctcctgctcctgacctcccagtgtgatgtccgggtcctttatcatcctattcatcctggagaggaaaagtgtcgggcaaagggggatctggggggagctcagcagtgactggggagctggtctgcctcagagacagagtagggggtgggagcagagcctcggtgagggtcttggccacagggcagtgccttcctgaacgtggcaggctttactaccaggaacgcactcggtggtggaggccccatgttcccaggagccaagattcgtagcatccttgaggccatcctgataaaattcggcgctattgcccccgtagctctggagctctaaaccgtctatctgcttctgtgctgaacgcctttcccatctgctgacgtaggcccagggctgccctgcccctgctgccagtgtaccgtgagcggggctccagccagttcaagctcagagccagagctggacgggccagagctgcgctgcacacttcctggactgaggcggggactttgggtcccacccggtttctcctgattatggctgctgtggggtgaggggagggaggggcagccccgaggcagtctcttccctttgagaagatattttcccacaaaggggtgggaagccaggagtgagaaggaattcagggagagcaaaggagccagtgctgagatgctgctgtgttggttgaggaaaacctcgggcctgagggccaggccagagcccaggtctctgctgacaatgggggttcaaggaagacgtcgttatctcccctccccacttactcgaggagagaggtgagggggggatgacttgcgggttctgatcaggcccctgggtggggaaggggcacagtgtccctcagcagcttacgcccctggagtcttggggggcccagcctggccctggggccttttccagctactgtgcccttgggcagctgcgtctggggctcaaccccccaatcctgttcccctctccagctgcgggtctgtaggcagctgtcacatctgaggggtttctgcaacctggaccccatctgggtgtgggtcagaccctgtgacccacatgccacccccaccctccacagagcccccttgctgggacagccagctcgcctccaaggacatcccctcctggctcctcccccttccgagtctgcagcgccgtgggcttctctgccgatgggcccgggttggggttaaggtgggcatcctccaggtacaacgagcctgaagagcccctttcagtgcagacggggctgcagagtgacactggctgggcacctgccccacgaccaatgacaaggatttccagctgaatgctttattcccatagggatctggacctgtgcccaagatataaatactacacttttttttttttttttaactgacattgtgaaattctccctatagcttttgccattcaagcaacattgtgatctttcttccccgccacgtgtgagggaatgattgagtcctgtttgcaagctggagaggagctctccctttgctagtactttctctaaagtactagtctagtaaaatttattcttgttagaaggtcaacaaaatatctgtttagcttttatgaagagtcaccgtagcagcccccacggctggaaagaggcctgtacgttctggacgcgttttgttggctgggcttctggaggcactggcaaggtcaaactgcatttctttaagaacagttgcaggatctggctcgcctctgtgggaagccggcattacaggtgcttggtggatgggccgtgtcacattgccatctggggtcctttggggtttccaggttgtcaccatgctgtcccatttgggaatcccatacctgcctgtccccactgcgctggctgacccttgctgcctgctgcctcttgggagggctttgtccctgcctctgagctggtgggcaggatggctgggtggcccccagagaagcacagacctgagatggggtctccatgcccggtttgctgttggaatgatctgaacaggaccccaaatgcctcttccctctggtcatgcctcactatctctaggagctccatcctgtggcttccagagtgtgcacttccagcccacccgggcagtgctgagagggaggaggagaacaaggatggcccagcctcccctccctcccctagaccacggggcgggcagctcgggttcctggagggctgtttcccccacgctgtccctacatctgctctgatctaaaatgtctttccttttatgctgcgcccagtcttggggctcaaagatttgcccaaacctcattggccctcgtgactaggctcatctagatggtgctcacgctggtgtttgaggcatttccactgtgatctccacgaggggatgttttccgggacacatctctggctctgggaactgcctgactcactgaagaaactacttttcaggcactgtagggtcacccatatgcctccagctcagttgacgcttaaaaacaggtgcagaaaagctcgcgatggaaggtcttaatgagagtgtctgtctatgccaatcatgtaaaatgacgtttcttgaaaaagattcagtggttcagctttgtcagcatcatctcaacacaagcctgctggctctttttagcatctcatccaaccatgtcatcgtccagatgagaaatcttagcccaggtgaggggagtaacttgcttgaggtcacacagctggctgttggcaaagctgggattagaaccctcaacccagggtcccttcctctgcagcgcctacatggttggttgaataggtggctgcgtttcctggggccctgggttttggggaagccagttagctgctgctttggcactggcatggaggtgagcagtcaaggatgctggtgaggctgcagtttctgctctttttcatcaggggggatagtctctaggatttttcagtgaggacccttgggctttggatgcagcttgaaccaagaaaacgaggagggaaagggattcagtgaactattcctcagtgggatcggttcttcagctcctgatgggggctgtgtaatgggggcagaggccagggaaaaagatgctgttcacccaccctcagcttcccttttcctaaattaagaggaaaagtggtcaaagaaaaactcttcatttctccctgattcttaaacgaaggtggttaatagaaactcaggctcccgtgacaaggcaggacaagagcctgtttcgctttcctccctgaccctgccaggtgccaactcaaacactacctttctcattggtttctaagtcagtagagacagatctgttttaagcagttgggggttcgagtagatctcatgggtacaggaggccagcagggaccaggccagtcagccatgctcaggacccctcggctcctcccccagcctctagctaccctgtatcgaggcagggggaggccagtaaagtttgccaagcctgatcctgcagcctggtggggctggctggggtattcttttaccaaactctgttttaccgccagccccttgtacaccccaatcccatgtctccctcccttcagctggaccgtgtgcccctttgggaggaagaagacaagccccactagggccaagggcagcagagccctgccgagtgagaggctgtggggcagcggctctgtcctgtgccttaccagccctggggagggggacatttggctggaagactggaatttaattgccatcgtctttgattttgtgacatttctgcttggaagtgtgaactacccccccccccggcttcctgctccttagcatgcgtgcagctctctcctgttttgggtgttacccttggacactccagctcggggactgctggcgtgtgagtgtgcagattcccctgtgtggtcgaacctaagaactgtggcttggaagtgatgctccatgtgacgacgactttgctttctttcctcttagtgaggaggtgattcgtagatcccaactgcctatgtaatgtaaataatgtacatttaatttattgctatggtagcacattgtatttgttaatgtacaaaacaaattctaaaaggttgacaaatgtatattttgttgcttaaatgtgtctttgcagaaattgacaataaataacatattttgtgt

SEQ ID NO: 421 - DNA, 4502 bp, Homo sapiens
ttagtataaattctttaggttcctttttcttgcttggatcggaatcatctgaaagggctcaggagccagctgtcgctctgtgttttttgctactgagtcactgtttctgacaagcccctcctgagtgtgggtcctcatttccttgtctagagtggggttgagcaatgtgatttctaaggttccttctggctctgacattctgtgtgcctttgttccacaccctttttcagtgatgccagtgccagggggtacagcctcagggatgtataacagggttttcctccacaaaactggcagaattgttctgggttcttatttgaaaatgtggcatgtggcccctcatcagtgctttggccattttgcatgcactaactcacagagaatgcaggctacaccccagctggtgagcatcaccatcatctctatgcccactggctttctgtttggctggagggaagctgaggacaagaggatgttaggttggagcacagggaggcctgtggaaggcagggacggtgtagagtctggcccagctgaaaatgggcttgggaagcctggccagtccttcaggtccatctgggcaaacctagtcttcaaagggcagagtcacaaggacctcaaatgctacttacctcctccagtactaacatttgacacatctaatgcctattcattgttgtgaagttcaaatgaggtaactcatgaggaagtgcccacaaaactaaacacttatgacacactctcaaacacactctcaaacaataagaattactatcatgagctgcctgactccacaagattttagtgctaggtgctagggacagaaaagtgaaaaaaagatgctcagttaattagcatacaatgtgatgctacctctaacaatagactttggatgatgtcttagttcaagctgctctaacaaaataccatagattgggtgacttacacagcaaacgcttatttctcacagttctggaggccggaaagtcaagatccaggcactggcagatttgacgtctggtggttcagccttctcactgtgtcctcacatggcagatgggatgagacagctctctggggtctcttttataagggcatgaatcccgttcaggggtgctccaccctcatgacctaatcatatcccgaaggccccgcctacacatagcatcagatagggaattctgcctcaacctatgaattttgagaggacacacacattcagtccatagcaacgggcaaagcttgtgagagcacagaggaaggagtttttaatgttcaacactctgctcgtgggggtggaagcctccatagcagcactgacagtttaacctggtctggaaagatggcaaagactgcacaggcggagggaatgggcatcctagcctgagtgagtggcagcgtgctggagaggcttatggaaacctctggtaatctggcctggtggctgggtggggtgggtgggaccatgtgggggaagctgcggagggagctggtgatcaaattaggaaaggtcttggataatctatgaggagcctggacttcgctgaatttttcagttaccaggttttaaaaaactttttatttcagtttttggctgaaagaagaagctattattttaattttatttaaaacctgcctgtggatctataataggcaaaacttaactcaaatagatttaatcatagccttgctgcactgtcctgttaattttgctactctccttcctcttagagcttccacgtagaatacatttatcttctcgctctagtctcgtcttgattgaaatattggagtgagagatagaaggtgggatctttatttttttttctctgtatacagaataatgcctattttagaatgtggaaaatactaaaaactataaagatgaaaaaagaaatttaccctctggacaaggttggtagaagatgagtggttgagctccagtagaatcagttttgttcaaatcctaattttttcacatattacctgtaagaccttggcaatttactatctccaggcctcagtttcctcatctgtaaaatgggaataataatcacaatacctacctcctaaagttcctattgggactaaatcattttcttcatgcaaagcacttaggaaagtgctgtgtacatagcaaataattaatatttcttatgggttattgcaacaccctctgggtgagttcagccctagaggaaagtaggtgagttcccttggggaagggtctttctgcctccatgttctacatcaggaaagtggagaagcttgtcataccacaggatgaggctagtgccgagtcacagactggtgtgtgttcagagtttttccctggaggatgctagcttatcctcccttgctccttcctttctagcatttccacccacctcgggctcttggggcaggctgtccctttaagaaagagagccacacattctgctcctgacagtggccctgcctcccttgctagataccttgctgggctgtggttgggacactcctgggctggattttagtgctgaagcctccagaggagggggcactgcttcaaatcaagcacaccccaccccaggaatccatgcccacagaaggactccctgtctgcagccccctgctgtggccctgggctcccagcacccagctctgggacatcagaagataattcttgaggactgagctcaggattcctaaaaagaaagttggaaaatagctggataaacttggtaagtgaaagaaagccgcgttacatcctcttccttggattgtggattgcagattttgggttgagttctggtgactcttgccagtggtatctgatgggcaaatgtgagaaggaggagacagaggtggggactgggatccccagtgggtagcgagtcttgaacttggggatagccccccaccttatcctggtggttgtcaaccttgaggcagggagctgggggttgacatctgaacatagctggagcctggcccaaggagtgaagatccgggaggggcagatgtcagatttctccctcatttgggaaaaacaaagtgtggtcattgagtgctgtttgtgaagatgccagagaccagtgacatttgcagcctgagggtgaaatgagtgaccctgtgagtgtatctcaggaggagacttggaccaattcctcttcttcctatagggtcaggggacagaccaggcctgggccccaagaaatctgcgttgtctccttggattgaggcagctgcccatgagcagcagcggacagtgtcgtagtgggaggaggcaggtctgccaagggcagggaagaatggagggcctgttactgctgaagcctgggaacgctgcctggggggaggcccacgctccccagagctggagtgagaaggaatgggaggagaagtctatgcagcagggggatgggctcagccagcatccccaccctctgcagagcaaatgcccccgtcccatttcctgtggcatgggcacaggtgagcttcctggccttgaatgctcaggtacagtttggagggctggggtctgttacaaagaggtggcctcccatggaggaagcaggaaatgctagaagcctcagcccctggcactcacccgagggtttccaaatcagagacactttctgctaaattatgcttcaacagatgttttctgtgttcctacttgtgccaggctttgtgctggggatttaccaaaatataatatggcatggtggaattgggaaggtgtgcagagctggaaagatattttggatgtgagattaaagccatttttgaaaagtaacaataatagttaccatttattctgtaccttgaatgcaccaatcactctgctaaaggctttgcatctcctttaattcttgcagtagtttattgacttgtgcctaattttgtagatttcaaagattaagaaactaaggctcagagattaaggacctttccttaaagatgcagggctggtaaatggcaaagccaggatgaacctcttaagtcgtctaaccatttattcatttgtgtgttcaacaaagttgaattgctggcctactgtgtgacagccattgtagagggcactcaggacacagctgggacagggaagggtccagggcagcctaactccatagcctgggtcctcacccccagccagagcccttcacactgggccccagagacccctgggaacattgtgtgattgttttctccaaggtctgagactctgcttgagaatgtgcttttccttgagaaatgtttctttgttttcattttaataataatactgtaaaaattggaggcatttattctgaatcatctgaatgaccaccatataacctactattggcatgcgattttagtccccaggtttgtgtttctgtgcaagttggcaccgagtggtttcctaaaatgatagtttttaacttttaatgctttgtttctcaaactgggctctacactgtgtgcttcaaaggcccaaagattaagaaagcgttcaagctcaacacccactacct

SEQ ID NO: 422 - DNA, 4678 bp, Homo sapiens
atttggaagatgcttccagtcaagtctcaatctcagtcggtcactggtccatgtatatttcatggacatctaccctgtgctgggcactgggcagacaacagtctactggacccagtctcactctcaaggggactgtagtccaagagagaggcaggtagattatcagatgaagaaactgaggctcaaagagccacagcgggacggaggaggtggacccggctctgatgcaggtggctggttcgatggcagactcccctgtgccgagactcccagaccaaatccggaggtcctggagtagagtgggtgggtccgccagggcatggccaggctgcctgtctctggagactcccccaaggaagtttcttgaccttgaggatgataacgcagggcaggctcttgagggctgtgcagggactccctggagagccctgggaaaagcaggtccccgcctgcctgggcctctgcctctgctgcaggggccagcacaggtgtcaggtccccacacatttcatgtccaggccattttcccactctagggccaaggctgggcacttcccagtcagtggcacagctggtactgtggggtctctcgctctgcaaaggttggtttcaatcccaagtgtcactgctggaaacactggccaccccgggacatgtggtcttgccagtccttctgcagggctctgtttcttaggtcccaatcatctgcagggagcactagtccgagatcttccaagatgctgggcaggaacaagcctgctatgctcattcccaaaggactccacatctagataaatgaaggcctggaaggctctttggctctacactagcaaaacagcttacgtcaccctgcctaaagagacagtcaggaaatccccttgttcctgggcgaggagaagctggcccacacggagtgacggcattgagcagatactacccttggctcgctcatggatggggcggggcctgctgaccttgacagcaatcaggggagggggttcggagggaagtggttagctggtgaaggtgagggaaaggactggagttaggacagggtgcagcgaccacatcctgtgacgaggaggcatctgtgacctgtgtgatctgccaggcaggcagcacaagtcattgtactgctactatgcccgctactgagacaggaacaaagagaggctgtttctgcctcttggtgctctccattggacatgtctgctgggcagtgctggcttttaccataggtatttttctgctcttccttccctcctcctctccctctctcttttccagggcactcacacacacacacttgcacacatgtgcacagttgcacacacatgcattgaacacatgtgcacatatatgcgtttgcatccacttgcacacccacacacctgtgcactagcacccatttgcacgcatgtccacacacttgcacacatgtgcatttgcagaaatgcacccttgcacttgtgtgacacacctgcacacttgcatacacccatttgcatacaggcacagacacactcgcatacatttgcacacacagccacaaacttgcacaagcagcacttgtacactgacacatatccgtttgtgcctatacagtgcacacttacacatttgcacacagctgtgcttgctcacacatttgcacacacccacctacacacttgcacacatactacacacttgagcgtgcagcacacatacctatgtgcatacatgcacatttgcacatgcacacagcagtggcacacacttctctatcattctccctagtcactgttctcccctgtgattcccacccctctgaccgcccctgctcacttgctgccccctccactggaaggggcctggcctggtgccctgtctctgtctgtctccaccgtgcagggaggtttcacaaggactggctgatgtctcgcctcgagctggcctggccgcagctgctgctgagcggaagtctctgaggggcgaggctgagaggaaaccacactctcactggggttcccgcagctctggcctctggggaggggtgtggagatgtgtgggcgtgagatggctttgagggagggacagcatgaagcttttcgctgggtctgtcttttcagtctccaggacaaaactaggccactgtgccccaggagaagggaaaacccacgtccccccaggctgggcccaccggcaaatcgggctcccaggcccttctcagcccatgcttctgtctctgccttgtcaggcttattctttgaggctttgaagcagcctttggtgggcaaacggcatctcagggaaccctggcctgtctcctccagagcttgtgccttggccctgggcaggggccaccatgggctgttgatgtaaatggcatccccagagttgtgcagtgtgggggcaaccctgaggtatcagcccagccccctgtctgcagcttttgctacccagcccagctccagctctgtctttgtcactgggggtggtgggggaggctggagctcagggacggggcactcctggcagattctccctgccccaggtggaaggggaggggggaagtacccatcctccatcctcctatcctgccagcggggtgggcgctactatgctggggagggtctggctgaataatgatgctgagctcgggacaccagccttctccgtgcacctactgtgtgccaagtaccatcccaagagcattatgggtggtaacttatacaatgactcagagaggcaccgctataatcacccccagtttctgtctggttccagtcctggccacacagctaataagcagcaaatggatttgatctgattttatctgaacccaggcaggctggcccagagcccactgtctaatcattgggccgtccagcctgtcaagactccaggctcgctggcgtcgtacccctctgtcatttcccagggaaacaagctctagcagcacctgccctgtgggtactttggccctgcctccctgcctccctgcctccctgcctccctgcctctcatgataggagccaaagaatggtctcctttgcaggaaaggagctcgacgggggtcttctcttgcaggctctgtcttgcatgtgggtcctgagctttctcattgagtaaggggagggggcagctggttcagtccagcgcagagtggatggaggccggttgaggctttcttgaaaccctaagcccagctgggatcctcggggaaggatccttcgctgggatctgactggctcttccagaggtcagtggggcatgtggctggagcccaagtaggagggaggaagaaatggtggtctgagtcctggggtgaccaggccctgaacctgccctgctgggaccccattccctgactctaggccccctttccccaccacacaggacaccaggctcttgccttaagacaggaaaggaaatgccttatggtgaacaattctccaggtccctattgtggctccaacagatgccagagggacatggcaggtgaccctggtctcctacgaccctgactttacttgctgtcatgaggccaatctcttaccttgacccacctcctgcctctgctttcagaagggcagaagagcgggcctcctctagcttcccagccgcctcccgcctcctgccgcccggcagcgctgggccccccagcagcgaggttcaggaggggaagaacctctcgcaggtgaacaaattgctgcacatcagacacattcttttcaagcctcattttctctccttttcatgctaactttcccactattaaagagcatttttaaaaagaagatgaaaaaaggcagagagaaaagaaggatgaaagtgtgagcgggtatccggaagtccttttcaattgcctgctgctgtgcagggtctgaactaagagcaagaaattggaggatgctggaggggcgaggtttcgtttcagtcctgcctattgggccaagtctggggcggggaaggagaggtgatggaggtgggcctggctgggccctgcggccctggaggctgcccctctgcctgccacccagcccctggcctgtgcctggcacaggaagcccgtcaataatttcttgttgaatgaatgaaagaaaagaaatcagtggatggagaagggctggattcttttgtggggaccttccacgccaccttctctgtggggctctagggctgagaaagaaaggacagatttggcaaaggtcaggcaggggctgggaaagcattaggtggaccaggcatgctacagcaaggccacgcctgcactgttgtcccactggtgacacccatgggtgcagccatggcgggtgggcgcagtttcacatgggattgggggtgagcctgggttgggtgggcgacccccaccccttccctacccctctccccaccagcaggtactactgggtctgcgtgaagataaaagctcaggaacatgccaggaaggtgtgaccatgatgatacctctgagatgaacccaagaagaaacagcagagtattacaaaggggaacaggactcagggtggacttcaagtatcattaaacataatcaaatatttaaaaagttattattgactgggtgcagtggctcacggctttaatcccagcacttagagaggccaaggtaggaagattgctttagcctaggagtttgagaccagcatgggcaacatagtgagaccccatctct

SEQ ID NO: 423 - DNA, 3600 bp, Homo sapiens
atttcagatattcgattttcacctggttctgggaaatatcttgctgtagcatcccatgacagctttatagatatatacaatgtaatgagtagtaaacgagtaggaatatgcaaaggagctaccagttacataacccatattgattgggatattagagcttttacaggtcaacactggtgctaaggaacaattattctttgaagctcccagagggaaaaaacaaaccatccccagcgtggaggtagaaaaaattgcttgggcatcatggacaagtgtacttggtttatgctgtgaaggaatttggccagtaattggagaagttacagatgtaactgcttcttgcctcaccagtgacaaaatggttctagctaccggggacgatttgggatttgtgaagttatttagatatcctactaaagggaaatttggaaagtttaagaggtatgtggcccatagtacacatgtcacaaatgttcgctggacttatgatgacagcatgttggttaccctaggcggtacagatatgtctttaatggtgtggacaaatgagatggaaggctatcgagaaaaaaggccttgtgatagtgaagaatccgacattgattctgaagaagatgggggctatgacagtgatgttacaagggagaatgaaatcagttacaccatcagagccttatcaacaaatattcgcccaatgttaggaatcaagcctcatttacaacaaaaagaaccctcaattgatgaaaggcctccagtgagcagggccccaccacagccagagaaactccagacaaacaatgtaggcaagaaaaagagacctatagaggaccttgtgttggagctcatttttggttatcgaggcagagactgtaggaataatgttcactatttaaatgatggtgatgatataatttatcacactgcatctgttggaattctgcacaatgctgctacaggttctcagagtttttatcaggaacataatgatgatattctgtgcctcacagtaaaccagcaccccaaatttatcaacatagtggcaactggccaagtaggtgattcagcagacatgtcagctacagctccttctattcacatctgggatgcaatgaacaagcagactttatctatcctaagatgctaccattcaaagggagtatgttcagtcagcttcagtgctactggcaaactattgctgtctgtgggactagacccagaacatactattaccatttggagatggcaggaaggtgccaaaattgccagcagagctggtcacaatcaacgtatttttgtggcagaattccgaccagattcagatacccagtttgtctcagtgggagtaaaacatgtgaagttctggaccctggcaggaagagctcttcttagcaaaaaagggctactgagcacactggaagatgcccggatgcagaccatgctcgctattgcatttggtgcaaataacttgacgtttacaggtaccatcagtggtgatgtctgtgtgtggaaagatcacatattgtgtagaatcgtggcgagagctcacaacgggcctgtgtttgccatgtacaccaccctgcgagatggacttatcgtgactgggggaaaggaaaggccgtcaaaagaaggaggagcggttaaactgtgggatcaggaactgaggcggtgccgtgccttcaggcttgagacaggacaagccacagattgtgttcgttctgtgtgcagaggcaaaggcaagatccttgttgggacaaggaatgctgaaataatcgaagttggagagaaaaatgcagcttgtaatattttagttaacggtcatgtggatgggccaatctggggactagcaacacatccttccagggattttttcctttctgctgcagaagatgggacagtgagactttgggatattgctgataaaaagatgttaaacaaagtgaatttgggacatgctgctcgtactgtgtgttacagccctgaaggggacatggtggctattggaatgaaaaatggagaatttatcattttactagtgagttctctaaaaatatggggaaagaagagagacaggagatgtgcaatccatgatatcagatttagtccggattcccggtatctggcagtaggttctagtgagaactcagtggatttttatgacctaacgctgggccccactcttaacagaatcagctactgcaaagacattccaagctttgtcattcaaatggacttctctgcagatagcagttatctccaggtctctagtggctgctataaacggcatgtctatgaagtgccttcaggaaaacatcttatggatcatgccgctattgacagaattacttgggctacatggactagtattctaggagatgaggttttgggaatctggtccagacatgctgagaaagctgatgtcaactgtgcctgtgtatctcattcaggaatcagtcttgttacaggagatgactttggcatggttaagttatttgacttcccatgtccagaaaaatttgcaaaacacaaaaggttcttgggtcattcgccccatgtgacaaatattcgatttaccagtggtgatcgacatgttgttagtgctggaggtgatgactgcagcttatttgtctggaaatgtgtacatacacctcactgagagatgctgagatgactacagaaattaactttgagaccagaattacagagaagaaaaaccaaaacccaaccctgcatggtcaagtggtgctaacccaagactgtaacagggagaaatgcccagaatcatcaaaatagtgaaagactgatctgttcaaaatatttgctatatgcactgggtataatccgtaatccatacactgccagataatgccatttcaaggaaggatcgaatacttgatggtaaaggccaagtccccctgtattgggaagtgtgtgatttcggcagacctgctgggaaaatttagggtagagcactctttacagaagaactcaaaaacccaatttggataattttcattatctttttagcaaaatggtttcttaatgtttatattttattttcaaggttcattgtttaatgaaatattttattcttgcatttccataaggaaagggaaagtcatgatcatcctaaaggatcacagtttttaaaaggcaaacattttccctaaggaaacagacacaagctttcctagagaatatgatgttttttaggcattaataaggtccttttttataaaggacacttttctcctagtagttttgaattcaggaacagatccaaagttagcagtatatggctgctacatttccattttcattttcgagccatcagtttatgttcagatgccatctctgtaatcgcacatttaaaacataactgtagcctcactaatggaaaagtagtatgatgaacaatcattcccaatggtgtacaatgtaagggttttagggagcaacagtatttaactggaagaaagaattgcatatttaatgtagtctaatatatacacatttgtttaacatgtaaacaaaagtgttaaattcacatatacaacattatacaatttaatcactcttggaataaaatttttatagcctttt

SEQ ID NO: 424 - DNA, 3466 bp, Homo sapiens
gactcctgccgtcacgcccggggctccgcgtagcagagatcgggagacgcgtctgtgcctccggggaagccgacccatctcccctccgcctctttggctgcagttgcacccccggccagagggcaggcgttggaggttaagcagagagagagaggcgtggacctatttacgagatgtaagttgtgttctttccacctttaccttctgagggcttcttacgcctcatggtgacaggtgcaaatcatgacacagaagggcagtatgaagcctgtgaagaaaaagaaaaccgaagaacctgaattggagcccctgtgctgctgcgagtacatagatcggaatggggaaaagaaccacgtggctacttgtttgtgtgattgtcaagatctggatgaagggtgtgatcgatggattacatgtaaatctttacagccagagacttgtgaaagaatcatggatacaatttctgatcgcctccgaattccttggcttaggggagccaaaaaagtgaacatcagcatcatccctccgcttgtcctgctgcctgtcttccttcatgtggcttcctggcatttcctcctgggggtggtggttttgacctcccttcctgtgctggcactgtggtactactacctcactcacagaaggaaagaacagaccctgtttttcctgagccttggactgttctctctgggctacatgtactatgtgttcctgcaggaagtggtccccaaagggcgtgtgggtcccgttcagctggcggttcttacctgcgggttatttctgatactcttagccttgcacagagccaagaagaatccaagctacctcagcaatccagcaagcggtgacagatctctaagcagcagccagctggagtgcctgagcagaaaagggcaggagaagaccaaagggttccctggggcagacatgtcgggcagtctcaacaatcgcacaacaaaggatgaccccaagggctcttccaggatgccagctggaagccccaccaaagcgaaggaggactggtgtgccaagtgccagctggtgcgaccagcccgggcatggcactgccggatatgtggcatctgtgtgaggagaatggatcatcattgtgtctggataaatagctgcgttggagaatcaaatcatcaagcatttatacttgcccttttgatcttcttgctcacctcggtgtatgggatcacactgaccttggacaccatttgtagagacagaagtgtcttcacagctcttttctattgtcctggagtttatgcaaattacagctcggctctgtccttcacctgcgtgtggtactctgtgatcatcacagcaggcatggcctacatcttcctgatccagctgatcaacatcagctacaatgtgactgagcgggaagtccagcaggccctccgacagaagactgggcgccggctcctctgcgggctcatcgtggacacaggtaaggtgctagcacacttgtgactgtggctggaagaggagaacagacactcctgtggggatgctttactctcttttctggggccagatgagtttattgtggaatctttgaaaggacaaggcctctgtgaatgaatcagtcccagggaagcatttggtggtggcggcagtggaggattgcccggtgaacctataaatcagcagtctcttgggcagaggagcaagcccctcgaacatgatttcaaacaagcaggtcctcttctctcatctcacgtccttagtctctgttaatgaacatactggatgtggagtttaataaattacctactatcatctggccacttagattattatcacaccactgtggactgttcctggggggagaagaacagaccgatttgaaagattcaagggagaaagattaaggatcaggattgcatgaaagaagaaaatccttcaatatttaaaatgtttcttacaatacccacggagcacttttatggttccagccgagcgttcctgaaatgaactgaccattaacagcgcctctttgataggttaccctgatgctgctaaagtaaagccttaagtgtgtttttgggacaacgtgctgcttattccacctcagccacatatgtgtttgtgtttaggatattgtaaatctttgctaagtagtgttttccttggtgaatgaagtcattgttgtcttcaagtgtaccatctgcctagcaaaaaattgctacaaactttctcttatgcaatagtccttggtacttctaatatttttagcaagagacaattttctgtactagaatcttccactgccagaaaacacagtgccagtaaggttctacataccactgaccatctgcttaatagacatgtatttcctttgagtaggacattagcttttgattataaagctcaaccagtataagcaaaaatataacatctagaagcacagttttagccaggatgtttaaaaattacagttttgtgagacttaagggtctttttaacctaggtaagtttatatgacctaacttaattgtagccatattctggtaccttccattttgaaaagtagaggttgcttaagcaagcaatggataataagagacttttcctgaggcacctgtttggaatctggttttctcagcggcagcttgacatgtgcacccttttgtattaaacactgcaagggtgatgcaggggagcaggaaagccatcctaaactcactactgagtacgattcagtatgttcctgtggatgtctgctgtgactaatataaatttcttgcagaatcagctacacttaattatgttgctgatagacaagcatccacgcttcagctgggactaagtgttttcattgtaggatcagcagcaggttaaagactgaacggttagtgaagacaaatgtcttaagaggctgcgatgtctaggttgggcttgtgacttcttagtggcctagccttcttgatggcaccttgaaagtgaacttctagaaatctacatttaaaaggcaaagctttaaaagcagagctagtctattctagttactgatgcaactaaaattctgtatttcttaagatggagccactgacgagatgtcacagtatagagcctgcagtctcaactcattgtgatcctaatggtctgggtgattggatggtttgagttgttagggattttgagtttttcattttattgcatatctgggttggatgttagactaaaggaaacccaggaatatttacctggtgttacatttaatatttaatgtaactggtctagcaacattaagggggatttctgaagccaactccggaggctgtgggctgcacattttgcactgtttttatatacttgtattcatatcctcttatcacctcagactcagacacaaggccttttacatggaaattttacaaattacttccatttatgtaaaataacgtcctgtgaccaagttgtttaaatggaaaataaagtgctttctttaagg

SEQ ID NO: 425 - DNA, 4077 bp, Homo sapiens
gtaagctgaaggttgggcgcagtggctcatgcttgtaatcccaatattttgggaggccaaggagggtggatcacttgaggacaggagttcaagaccagcctgggcaacttggcgaaaccctgtctctactaaaaataccaaaaaattagccgggcatggtggtacccacctgtaatcccagctgctcgggaggctgaggcagaagaatgtttcaacccaggaggtggaggtggcagtgagcgaagatcatgccacactgtactctggcctaggtgacagagcaagactgtctcaagcgtaagctgaatatgggggtggggtgggggtgggcacagcacaagtggacatgcctttcaggcccaggatggcgcatgcaaaggcccagaggcagaaacatgtttggtatgttgaagagcagaacaaagacaagcatggcaggagggcaggagctaaagcagtggtgtggaaggaggccaagaggcaaggattgtttgtggccagggttgggtgtttgggtcttaagtgttcaggaaaaccattgcagaatcaggcagaaggatgcagtgatggttcctcccgtgtggaagatgaatgtagatcccatggcttctgtttgcttcgtgaagtaggagagaaaatctgggagagggaaggtcgggataaagtgtataaaaaaggggtcttttgaaatagtcattttggacagtgggggaaaggaacatcatattaaaaagtgtgatcagtttccaggcagtttgtgggctggaaaattgtgattgtgaagttaaagtgaggccagttagcatggcgtgtgtttcccagcgacactgggtatagatctaaggtcagcggacagctggtgccacccggctgtggagaccccagcaagcacagcaggaggggcagcgggtcagtgccccgatgcagctcagggggtgcaggagtggagagcgggtgaagtcagctgcaggaggggtggtgcctgcaggagattcgggagccggagcagttgtggtgacagtgtggctgcaggagtggtggcaggggtcggggagaggaggtcatgggggtggcagggccgaggggctgagaggaccatcagtcagcctcacagggcgaagtcaccgtgagtggtgatggggaggaagccagtgagccaagggtcctctgtgaatcagggagtgacctggcagttgacaggtgacatgaggacatggcagattaaagtgatttgaacctgagttacggtatttagggaaggaagagaaactgtgtggaagcagcgtgggagcacagggagcttccccttgtccgggccggaggccaagccctgagagcagccatccctgcagaggggctgccagagagggcatcgggcaggcagccagagccagtcagggcaaggccggggaagggaggggaccacggggcatcacaaaagacacaggacggacaaaccaggcttcagaggggaggggacggtggctagggggaaaaggcctgaacagaggaggtagccaacccaggtacgctaggaggcgggggccccagagtactcccctctgcagcgatggtcaggaggcccacgaggtggctgcggggcaggggggctttttctctgccctggcgtggccattagcgggtgggagaagcaggctgagctggggcaccaggcatgaagactcggttgtctggctcagctgctgatggaggagtgccccagaagcagaagtggggctgagggtcccgtgggaagtgccctgcagagcacaggctcctgcccggctcctcgcctgcctccgccctctgctcactggccagctctctgttctcttcattccaggcaccgccacccccacctttggtcagaacacccctgcgcctggagtgggcacatcgggcagcagcctctcctttggggcatcttcagcacccgcccaaggctttgttggtgttggaccgttcggatcggcggccccttcattttccattggtgcgggatccaagaccccaggggctcgacagcgactgcaggcccgaaggcagcacacccgcaaaaagtagcctttgtcccctgtccctgttccccccaccccttccctaaatctggaccttggcacgtgctagaaagagccttggacccttccagctgcgtaaagcaaacctaccccggatctctggcttcagccgccagggggcagtggcagccctggggccctttcccttctggaggaagcacaagcctcagggaaggggaagcaggatgcggagggccaaagcccgggacctctacttgaacagttccactggggaggctggagaactaaggacctgtacatagtgtccgctgccctgactcccgcttagcgcacccttaggcaggcgccccttccacctttccccgagagccgtcgtcgctggagggggcagggtccagcccgcctggatcggtggtgtgcacctgatgggatttgggaaatgggttatccctaaagctttatcttgcttggcttagctgtgagaagtggttctcttcctctggtcccttctggggactctgtttccccatttcttgctgctgtgtccctcaccggttccttgcaggattccctcctttttaaatgcccttgaatctagctttgccttggagaccccagtgggtgctgctcctgccgttttcttcctgccaagcctgaatcaatgtttcatctccaaccctctgccagtttggcccctcagagcttggtggctcaagactgttagcctggcagagccaggggtgaagggagaagctcttggagcaggcaggatgcccaccgctgcttcagctgcctcctcgcccagctaccctttggccccattgggccctcgtctgcctctccaggattgtatgtttcaagccttgtcctgtgttcctttgtctgacgctctgtgtattgctctttgaatcgagtttggaggaagagttgagttgtatgagtggcggcatgttggtagtgccggacttcctgtttcaagttttctggggcctcgctaattgaatgtggaaagtagcaccacttgacggctacaagtgccgactcctgaattttcccatggtgttctgacttcaagggctggcagccagggagaatgggcccaggggaagcaaagacctcttccctctgcggtttctgtcccacttaactgacctcactggaggctacgtcacccaaagtagatgttagaaaacctaaattaatgaaccatatttttaaaatcctatttttcccaaacagggccctctgcagcccatcctttccttccgtccttctgaaaccacataccccaggcccaagcgccttgctgtcacgcccaacctctttggtagaagtatgaatgcgtgtgtctaaattaaaagaaaaaaatatttaaacgttttttaacaaaaatttatttttgtatttaagctaaattgccttttaaattccttcaagcttggttcattgaggtggttaagtataaatgctattaactaggaattagctgtatagttaagttatgcctgtgcaaagaagaggctcaaatgctgtccccggcagctttcctgggggactagagctccttctggccatgttatatgaaatgtaattcttattttataaataatgtgatgtagatgtaaccggtgccccctccccgttgtgactgagggcgagtgttatacctggctgcgtgtgcagctgaggagggagtgaacctcaagcctaaatacctgttaggattggagggtctgggtgggcctgggcctagcaatcaatcaagcttctacctgtaccttatgtaaggtagaccctcctagtgtcagtacctgagcttgtttacctcagttccgcaggcaggacagccggtccgggaaccctgagtgagagtgagtgtggatgtgtacagtacacacactggacggcagcgggaggctgggactttccattacaaatagagacttcattcctgttgagtctagttggaatttttagtatgaatgtgagatttttctcctgcttgtgacattaagaataaaaaactgtgatctatcgt

SEQ ID NO: 426 - DNA, 3332 bp, Homo sapiens
tcgcccaggtgtggctctgcctccgatgcccaggcagtggtctttgctgtgtcattttgttacaagctccttttccgtccatttagcttgcagctttctttgtgtcagagactttccctggatgcacatttatgtttcagcgagtcaggaaaagctgttggaagtcttctgtgtgtgtgtgggaattctgggcttacctgtagggcaaacgtggcgagctggcttttatgcttgggaatccgcacaggtcaggccctttaggtcttttggggagtgtggctccatctccccagaaatggattctgtgtggctggatggtggatctatgagcagggcagtggactgggcttgagtgagggctctgtagggtgcagatattccatgaactctctgttttcaaggaatcacttctgccctttaggattggtgcctgaggattggtctgagtctgggggtctctggttcagtttctccaaggaaatgatttcttgatatctcattgccacgtgggtggtgggcccagtgccctttatacagacctttcaccatccctcatgtctgccccactcgcctgacagcagggcctccagtcccagagtcttcctggggttctgcccggctggtcagcttctcagcagcatctccctctgcagagcccatccgtgcacctgctttccatcgtccccaatctgataccgatttacctggcctctcctctcttgttgtgttattcttgtgaaattatactattcactttctcttttttttttttttttttttgagacagagtctagctcagccacccaggcaggagtgcagtggtgcagtcttggctcactgcagcctccggctcccgggttcgggcggttctcctgcctcaccctcccgagtggctgggactgcgggcgtctgccaccacacccggctgatttttgcatttttggtggagacggggtttcaccatgttggccgggctggtcttgatctcttagcctcgtggtctgcctgcctcggcctcccaaagtcctgggattgcaggtgtgagccaccgctcccagcctgttcagtttctttactcccatcttagtggggttgtggaaaggcacgtcaataagcatatatgttcaatccatcatgtttaaacaaaactcagtacactatcatttgtaagggtgcctggcattaggacggccagcgttaggacattaggatagccagcattagagcaggcagcgttaggacaccgggcgttagcattaggatgctcagtgttaggacacccagcgttaggacacgcagcgttaggatgcccagcattaggaacgtgctgggattgcaggcgtgagccaccgtgcctggcccctaagtatattcttgagttttgctcttgatatggtcaagtcacttagaaagagtttggtcctttcctctcttattttggaactttgctaggtgggattcgagcggtattctgtctgaagataatttccccacactcaagcccataccctttttattactctgatggacgccctttgatttatgactttttcttctctgtctgttgggaacactctcattaaaaagcagaattgtcagattggataaaaaatcaagatccagttctgtgctacatacaagaaacccactttaaatataaaaagactctgctgggtgcggtggctcctgcctgtaatcccagcactttgggaggctgaggcgactgaatcacctgaggtgaggagatcaagaccatcctggacaacatggtgatacccctgtctctactaaaaatacaaaagtttagcggggcgtggtggcgggcgcctgtagtcccagctactcgggaggctgaggcgggagaatcatgtgaacccgggaggcagaggttgcagtgagctgagatcgcaccactgcactccaacctgggtgacagagcaagactctgtctcaaataaataaataaatatataaagactctagtcaggtaaaagtgaaaagatagggaaaaaataagaagaaaacttgagtggctatattaatataagaccaaggagatttcagtgcaagaaatattgccagggatgaaggaagtcatttcctggtgattaagaggtcagctaatcaagaggacatcatggtctcaactgcttctacacccgacagctgagttccaacatacgtcagcaaagacagaaggaggtcacaggagaaacatacaaacccactgtttgagctggagatactcaactcaaaggacagagaagcaggaaggacagacaggacttgagcagcacagccagccaggctgacctgcttgatgttcacagacgctctgagcagcaacagcagagtagtccttcttcttttcaggcacacatggagcatttgccaagacacaccatattcgaggccctgaaacaagtctcagtgcacgtgaaagggttcaagtcatgcaaatatattctccaactacaatgaaatgcaatgagaaataaagacagagaggtatctagaaaatctcccaaatagttggaaactaaacaacacacttctaaatagcccacgagccaaggaagaaatcaaagtggaaattagaggctgggtgcagtggctcatgtctgtaatcccaacactttgcgaggctaaggaggaaggattgcctgaggccaggagttccaggccagcttgggcaacagagcaagatcccatctctatgaaaaataaaaaaaaaattggctgggcacagtggtatgcacctgtagcactagctgattggaggccaaggtgggaagatcacttgagctcagcagtttgaggccagcctggacaacctgggcaatgtagggagatcccatctctataaaaaatttaaaaattagctgggcatggcagtgtgcccttgttgtctgaactacttgggaggcagaggtgggaggatcacttaagcccaagagttcaaggctgcagtgagccatgatctcaccactgcattccagcctgggtgacagagcaaggtcccacctcttataaaaaagggaaattagaggctgggcgtggtggcttacacctgtggtcccagcactttgggaggctgaggcgggcggatcacctgagctcaggagttcgagaccatcctggccaacatggtgaaaacctgcctctactgggaatacaaaaattagccaggtgtggtggcgggcacctgtaatcccagctactcgggaggctggggcagaagaatcacttgaacccaggaggtggaggttgcagtgagccaagaccacgccattgcactccagcctgggcaacaagagtgaaattccatctcg

SEQ ID NO: 427 - DNA, 4850 bp, Homo sapiens
tttagttgtcttccaggcacagcattcaaaacaacaacccacaaacctctcagagagagcaagctgcttctcaggcaaagtcacgtcctattttgtataaagcagagaactttaaatcaaagagacatagagacatagttctgactccacgtgccccatgggtaccagatatgccacctgggcttccaggtgaatggtgctgttagcttccccaggtttggtggaagcacaaaagcctggtgtgcctcacttggggtctctgatagacagggactgccttcataagatgtgtttggaaatgagtgggggcacctctgcttgtcaccatgactgggggcattttctgggccagagccaggtgtgctcaagaccctataacatccagggcagagccacaaaacaaagattttatctctaccaaaatgccaaagagcccctatcaaggaatgctacccagagcccgttcaggcgtatcttccagaataaagcagcagtctgcccccaaaggagtactgaagacttctgaggttgaaaactgcacgttgccttgaggttagttttttctaggttctatccatcaaggcttcaaacattttaaggttcaggtttcatttgggacaccttgtttattagccctctgatagctttggactcctacagacagaacatttttgcctttccagtccccttatggcacttaggtagtgctgagatggccttacagggaaaaagcgggcacggggcacatcacttgaacgtaaagcaatgttcggggtacacagcatccctgtaccaaagctcgtcagtgccaattatattgtgaattacattttcttatttccaaagtggtgtcctatagagttgttattccttctttaaagtccagctgcctcataagaaatcagagattttacttcaaagcttccaaaggattggtatcccgaagttccacagttcatttgaatcaaaaattagatggctctgttgatcagaacaaccaagatagaggctttctgattataaatacattttagacctgcctagagcagaataggcatttggaaaacatagatttatttttacaagcaaattactctggcgtgaggaattcattatagagtggtaaaattaaatggttacatttcatttataacttataagtatcattttacaatgtgcatctatgcattggaaggaactgttgcctgtcattaaatattttctgtttcatgttccttttacatccattaaaatgcttatcagattggttgacgttatatccagctagaagccttttccaagtgtaaatggagatgcctgtttaagtcagcactctccaaaaagtgactgtgtcagggagcgtacacggacttcatcaatgcaaagggaagctgggggcaaagagtgctgatcctgagcaggctgggctgggctcaagtggaaggagcttgcaccaggtgcccacatgtgcttgggagacactgctctgtaaggaagatggtgccacgctgtttcctaaagagagactgacctttcaggacaagttattctaggccaccttgacagaaaggacgtagagcacagcaaagctgcagactttatagcgtccgtccaggaaggaaggagaaagaaaagctctgtggatttattttgcaatccatttagcaatgtccttaaccccaatctgattagtaatttctggcttggcactttcacctaaacaaaggtgggggtagtttcctcctttgttttctgattcctccttcttccctcactccctgcagggacccccgtgttgtccctctcttcctctgcctacattgtttgtttgaccagatggatgtgactggatgtgaatgagaactgctcaccacgcgccctgttattcgtggtgctttatctctgaacagacgctgaccttgaagcttaggtttccatttcaaagtagtctttaatttctcttccatttgtcgattgtggtgtccgccactcatgtagtaccaactgtatactaaaattgaacattgcttattggatttggacttggggttttgaaaattactgttttcttaatttaacaaaaaatttacaagattcctttgccacatggagagagaatttggagctgcggtttggccaggtattttctacttaatgtgaaaagaaacaaaggaatttggccccaaatgccaactgttgctgtgcagactcctgtgataggccctttaggaataaatttaaccaatacacagttcttgagcttgagaaacttgcagtaaaaacaagccaaaaagaatgttaggtaacaaaaatacaaggtaagctgagggctctgaaatttaaaggcttttccatctaccacaatttaagagatgacatatctgagcacaatagcagaattagaagacatctgtcattaaacatttttttgttttgtcttggtctttggtccctccctaatgtgttcattctgcctttgttggtcatcatttttgagaagtaatatccttccagagagcccccatataccttaggggattgcattagagccctggttctcaaagcatgatccctggaccagtagcatcagcattgcctacaaacttcttagaagtacaggttttcaggcccaaccccaaacctactgagtcagaaactcagaaggtggcacccaggagtctgtgttttaacaaaccctccaggagattctgctctgcaccagcgtttgggaaccactgccttagagaaaggtggacccgccagtgtgtgaagcatctttcctcccactgtgccctgtagcattctagtcaggctaagtgcttgtcattaatagagttccactggcaaataagctcaagaaaatagacctccttttcggacatttgctacaggtgtcttcctcttcaaggctctgagaagtcctgcactaagaagatttcattcactttaactagcagctcccatacttatttgagcacagaatacattgttaccatgtgatagatacctgtcattggtagtattctctggaacatgttttgggagaaacttctagagagagctttgtcctatgtgctgtcagtctttaatgtgccgtagatagaaacacatctctcccctaacaacgtgggactcatgcctacccctttctagagaaagccagactggaagccagcacaatgagctcatttgtcttccttgttctccactgcatctccaccttgccttccactctcattcccacttcattctctgctcttcaaccagaagatagggtggcctgctgagccctacctgaaccacagagactgcttcatgtccatccacccagagtgtggtgtttgtgtctccattcttcctgtatttgtgaagctaatgcaattagattagattacaaatggtgtataggtatcttgtggtccatgcattttggcaagctgcattcattatcaaatattcatatattcatcttaactagcctgtcccaaagatcagatttttttcattcttttatgattttctcaaaattatgatttcattgtagaagtaaaatgtctatcattatagctttgcctaagttgtagcatttcccagcttagttgaagaaatctatgatcagtaaagtattaggcccttcacatgcattatctcaatctcatttactcctcaaaatggatggggtagagaacattgtgaggtaggtgttgttaaccccatggtatagacaaatggagaagtttacagatgacatgcttgccccagttgcacaactaggggtttacaatggagtgagattgccagagtttgaatctctattctgccacttcacagctgtgtgacctggggcaagttaattagcctctctgtgccacatttccctcttctgaaaaatgaggataacataatataggcagaaatgacaacatctacttaaacctcgtgtctcatgggattgatcatggcttaccatctagcagggtagtagctcacaggggtgttgtaagcttttacactgatttatgtgaaatactttgaaggattctggcacatagcaagttctcagtaaatgtcagtggggagagaaaagatagaacagtcaggagcatccctggcacgactaatctagagtgtgttaacagcggcagaaactcagtacacattgtggatggagtaagggggtggggggtgctgcagtttgtcctttgcactacaccccgccacgtggtggaccatgatcaatcccatgaaacacgagggtttaagtagatgttgtcattcctggctttaaaatgcatgctggccttatgtttctcttggacccctttctgctaccctaatttctcattctggctccaactctcccatcttctgtgatgttatatttaaattttaaattataatttgttgcagggtacttggatatcatgagtgatttaaagatggtattactctaaatccacagaatatttttaacttcataaaaactgtttcgggccaggcacagtggctcacgcctgtactcccagcactatgggaggccaaggcgggtggatgacctgaggtcaggagtttgaaatcagcctggtcaacatggtgaaaccccgtcgctactgaaaaatacaaaaattagctgggtgtggtggcacatgcctgtaatcccagctgctcaggaggctgaggcacgagaattgcttgaacctgggaggcggaggttgcagtaagctgagttggcaccaccgcactctagcctgggtgatagagcgagactctgtctcaaaaaaaaaaagtttcagaatacctttcatgaaactcagtttgccttttggatcctcttcctcaacaccagtccc

SEQ ID NO: 428 - DNA, 3548 bp, Homo sapiens
tttctcactatcggcatcactgccatcttgatccaaatcactcttaatcactcacctggactatcatagtaaattcctgattcatctctctgtttctattctggctcctcccaaccctttgtcctaacctcaaaaaagtaacaaaagtcattaaaaaaataaaagtcagattatgttactcctacactcaaaaccttctaatggcttcctaaatcatttgcaatgtaagtcaaaatacaattgtctagaaggccctatgtcatctggtccctgtgaaaactctgacaaattctttctttctggtttactctatcccagccacgacggggcctctattttgttcctgaacactctaagcatgcccaattttaggcctttgcacttgccgctccctcaggttgaaacagttttcccccagcccatatggctgtccttctcatttccttccacactcaaatattatcctattagtgagtccttccctgaccattataggtcaaatagccacccccacccttgcagcttttcctgtttttcttctactgtgttgtatttttctacacatagcttacatctctctgacccatcattcatttatttgttaaaagttcattgtcttctcatactatatgtaaatactgtgagtatagagatttatgtattttgttcactgctacagctatggcttgaaaagctgtctatttttctaacatttattattcctgctttcattgttttcacctgttatgtttatttggtaaatctttcttactttttgaaaaatctttctgtaaaaatctttgtcttttaatatttgtctctaatagaatcacatttgttattataacttattaaatgttactaatttctgatttttatactttctactttattgacctttatgctttatatatttatacttttttgatattttcttttttatatctttcctatatagactaaattttctttgttttttttttccccagtgatttgaacaatatatatcccgttcttggttttagattatggtcatctttatatttttataaattattgttaaatctactttctctacataatatgagtgagatgagagtcctagctttttgccaagctacagctactactggtatgcagacattctggtttgccttccagaaaggaatatgctttagataattgtcatgaggagttttgtggacacaaagaacagaaagaatcatcagtgtgggaaggggaagtcttctaggatgacccagtctgagactgatcccaggctccacctcaaaatttcagttctgagatctttggaggaaggtgctgtacgtgggagtcacatttacccttttcaccagagtatctctggttctcaagcgtccaaatatagcacatgactggggaaacctcttcttgctttggcatgaagcatagcatagcaccaaaattcaaagacgtgaggagtttaaaaagcagagtcaaattttcaagtgaaggattcatagcaaagtcgggtgataataaacttgtatgtcattgtaggcactaccaaaaagggaccttagtgacgggctacactaatgatggagagtaacgagcagagctgaagaaggagctgtggaactagcacagagcaactgaaaagaagtctttgttagcatgcgtgacatagtttggggtgcctagaagttattggagtagattctcccaaaaggtagaggctttacactagtaggtgtgacagtgggaaggtggcttacatagtcaaatccaagaaccaaattataactttgcattcccctgataaaaagcaacaaaattaatatgcttctgtttccccttcctcttctattcattattttccagtgtaattgaaattagatacatgaattttaattgattttttttcttattcttacattaaatatcttgtttttcaagaataatttttgcccgtacgatttaattttgtcatatttaccacaatcttttagaaaaatgtttgactggtagtaatgttatctggaattcttttatactatgttttcttcatttctgtctttctattttctacttatttcttccaaaatatatctttgtggaagactccatggtgtgtgtatatttttagcctttgaatatctgattatttcctcccattgtttttagatagacaaaagacttgactagggtgtctccagcttttactctcacctgaactccagaatcctatggctatctatggtcatctccactgaatgtttaaaagatatctctgttaatatgttatataaggtaattgtgtaacatattaacagagatatcttttaaaaattgaaatttcagagaaaagatgaaagagagagaaatgcataataatggcattttgattattcagggaaatatacttgttcttaggatatatgtgatgaagtattaggtgttgtagcaactatgaaaatgtactgctcagatctcctgtagacaggagcagaattgactgccgtgttggctatatttcatgtacttccctgttcaagccaaggtacccttcatgctgcttcccgtcagtggctgtgcacagtaggtgtactaatgcaggcccatgtcctcaagaagtgggaccccattaacagatgactttggctcaagacttcccattggcctggccaaaacttacttagaaatgtgctgcgttctgaaatttttctccctaatctcttcttctctctgttcttcataggagtctcaagtatctctcagccttcttctgctgccccaaccatttgtttctcacagctcacacaatatatctcttgtaagcccaacttatactggcatctaattcacagagggtctgaactaacagggttacatgctatgatgtccaagtagttaaggagaaaagtgtacgtgtttgtgtgtgtgtgtgtgtgtgtgtgtgtgtgtgtgtgtcagagagagagagagagagatgagagagagaaaagaataaaaggaaggaagtaaatatctcaaaatattaataattgatacatttaggagaatactatgtgtactcattgcattattctgttttagatttgaaagtttttaagtaaaatgtggctgctaaaaaataaaaatctaaaaattacaaaaaaagatacatgaagctcaacatgtgtattgatgagacatctatttccaatttcaatgtctattctcctcagcaacaaatccctgattttatttggggcacattgcatccagcctagaattttatttcaattaaaacatcatctgactcttacattcaagcaatggaaatacaagtaaacatgttatatgggactgtgggaagtcttcctaaaaggtaggaggtctttccttttcaccctctcctatagggcttcctgaactatgtatgtgattgctagagctcaagcagccatctttgaacatgaggcagtgcatcagaaagagcagagcagcaagaaagaaggcatctcagttcctaacgaatgaagtcaccacatcagccatagaagcctgcctctaggactctg

SEQ ID NO: 429 - DNA, 3748 bp, Homo sapiens
ttgtatttttagtagagacgggctttctccgtgttggtcaggctggtcttgaactcccgacctcaggtgatctgccggcctcggcctcccaaggtgctgggattggaggcgtgagccaccgcacccggtctgtgatccttatcgttcactttgagctctctgagaagagtagggccctattttatctgcagggctttctttcctcagttcctcagtttctttcctcagttccagtatcatgaacaggatgctcagttactgagtatcctgagcagatactgagtaaatgcttgagtgatgttgataaagtcatatacctagaattacccactttaacaggaactttgtaagattcctctgctttcattaaaagaaaaaaaaacaaaacttgtaaattaccaaagacaaagtacttaacagaacacatgtgtatcttcctttttttttttgagatggagtgtcgctctgtcgcccaggctggagtgcagtggcgagatctcagctcactgcaacctctgcctcctgggttcaggcgattctcctgcctcagcctcctgagtaggtgggattacgcccggccacatgtatattttttctggaactaccttattcaatcattcagtaagtaaacattgcactccagcctgggtgacagagtgagatttcgtctcaaaaaaaaaaaaaaaagaaagaaggaaatccttcagaaattctttatctgagtgctgtgacgtccatagtgaaatttattacttggaaactacatagtggttgtgagaggaaataagtaataaatattaaatggtattaaaaagattatgcaactgggaaagaaaaattaatttgctatcgctaccatgattcaccatcacatctagctgtcttctacagccttttatttatttatttttttttgagacggagtctcagtggcgtgatcctggttcactgcaacctctgggccccccccaacccactgcgagttcaagcaattctgcctcagcctcccaagtagctgggactacaggtattttatgcatggggtttgtaaggaaggagacaactgtcgctactcgcatgacctctctgacagtccgtatagtgtagtgtgcaagtattttcagcgagggtactgtatttatggagaccgctgcagatatgaacatagcaaaccattgaaacaggaagaagcaactgctacagagctaactacaaagtcatcccttgctgcttcctcaagtctctcatcgatagttggaccacttgttgaaatgaatacaggcgaagctgagtcaagaaattcaaactttgcaactgtaggagcaggttcagaggactgggtgaatgctattgagtttgttcctgggcaaccctactgtggccgtactgcgccttcctgcactgaagcacccctgcagggctcagtgaccgaggaagaatcagagaaagagcaaaccgccgtggagacaaagaagcagctgtgcccctatgctgcagtgggagagtgccgatacggggagaactgtgtgtatctccacggagattcttgtgacatgtgtgggctgcagctcctgcatccaatggatgctgcccagagatcgcagcatatcaaatcgtgcattgaggcccatgagaaggacatggagctctcatttgccgtgcagcgcagcaaggacatggtgtgtggtatctgcatggaggtggtctatgagaaagccaaccccagtgagcgccgcttcgggatcctctccaactgcaaccacacctactgtctcaagtgcattcgcaagtggaggagtgctaagcaatttgagagcaagatcataaagtcctgcccagaatgccggatcacatctaactttgtcattccaagtgagtactgggtggaggagaaagaagagaagcagaaactcattctgaaatacaaggaggcaatgagcaacaaggcgtgcaggtattttgatgaaggacgtgggagctgcccatttggagggaactgtttttacaagcatgcgtaccctgatggccgtagagaggagccacagagacagaaagtgggaacatcaagcagataccgggcccaacgaaggaaccacttctgggaactcattgaggaaagagagaacagcaacccctttgacaacgatgaagaagaggttgtcacctttgagctgggcgagatgttgcttatgcttttggctgcaggtggggacgacgaactaacagactctgaagatgagtgggacttgtttcatgatgagctggaagatttttatgacttggatctatagcaaccttgcgtggcgtgtgaactggtctgctgacctcagacagcagctgtcccctgtggtggtgtggcagtgcctgtgttctctcctaggcaggcctctcaactccaggtgctgtcctaagaatttttacccagggcctgtcttctcaacccctcacctttccctgaggagtgtgttgttttccctgttgaaaaaagttacaaaaataaatcttaaagttagttttttgtaacacgaatttaactgtcagacagttagtgtaggtgtgttgcgtcatctgttttcaaccagattgcatttatggacttttcacacactcattttgaggaccccaggttcaaaagtaaaagcagtggccctgctttggggtccaagaataggagtgatgggtgaagggacctaagctggccaatagccctctgccccagacatgggatgtggatccttgaggtttctggtgaaatctgcacatctgtgtttttatatctgttccctaccctgtaatccctaccacgtgcacttgttctgtggttttggtctcttgtttaattgcacacaagtaatactactgggtaaccagaatcaggtgtgaatgtgttgagattttttactgttttgcatgataggaaaattgagaaagaatacgtataaaagatagagaggcataacatcaatgcagagttggaagttggctcccaagggctgacatggtgtgagtgtgtgggtgtgtgataagcttctcatccctgcatagatgcagtattcttagccttagtagaaaaacctggtttagtggtttaagccttgtgtggcagatagatcttaaagggcaaagcagtatattggtagttgtcaatatagcagtgctagctctgtctatataaatagagaaatggggttagccatagaggttaaaactacctggttatcccatataataacacaaactgggtcttggatacacagttgtatttaatgttttacgatctagcctttccagtacaggcactttctgagaaacctttgtcctcacttgaggcattttgttgtcgggtttttgtgtttgtttttgtgggtatttgcctcattccacccctgagctttcaggtagacagacgtgattcaaaactctgttctaaggtgtttattgtagtggagtaatgggtttgcagtgataagtcatacttttccaccgaaagggagggcttgggaatccctgagattagctaaagttaagttgttggaagaattccttgattggaaattgtacctttgtgttttgttgctctgtttcctgaaaataactcggggatgctcctggtttgtccatctactgctttgattccttggatcccacccattctttcactttaagaaaaaacaaataattgttgcagaggtctctgtattttgcagctgcccttttgtaagaagcacttttcccaaataaaacaatt

SEQ ID NO: 430 - DNA, 3834 bp, Homo sapiens
ttttggcacttcaaagatgtttcagtgtcttccagccccctcgtttctgatgagaagttagcagccattccaggcttttccttctgtgtctggcactggtgggttcttggtctcattgacttcaagaatgaagccgtggacccttgcggtgagtgttacaatttttaaaaatggtgtgtccggagtttgttccttcttatgttccgacatgttcagagtttgttccttctggtgggttcgtggtgtcgctggcttcaggtgtgaagctacaaaccttggcggtcagtgttacagctcctaaagctgcacatctggagttgttcgtccctcccggtgggttcctggtctcgctggtctcagaaatgaagctgcacaccttcacagggagtgttacaggtcacaaaggtagcacagacccaaagagtgagcagcagcaaaatttatggcaaagagggaaagaagaaggcttccacagcatggaagggaaccccagcaggtctgccgttgctggctcgggtggcctgcgtttattcccttatctggccccacccgcatcctgctgattggtccattttacagagagctgattagtccattttacagagagctgattggtccattttgacagagcactgattggtgcatttacaaacctttagttagacacagagcactgattggtgcatttacaatcctttagctagacacaaaaagttctccaagtcccctaccctattagctagacacagagtgctgattggtgtgtttacaaacctttagctagacacagagtgctgattggtgtatttacaaacctttagctagacacagagtgctgattggtgtatttacaaacctttagctagacacagagtgctgattggtacatttacaaacctttagctagacacaaaagttcttcaggtccccacccaacccagaagcccagccgacttcacctctcaatggcactcacctcaggactttgcagcacctagcccgtgcactccagcatcccagagggagcttgtccccgatcaagcctagcaggtgccggccggccgcccgcggagcccacgcccaaccggaacccgcgccgtccagcgagtaccgctcgcggccccggctcccacctgtgcctctacctccacatctccccgccaacagagggagccggctccgcctcgaccagccccagagaggggcccccacagcgcagcggcaggctgaagggctcctcgaacgccgaggccgaggaggcgccgagagcgagggctgctagcgagttgtcacctctcacttccatgtgtgataaactgctttcctcttgctgctgctgggagacaattttccacgattctccgtttcctcacatctaggcattaacagcaaatttcctcagatatattacattccaggatagtaaaaataaaagaaggtttttttttttttgagacagggtctccctctgttgcccaggctggagtgcagtggcgccgtctcggctcgctgcaacctccgcctcctgggttcatgtgattctaccacctcggcctcctgagtagctgagattgcaggcgcatgccaccatagcctggctaatttttgtatttttaggagagatggattttcaccatattggtccggctggtcttgaactcccgacctcaggtgattcgtctgccttggcctcccaaagtgttgggatcacaggcatgaggcaccgtgcctggccagagtttccactcattctccgcagaaaggtccattcccgtaggtacttactctgccacacagaaccagaacctccatgagtctctgctagtggcgttcactgtttttttccttccttgtaatttatttatttttaaaaaactgggtgccttcgtcctgtaggggttccacctttgtgtattttgctgttgcatccccattatgtcattttattttaaaaatatttcaccatatttgcttcaggtttctctttttaaagaaaatcttatcaacagtcctgtgtttgttccttttgtgtgtttacagtgagtggatgttctataatgtatctatcagcctgctactaattgtttccatcttttgttcttgtaaacaatagcaggtgaaattgacctggaatctcttcctttgtgcaaactgtaaccaattacaaattgccctccaagaatgtatgctaatttaccctggcagggtccttcctccccaaagatttttgctatataattattttttaaagtatgtgtattcgtttccaaggactgccataacaaattaccacaaatggagtatcttgaaacaatataatctggccaggcgtggtgttgtgcgcctgtgatcccagctactcgggaggccgaggcatgagaatcatgtgaacctgggaggtggaggttgcagtgagctgagatggcgccactgcattccggcctgggtgacagagtgaaactctgtctcaaaaaaaaaaaaaaaaaaaaaaaaaaaaaaaaaaaaaaagagagagagagaaagaaaagaaaagacaatataaatctcagttctgaaaactggaagcctgaaatcgaagtgtcccagggttggtttctctccccagttctggaggctgccatgccccttggtgtccctggcttgtaggtagctctcaccctgtctctgcctccatcctcatatggcattctcctttgtctgtctctgtgtctctagggctgttttctcctccagcaagggctgttttcttattctatccaagctgtttctgctgagatggttggttggatcccagtgttgcaggtctcatctctccaacaagggtttggccaccacatctttggtggtttattttatttttaaaaattcctattttggctgggtgcagtgactcatgcctgtaatcccagcactttgggaggccgaggcaggcagattgcttgaggccaggagttcaagaccagcctgggcaacctgacgaaaccctgtctctacaaaaaacacaaaaactagccagaatatggtcgtctatacctgtagtcccagctacctgggaggctgaggtgggaggatctcttgagtatggggggttggaagctgcagtgagccaggattgtgccactgcactccagtttgggtgacagagcgaaaccctgcctcaaaaaataaatatttcttatttatttgtgggagggaatcaatcagaagtactttccattgttcatcttcaaggcagtgcaaagggagtagcctttgatccttttgttactttgctgtggagagattttccttttgattcagttctaggaagtcagtgctaattgcctttaggttccttgcctccagaccctattctcgcgcctcactagtacccatcgtgtacttttaaagttcctgcaactcaataataaaaccccaataactaaatttaaaaatgggtaaaagattcccatggatgaacctggaggatacgttatgtgaaaaacgtgaggtactgaaagataaatactgcatagtctcacttatgtgtggaatctaaaaaaggtcgaacttggccaggtgcagtggctcatgcctgtaatcctagcactttgggaggctgaggcaaggggatcacttgaggccaggagttagaaaccagcctggccaatatggcaaaacccccatctctactaaaaatgcaaaaattagccagtgtggtggcatgtgcctgtagtcccagttgctcaggaggctgaagtgggaggattgcttgagcctgggaggttgaggctgcagtgaacagagataaggccactacactcctgcctgggcgatagggtgagaccctgtctc

SEQ ID NO: 431 - DNA, 5650 bp, Homo sapiens
tgcctgctcttccctgatttacccacaaccctaactttgcatattcaaagggggagatcctggtaagtacatgcttagtgtggtagcaaacattagagaatctagtggtgatggagaccccgcccacccctaatattccctgttccccatcccctccaaataacaaaaatactaaaaatcgagctaacctggaaaccccatgccgcagccggcgctggactgcacgttgccctgggtataagtcgactcacacaggcactaactggaccgccacccttgaaggcgcacttctgcagccagttcctggcaggttttcctggtttcctgtaggtcagggatggcaaatacttacacaccgcccctgcctcccctcacatccctggctgtggaagatctcgcttaagccagaccagaattcattcttggcactgcccctcctccttctatctcctatgcagatgtcactcatggatcagagcatatttttccacatggcagaaatcttgccctcttgtgcccatggcagacatggctagttgatctagcactctttgccttgtgccgctcctctagcacacgcccatggcagatattgctaagcaatcctagcattctttccaaataagcttgccagcactcctgttctgtagcagatgtggctaagtgattaaggtattgtttttctccctatatgataccctcttctctatgcatggcaggcatgactagtcaatcaggagcctctttcctagatgctgcctcttgtcctccagataaattgatgaggctcttctgttccacttaccctttctcctatccttggcctgtgacaggcaacactaattgatcctagcaccgtttcctgccacgcccagaattctcaccacagtgcttcaggtatcttgtaccagtcgattgacgtggctcccgagatgaatcatatttgctgtccatccctgctgtgggtaacacctccttcctttgtgcagaaccctcagctggggcccagtgtggggcgtgagatgggcgtgaggcccagtccagcccagcccagcgggaagcagcctgctactcatagctgagaactgaacccagctcaaggagctcacctctaggcagccggcctcagcccggctcttacacttggacagcacagcctgggcctccagtcctagcaggggctcccttttgctggacattctcccactgccagccaccaaggcgctggtcatccctgccactgccctctggcggggctcttctggcaatcccagggtctttcttgtagctgagccgatcctatgccagggcctcgctgctcccagggcctgggtgtgcagatagggccatgggtggggcagtgacgggaggaattagttggcctcgggcttgtggttttcaggttcctcatgtgttccccccagtccctttgaatttgccaggccaagaccaggaacctgcttctcccttgtaccccaagaggtttaggggttcctcttttcctaccagaggccacatagcccagccccgtcatgagcgtggccgtggcctctgggtctcccatctgtggttcccatctctactcgggagactcaggccgggaccctcacccaggaaagagactggagcagcctgccagaggatccctgctttgccgccccctgcctgccctgccacccataccgccccatgtgcctgcctgcctgtcactgtgcaccctagcccgcaacggcctgccgcctcttctgtctctcccacccctacttccttctaagcccagtcccattgggatgtgtcccttggatgcaaacctgactttctgctgaggcctggctgctccctttctctggctcacaagtggtggatggctaacgggcctttgtttgccacccacagcttgcagctccctagggtgggattttgtctctgaacccgtgtggagaagggcacctcagggcttctgccagacgtcctgccccaaggcttggtgtgccatccccagcatggccccgatcagtgccctggccctgtggccatgcaccccaaagtgtagcgtgggccctgtgctccagctctgaccaacactaaccccggctggaggcaggagagccaggccaccgaggggtgtgcgggcacatccctctccttagaaaccgggccaggcctgggagtatggaggcctcacatttctctgggggagcaccgacagcctgtctccctgttttccctcacctggttgtcattcagtcatggaaccagggtctactaagcactcgttctgtgcccagctctgggctgagacaaggcagtgcccccaccccgctccccccgggtgaatggaggcattcccagactgccagacctttggtgctaacaccaggacgtcctggacagaccaggaagagctcgtcactgcgttcccagaggggatgctgtgacctcacaggggctgctggcctcagccccctcacccaccaccaggcagcccgtgaatggccagatgccaggggtcactgcctgctccaaacaactgtaagagtcctgtctgctcatcccagggagggataagtctgtacccttggccttaacaaggggcgcccggtggcatctcatgctgtccccagcctgggcagtgacttctgcatggtccaggggtccctgggtactctttagccacctccgtcttcatggccacctggggcctagcactcacatccagccaccaaggagccgctggagctgtgggctggtggccctggttcagaatgtcaggcccggggtgggtcggggtagtccggatgaagcccctccataggaccgcccccgactaggacagcatctgggccccagagggattcctggaggccccatctctggcgctcctgccgtgccgtgccctgccatgccctgcactgggggatgcaggccagcccttcgcagctgtccatggccatgctcagcccaccctttgtagcttggccaagtctgtcagtgcctgggtcccaggccgccctgtgcgtgcctccgtgtgcttcctgcagctcccagggccctcgtcctgagtggggtggggggctctgcccacacatgcctccagcggccagggagcatgggagcacagcccccaggctgcctgccgttagttgtcaggtgagtccctgcgcaggcctgggttctgacccccacgcagatgacagctacagccacacaatccccatccatggggtctcccagcctgaaaccctgatgtgtcagtcaaaaggatgaccaccaggcttgcagccagcttgggacatgagccgcgctccttcaatgtccttggggagggcccctgggctcacacctttgaccctagccctctgtgtggatgctacccttggaaccttatctcacgcaaacaagtgcagttcctcagatgtcacatttcatgtgccacagccccacacacaagccccagggactcctcccatgggcccctttccatcaggcctctgtgagtctataccccatcagcccctggcccagtgagtctgtctgtccgcccacctgcccaggtggcgcctcatgttggtttcctgctggaaatgcttgggacagggtggaactgggtttcctgggctttggggctggaggtgtttctattgcggtccctggcttcccactgagctgtgggcaaggctgctgcgctgggggatggctggggcacggagcgaggttccctgctaagctgcgcgctttcccccaggtgatccgcaggggctggctgaccatcaacaacatcagcctgatgaaaggcggctccaaggagtactggtttgtgctgactgccgagtcactgtcctggtacaaggatgaggaggagaaagagaagaagtacatgctgcctctggacaacctcaagatccgtgatgtggagaagggcttcatgtccaacaagcacgtcttcgccatcttcaacacggagcagagaaacgtctacaaggacctgcggcagatcgagctggcctgtgactcccaggaagacgtggacagctggaaggcctcgttcctccgagctggcgtctaccccgagaaggaccaggcagaaaacgaggatggggcccaggagaacaccttctccatggacccccaactggagcggcaggtggagaccattcgcaacctggtggactcatacgtggccaccatcaacaagtccatccgcgacctcatgccaaagaccatcatgcacctcatgatcaacaatacgaaggccttcatccaccacgagctgctggcctacctatactcctcggcagaccagagcagcctcatggaggagtcggctgaccaggcacagcggcgggacgacatgctgcgcatgtaccatgccctcaaggaggcgctcaacatcatcggtgacatcagcaccagcactgtgtccacgcctgtacccccgcctgtcgatgacacctggctccagagcgccagcagccgcagccccactccacagcgccgaccggtgtccagcatacacccccctggccggcccccagcagtgaggggccccactccagggcccccctgattcctgttcccgtgggggcagcagcctccttctcggcgcccccaatcccatcccggcctggaccccagagcgtgtttgccaacagtgacctcttcccagccccgcctcagatcccatctcggccagtttggatccccccagggattcccccaggagtgcccagcagaagaccccctgctgcgcccagccggcccaccattatccgcccagccgagccatccctgctcgactaggcctcgaggggggcgtgctctcgggggggcctcacgcacccgcggcgcaggagcttcagtggtctggggccctccgccgcccctatgctgggaccaggctcccagtgggcagccctggcctcttccttaacgctggccccggtccagggccggcccctgtgcctggctggacaccgcactgcgcaaaggggccctggagctccaggcagggggcgctggggtgttgcactttgggggatggagtctcagggtggcagaggggggaccagaacccttgacaccatcctgaatgaggggtccagcctgggggggactctaccaaggtcttcttgggctgggaaagcccatgtagggcaggccttctataagtgcgggcaccaagggcgcctacatccccaggccttgctggggtgcaggggtatatcaacttcccattagcaggagctccccagcggcaagcctggcccagtgggctcggtagtgcccagctggcaggcctgaggtgtacatagtccttcccggccatattaaccacacagcctgagcctggcccagcctcggctgccagaggtgcctttgctaggcccggagccgttggcccgggccggccttgccctattcctctcctcctcctcctcctgggtcccccagggtggctgggcttgggctatgtgggtggtggtggcggggggtcctgggggcctctcagctcccgcccatgcctccctgatgggtgggcccagggcggcctctctctgaggagacctcacccactcctcgctcagtttgaccactgtaagtgcctgcactctgtattctattaataaactaaaataaagggaagacgctg

SEQ ID NO: 432 - DNA, 3383 bp, Homo sapiens
aaaaaaccctcagggacctggtatagacgcagaatctgtttcacacaacaactgctatttgaaggaaaaaaaaaaaaagaagcaaatggtaccaagacaagctcataacagagatccaatcagcagatgtgtacggatgaaaatacagtgagatgagtcagaaaccggccaaggagggtcccagactctccaaaaaccagaagtactccgaacacttcagcatacactgctgcccgccgttcaccttcctcaattccaagaaggagatagaggatcggaaatacagcatctgtaagagcggctgcttctaccagaagaaagaggaggactggatctgctgcgcctgccagaagaccagctcctgccagcgtcgcttaagcagcagaggagagccctggctcccgcctccagcttcttttggccctctcagaaccagccgccgtgccaagtcccctcagaggcccaagcaacagccagctgcgccccccgcggtggtcagagcgccagccaagccacggtcccctccgaggtctgagcgtcagccacggtcccctccgaggtctgagcgtcagccacggtcccctccgaggtctgagcgtcagccacggtcccctccgaggtctgagcgtcagccacgtccccgcccagaggtccgaccaccgccagccaagcagcgtccccctcagaagtccaagcaacagccgcgcagcagccccctcagagggccaggcgccagccgtggggggtcccccgtcaaagcttctaggttctgattgaaaaggaagatcaggccaaccccaaagaagaagtgaccaaggaggagtttaaactgaatgaacaacctcggctcctggactcattgcttcacaacccatctacccctggatgaagttatctggcttcaaatattatgcaggggcaaacacctgctgatgtggcaactgctgatgctcatggtccccatggcatgggggcctcagggcagcctgcctggaggtgagcagggctatctctgtgtgttgtactccagtcagggggttccagcagcacccgcaggctctagagctcaatgcacagttctttttgtttcacctgcagtcctttcttctccaggatatgcacaggcctccagggtctttcatggctcagggtcagggtggctcaagtgccaacccacatgttgtcctccaaatattcccttctatccctggcatgctgttgctgagctcaacttttaatttttgactttctcctttgtaattaatctctatctgagtttctctctttctctgtgccatttggtttccttaattagttccctgtgccagcccatagtcagagccataattggctctggggaagatccaagttattttctgagtaagatattaggcttccatatgatccagagatgcaaagaaatccctagagagtgtaggagttgtctaaatccatgtgtcagatgtagccaacgaattatgtcagaagcagagagaaaaggcctgaaaagcagctctctcccactcctcaggcccttgtctccaaccttacatgaggctttttgaacatctcctcctggcccagctggggtgagagcaagtcctcgaaggcactgcctttgagccttgctcagcccatctgaactatcccaactctagaattgactgctttcgaattgtgtgaccttgggaatgttatctggcttcaaccacaatgccctacccccagctcctctcccaaatgatcctagatacagggctgcttccccccgaccctaccccacctcgggacacaggctcatggcctcatggcacttcaccaccagaagtggtgctcagagttcctatttccacatctaaccccctaattcctgggaaagtctgaggcctggtccccccagtgctttccctggctggcctctccacattttcatctgatggtggagtgagatcaggaaaaataggacaggagctttgccttgggggagaagagagttaagtgtggaaaggggtgagttataggaggttaagcagtccaagatttctctctctgtgtaggaggccatttcctgatgtgaggggtctgaacccaattatgatgggacagggttgggcattgacttcccatctcttctctctgtttttctcccactatctgtagcccaaaactcttatggaggactttgatctttagtataggctattggtcagggccataggaactaaccccgatcctcactccaccaggatctaccacatcccctacacacaaacacatgctgtggggagggagttttcccctgggtcaagttgaggatccttagatcaccttgtgctcctgtggactggtgtgtgcgtgtgtgtgtgtgtgtgtgtgtgtgtgtgtgtgtgtgtgtgtatgttgggaaacttagctttcagagaatgtctatgggctctcattttctctctcacacaaaaatactcgggacttctccaagtccctgaggagcctgaccactgaagctgatcatgagatgactgtatgctgacacacccccttcaggggcctggccttgacttagggctgcactgtatcctcagcaacggccttgcaggagccccttttggactgctttccctattcagcccagagttggggtggtgggagaagaggggttggagtgaatccatctctattcaaattccagctgggattactctaggagtcttcctggcttgttttgggctcaaacttagctacattgtttattggctcccaaagtcgggattgaagagtgaaaagatgcaggcaatgaatccttctgcacactcctccccaacctttccagcgcttttctacttaggaggccagtggaagggaggagaggtcatgccctagcccacaggggacaaggttcattgttcttccaggcttggttcactctgcttttgattcagaagctctttccctacccagcaagactacactttcttgccttctttctattttttctttttgtgcgtataaatggtatgttgtgatatattctcagtgcttgtgcccaccttggaactctgttcttgctcttcattccgcatgtgatactctggtccaagatcttggccaggtgccttctgctcaaatatcgtctcagaggtgcttcccttgaaaactcggtgctgtttccatagttactctatttgatcactctaagtttggttgtcttcatagcacttgtcaccctctggaactattctatccatttatttacttgtttaatgcttggctcttttcccctcctaacgtaaactccatgattgccaacacctgtttacttactacagttccccctccccccacattcctgacactagtaagaaccaataaacacttgttgacgg

SEQ ID NO: 433 - DNA, 3952 bp, Homo sapiens
gtgtgagcggccccgatgtggcaggaggcgatgcggcgccgccgctacctgcgggaccgctccgaggaggcggcgggcggcggagacgggctgccgcggtcccgggactggctctacgagtcctactactgcatgagccagcagcacccgctcatcgtcttcctgctgctcatcgtcatgggctcctgcctcgccctgctcgccgtcttcttcgcgctcgggctggaagttgaagaccatgtggcgtttctaataacagttccaactgccctggcgattttctttgcgatatttatcctggtctgcatcgagtctgtgtttaagaagctgctgcgcctcttctcgttggtgatatggatatgccttgttgccatgggatacctgttcatgtgttttggaggcaccgtctctccctgggaccaggtatcgttcttcctcttcatcatcttcgtggtgtacaccatgctgcccttcaacatgcgagacgccatcattgccagcgtcctcacctcctcctcccacaccatcgtgcttagcgtctgcctgtctgcaacaccgggaggcaaggagcacctggtctggcagatcctggccaatgtgatcattttcatctgtgggaacctggcgggagcctaccataagcacctcatggaactcgctcttcagcaaacatatcaggacacctgtaattgcatcaagtcgcggatcaagttggaatttgaaaaacgtcaacaggagcggcttctgctctccctgctgccggcccacatcgccatggagatgaaagcggagatcatccagaggctgcagggccccaaggcgggccagatggagaacacaaataacttccacaacctgtatgtgaagcggcatacaaacgtgagcatcttatacgctgacatcgttggctttacccggctggcaagtgactgctccccgggagaactagtccacatgctgaatgagctctttggaaagtttgatcaaattgcaaaggagaatgaatgcatgagaattaaaattttaggagactgctactactgtgtatctggactccctatatctctccctaaccatgccaagaactgtgtgaaaatggggctggacatgtgtgaagccataaagaaagtgagggatgctactggagttgatatcaacatgcgcgtgggcgtgcattctgggaatgtcctgtgtggcgtgattggtctgcagaagtggcaatatgatgtgtggtcacatgatgtgaccttggccaaccacatggaagctggaggggtccctggacgtgttcacatttcttctgtcaccctggagcacttgaatggcgcttataaagtggaggagggagatggtgacattagggacccatatttaaaacagcacctggtgaaaacctactttgtgatcaaccccaagggagaacgacggagcccccagcatctcttcagacctcgccacacccttgatggagccaaaatgagggcctcggtccgcatgacccggtacttggagtcctggggggcagccaagccctttgcacacctacatcacagggacagcatgaccacagagaacggcaagatcagcaccacggatgtacccatgggtcagcataattttcaaaatcgcaccttaagaaccaagtcacaaaagaagagatttgaagaagaattgaatgaaaggatgattcaagcaattgatgggattaatgcacagaagcaatggctcaagtctgaagacattcagagaatctcactgcttttctataacaaagtactagaaaaagagtaccgggccacggcactgccagcgttcaagtattatgtgacttgtgcctgtctcatattcttctgcatcttcattgtgcagattctcgtgctgccaaaaacgtctgtcctgggcatctcctttggggctgcgtttctcttgctggccttcatcctcttcgtctgctttgctggacagcttctgcaatgcagcaaaaaagcctctcccctgctcatgtggcttttgaagtcctcgggcatcattgccaaccgcccctggccacggatctctctcacgatcatcaccacagccatcatattaatgatggccgtgttcaacatgtttttcctgagtgactcagaggaaacaatccctccaactgccaacacaacaaacacaagcttttcagcctcaaataatcaggtggcgattctgcgtgcgcagaatttatttttcctcccgtactttatctacagctgcattctgggactgatatcctgttccgtgttcctgcgggtaaactatgagctgaagatgttgatcatgatggtggccttggtgggctacaacaccatcctactccacacccacgcccacgtcctgggcgactacagccaggtcttatttgagagaccaggcatttggaaagacctgaagaccatgggctctgtgtctctctctatattcttcatcacactgcttgttctgggtagacagaatgaatattactgtaggttagacttcttatggaagaacaaattcaaaaaagagcgggaggagatagagaccatggagaacctgaaccgcgtgctgctggagaacgtgccttcccgcgcacgtggctgagcacttcctggccaggagcctgaagaatgaggagctataccaccagtcctatgactgcgtctgcgtcatgtttgcctccattccggatttcaaagaattttatacagaatccgacgtgaacaaggagggcttggaatgccttcggctcctgaacgagatcatcgctgactttgatgatcttctttccaagccaaaattcagtggagttgaaaagattaagaccattggcagcacatacatggcagcaacaggtctgagcgctgtgcccagccaggagcactcccaggagcccgagcggcagtacatgcacattggcaccatggtggagtttgcttttgccctggtagggaagctggatgccatcaacaagcactccttcaacgacttcaaattgcgagtgggtattaaccatggacctgtgatagctggtgtgattggagctcagaagccacaatatgatatctggggcaacactgtcaatgtggccagtaggatggacagcaccggagtcctggacaaaatacaggttaccgaggagacgagcctcgtcctgcagaccctcggatacacgtgcacctgtcgaggaataatcaacgtgaaaggaaagggggacctgaagacgtactttgtaaacacagaaatgtcaaggtccctttcccagagcaacgtggcatcctgaagagtcaccttcattttggcaagaagactgtattttcaggaaggtatcacacactttctgactgcaacttctgtcccttgtttttgatgtgcgtgctgtctgtcctatggagcctctgcagactcgttctcgtgacccagtggcataccgtttggtgtctgatgtgtgcccagatcgttctgccacttgcactgtgcttgctcctaagcaaaagggaaaaggagcgcgcgtgatagaagaaaagcactgggagaactaacagaggagaaaggtgaaacacacacacattcttaaggcaataaaactagggggtgtatattatcttctggtgcatgttcttttctggaaaatatggtagctcgccaaccgcatctgctcatctgatattcaaacacacagtattcgtgaataagttgattctgtcccccacgtggactctgtgctcacccattgtctcattgccagtggtgtccaagggcccccgttgggacccacggctctcgtccctctgctccgtgtgtctcatgccagcagcacgtcgccatccgtcaccagaattagtcctcacagcctaggaccagttttgtatcaaactcgtctgatgttttgatgccatttgtcttttgtaaagttaattcattaaaagttttatgtactttg

SEQ ID NO: 434 - DNA, 5100 bp, Homo sapiens
gaagaccaagccggaggtctggggctgcgcagagacctgcacacccgcagcgcggaaccgggggcgattcctatctttctttcatgcttctttctttttcttaaaaccaaaccaaaccaaaccaaacccaaaactcccctgctcccaccgcaacttggaggagcggtggaccgatttgaaggaactgacgcagaggttttattcacgaaccttgaagaagttctgggcaagtgactcaacaggacccgcggggcccggggtagccccagctcccggcgctggttcagtctggcagtgccctctggcagccaacccgcagctgcaggtaggggtgctggacgccccctgattttgttttgggaataataatgacactacctatagcctggacccaggtggcctcgctcggcgattgtccccaccaggtttgattgctactgtggctcaggtcctctaaactgtagccaatatgatggatgatgacactgaattaaggactgatggaaactctttgttaaaggctgtgtggctggggaggctcaggttgaccaggctgctcttggaagggggagcttatatcaatgaaagcaatgacaaaggcgaaacagctctcatggtggcgtgcatcaccaaacatgtggaccagcaaagcatcagcaagtccaagatggtgaagtacctgctggacaacagggcagaccccaatatccaagataagtctggcaagactgccctcatccatgcctgtatcagaagagctgggggagaagtggtctccttattactggagaatggagcagaccccagccttgaagatcgcactggggcttcagctctggtttatgcaataaatgcagatgactaggatgcattgaagcatctccttgatgcctgcaaagccaaagggaaggaggtgattattataacaacagataaatcgtcttcaggcaccaaaaccaccaaacagtatcttaatgtccctccttcacccaaagtagaagacaggcattcacctccactgtgtgcgtctccctctgacatagagctgaaggctctaggcctggactccccactcactgagaaggaagatgacttcttcagcctccaagcagggcatccaagcagttgtaacacctccaaggctgttaatgagcctgggtcacccaccaggaaagtcagtaatctcaaaagggcccgtttgccccaactgaagaggctccagtctgaaccttggggcctgatagcgccctcggtgctggcagcctcgacgcgtcaggatgagacccatggtgccagcacagataacgaggtcatcaagagcatcagtgatatatcctcccctaaaagggggcccctctccagaaccaacagtatcgatagcaaagaccccaccctctttcacacagtcacagagcaggttctgaagattccagtctcttcagcaccggcatcctggaaagcagcctatgagaaaggtcaggctccccacccacgtctggccaggagaggaactctccctgttgaccaagagaaatgtggtatgggtccatcaggaccctctgctctcaaagagcctgcatccctcaaatggctggaaaatgacctctatgacttagatatacagccagggcctgaccctcccaactccatttcccttgaatccggcaaaggacctttagataaaaagaagctcctcagaaggcattctatgcaaattgaacaaatgaaacagctgtctgattttgaagaaatcatgacctagaagctttagaaaggcttaaaatagtcaatatagtttatggaagggactatggatgagactgcttcctgatcattccttaatgttgaactgtggccacttcagaagatataaaagcaggatgctgcttcacttctgagaataatccctgggtttttataggcctacttgaaaagagctcaggataattgggttttgaagataaatttttaaaaattctgcaaaggaagaaagcctttggaatttgaaggtaacacagcaagtacaatgatgtaagctggggacatcagtagttttctatcagacaaacagaaaagaatttaaatcaggaggtagtatttggagtatgtcatttgtaataaatctataaagtgcctacatagaaaacgaggctttaacatttgttagaatgtacaaaagccccaaaccaaaccctcagtgactaaatctgggtgtctgggttctatctgatggagtagaagcagaattccccccatggaagaggctctggcctgtgggtcctggctctgactctgtcagggcactgtaaatcatggtgtggttgaactcgttcagtaatccagtaatatattttgttcacatactaatttgtatgtgctctgagtacccaaatatcccatctatgtggcccctgaattatgatatgtcatagtagctgatgccttagagataaatcttgctccagaaatgaaactttccccagacccgtccactgacacaggctcttgtattgaaatcttgtgaaaaacagtcaaggttaactaacttggagttgaatgtgatacaattatagattaaaaatatcagaagcatttccagattattcttaaaagttgatgagatcttcccaaaccagaatgacaactgaggatgagatgtgcatagattaaatggtaaagtgggtggttctcaggtgagaagcagtgaggaccattcattttgcagcctaaaaattttaggggatgcaaactgtcatttccccttcagttatgtaaataattgaagaaaaatctggtttcttctcttcctgatctatctaggtgagaagagatttgtagaaataacctgcacaacccttttaggctgctttgagcaaatccaagaaggaaagcagagacttagcacatttggtataatgcagccacatcttagatgaatatatttttggttatttccatttatgtttcctctcgtgctgctgagatctatttgctctatggttaaaaagttcaatagttcctgaggacagcatcatatagaggaaagagggctttgagtctgacatatttgggtttgcataccagtcttatcatttaccagctgcgtgaccttgaggaggcagcttaacttctcttagtctctgttccctcatctgtaaaataggattagtagtgctgcaccttacaaggttgtgatgagaattaaatgacacaatgtatgaaagtgctgccattgtgcctggcacaggtagaagtcactggataagaagtagctaattttaatgtatttcttgagactgctgaagcaatatctcaaataatacatacgctacacaaaatggaataaagtttctctggaaaagttcaagtatctctatgagatccccagttatttttataagtaccgatctctaaactcatgtgtaaagtaaaaaattctgccatataaactctacatattatataatttttctataactacctttgctagaaatttatctgaatattccaaacaaaagtgttaatgatggttaaacaaaaaaactcggtgttgtttggagggctgtctgtcctgtgtgttgtaggatgtttagcagcatctctggcctccactcactagatggcagtaacaccctctccccagttgtgacaaccaaaaatgtctctagacgtggccagatgtctcctgggtgcatcaccttggttgatctctactgctagacctatcgtatatgtcaagaacaacaaagctgtatggaaatgtgagtgctgactggacagctatgccctcctgttaacttaagacaattcaaattgtgctttagtaagaggactaatcaatactagtgttgggccttcaggattcttggcaaacacactccaacatgtgtgctaatggtctcatactttgtaggaagggaagaaaataaggaaagcacataaactagcaaaaatctatagctcatgaacttggtttagtgtggacaaccctgttcttttcagaactatttaatcattaatagttcttaccaagtagaagtgatcccaggcaaagaaacaactttccaatgcattcaagagagaatcatacggacaaccatcattctcagcagctcattaaatgcaaatacacacacgcaaagagagagagagaacacattttacatagttttccagctgttgttagtgtcacttaaaactgatctctgctggtagtattcagttgtgagtatagcaagacactgcataggagcattttttttctaaacctttagctaagatttggaaacccaatatttcctaagtagtgaatgtggtctatttatagtaattagcttaggtgacacaccaaacatgatgagttgctcattcaggatagccggtccattgcacaaatgtgtaatatcaggtactctcatgccactcattgcctgcatcagtcagtcatgacctttgcatcagcctttcaatagacagtcatcaggctagtatcttatctcatcactacttgacgatgagttcgccgaattagactgttctataccagtacaacaaccaaaatactttctcatagattatgcataaatacgcaattttgtccatgtcaatgaacctaacaagaatgctttttaaaagtatattttagattcaaacatgctttctagatcagaggttaacttgtctttttgaaatcctggagtcacttataagttagctgcaaactgtagtttcggtagttcaactgcttaagcatttctggactgtttatcaaaatatattacagaatgtgagactaaagtttaaagtctggacctttggtttaatttctagactttccaaagcttttttttttctttttaaaaagcccattgtcaactctcttagaacttcatcaagtaaatggtaccttgcaaatgtaggttgtgtctgaccttctttctttttgtgtgttggtgcctcagatgtatcatgtgctgcttgaactgattctctacagtgttccttcctagtctcaagctgatgatgtgctcaaagatgtatcaaaatccatgtaatgacaccttttagatgtttctaatatgtcaataaatgatatattgc

SEQ ID NO: 435 - DNA, 3443 bp, Homo sapiens
aggtgagtaggggctgaatgcggctggagaggctgccggacgggcgtggccgggagggaaatggggctggattccagagcatcggacctggccgccagaaccggccgtttctatcccaggcaatcggactctgggtgccggagccacgccacgtgtggccgagggctggcggggcctgcccccgagggagcgctgagtcccggaggtggtcgtttctggggagggggctgtggggctcgtcccacctgcccccttctttccagcacttgcatggcgcttccctctattttcactcttggcggccgcccacacgttgcattcctcctcctttcttcttcttgctgtcctccatcctccattccgtccaattcctctcccagcccctggggagcctaccttaggtctgactctgaaccccgatctgctctgagtgtgtggatttccttcagctaccctgatgtccccacttcccagccctgactcctttgagccatcccagggggtgtccagccactggcccacaggagcagaggccaggctgtgactgtgtgactagaaaggtgtgtgatgtgtgtgtgggcgtgcacacgagtgtgagagtgtaagcatggcaccctggcccgggctaggacaggagcagctggggaagcagcctgggccgtgggcaaactgatggcttttttcctccccccaaccacccccccccgcgacttctggccctacccagtctaaaccaatgtggtaggggtggcggcaggggcagggatgggagtgcttgaagcctgcttcattcccaaagatttctagggaaaagctttctactacatcctttggcttgaccttcttgacccatgactctctttcaaggaagttcactccaattcccagtctgccctgtttccactggccacattctctaaggaagaacacagcagaacaatagcatctgttttgtttctgcatggctggagggtagggctgtcggtctagcacccataaaccaaaatgaggcagggattggggcttgccctatgatgctctgatgaccaaagcagatgcgtagaggcaagcagcatggtattgggcaagaggactggactgggagtccagagatgctgcttcaccctgggcctttagacacgtctctttccctcccagagcctcagcatcccttctatcaaatgatgacattctgcctttttcccagggcggttgtggggatcgagggagacagtggctatagggatgctgtgttaactgcagatgcagccgtaggagcactttgctaactgccaacgtgagttcagattcttcagggtatttggcacccaggtctatggtgcggtgtgagatctgtgatgtaaggtttgatgcctgccccaactccagtcttgctaacacacatgaaacatttggcaaatcatgaccctaccttggggaaaagagcagtctgggagagcttcttcaaggcaacctgacttcagtgcagtctgaggcatggctgagataggcttacgtggcaaggaatcaggagggtatctgggccaagagctgcagtgtgggcagaggtgtagtgtgggctgcaacgaggacagccactggacaaagcagagaacagagacagaatgaggaagagctctgtgggcagggtggggcgcaaggtggagaaccttcaaagtctgaaaagtttgacttgttggggctcaatgctgtgggcagtagggaaccacagaaggctcttaggtggagaaatgacagctggactttagcgagcaagccctatctccatgagcagcacgggtgatcctctaagcacaccaggcacgagtgtgcagggagctggtgcaaatgcctctgtgtgcgggtgagcttctgtgttgtgactctgcccacacgtgtgcttcagtgtgctgagtggctgcatgccccagatccatgctgcacgcgccgccggccagtgagggtgctgggcactgggaggtggcggggaaggaggcgtatgcgtgttgtttgtgggcatgtgtgttagcgtgtgcatgtgggccatggggcctcacagcatgtgtgtgcacgcccgggcgtgtgcgtgtgtgtgtcccccacccccaggccggccccacccgtgcgtgtgaactgccatgttgatttcgtgctgtctttcagaatcactatcagtgacccctgaggagcgtcagccatgcaggaagggcccagcctcacctacgagacctgcagccccccgaccagctgaggctcccctcttagacttataagtctatggccactggcatccggctgcctgccctccctgcctcccccagggtcccttcagagggtcctgggttttctgaacacccagaggggcctccggcgctccctccagccatcccttttagtttcaccctcctggttcaagcagtgttctttctctatcaggcctggtggctgttgcatggggctccccaaggcaaggggtggccccaggccagtgggttggaagacagggtgaccagagaagagggaagcccgagggggccgagcatcagcctgaattgcgggtgccctgcctgggtgccgtgtgagaggccagcgtgtgtggggtggggagggccgccacagcccccaggcgctatctgtgaagctacggctcctccctccatcttcctcccctttcccttccagccccttttccaggaaccttgccacacccacacctgcagcctcccctccccggccctcccaccactgctgcggcgcggccggccccggccgtgtgctgcgcttgccttaccagctctctcctcgcttttctctcccgttttctctctgctttctctccaactgccagccgatcgggtcaggcaagtccatcccgtcctgagagccccaggccccccttcgacctctaaacagatccctcctcttctcggagacctccctttccaagcctgcctggacggctgttctgtgacttgacagtggctcccccagccccaaagccagcccccttcatctgtgacttaatctgttgtagtggtgagctgatacattcaggtgtgaccgttggtgaaaacttgtgccccttctgtggtatgcccttgccctgttctataaatatctataaatactcatatatatacacacctacacatggccaaccgcctcgcctctagcgctgggaatcagtcactgtgctatccttgtggagtcttgtggcccaactaccagagaacgctgtcccccgacatcccactccaaagtgtgccacctccagtgagcctccttgtcatgcccggcctgtggacagccagcccccgccatccctcccaccccctaccaagcatgggggtgctgtgcaggcagccgtgtggcctgacagtttctaccagtcctgctgtccctcggctgagaataaaacccatttctggatgatggggaatgtc

SEQ ID NO: 436 - DNA, 4057 bp, Homo sapiens
ctgttaatagagttatggaatcattgagctaaatgaagtttgcatatgaacaaatgaatgaattggctacaaattgatatgatttatagaaactctgttcgaaagtattggggacttgatgtttaaacattattttagtaaaaattcctataaccatgtatcatctgtaggattgatttggtacctatttctcctgttggaccatgagttcctccagagcagagcttttgtcttagactattttatttctatttctatttcttttttttctttctttttttttttttttttgagacagtctcttgctctgtcacccaggctggaatgcagtggcatgatctcggctcactgcaacctctgcctgcagggttcaggtgattctcctgcttcagcctccccagtagctgggacaggcgcatgccaccgtgcccggctagtttttgtatctttagtagagacagggtgttggtcagaccggtcttgaactcctgaccttgtgatccgcccacctcggcctcccaaggtgctgggattgcagatgtgagccaccatgcccagcctagactgttttatttcttaagcactgttttcctaatttcttaagcactgagctcccttaaaattcagcaaatgtttgttaatgatgatgaatattttactaatttctttaaaaacatattttcaattgaagttgcaaaaccttggaacctcttaatttatatcttgcataaatgacaatttgttaaagttaagatacattgctgtggaaatctatgtatttctttactgcaaaatagtattaaaggaaactaaatgaatttcaagaatatgagctttataatttaatttttaggattcgctaaatattgtaatggatcaaggagatacacctacactagaggaagatttgaagaaacttcagctctctgaattctttgatatctttgagaaggagaaagtagataaggaagctctggctttatgtacagaccgagatcttcaggaaataggaattcctttaggaccaagaaagaagatattaaactatttcagcaccagaaaaaactcaatgggtattaagagaccagccccgcagcctgcttcaggggcaaacatccccaaagaatctgagttctgcagtagcagtaatactagaaatggtgactatctggatgttggcattgggcaggtgtctgtgaaatacccccggctcatctataaaccagagatattctttgcctttggatctcccattggaatgttccttactgtccgaggactaaaaagaattgatcccaactacagatttccaacgtgcaaaggtttcttcaatatttatcacccttttgatcctgtggcctataggattgaaccaatggtggtcccaggagtggaatttgagccaatgctgatcccacatcataaaggcaggaagcggatgcacttagaactgagagagggcttgaccaggatgagtatggaccttaagaacaacttgctaggttcgctgcggatggcctggaagtcttttaccagagctccataccctgccttacaagcttcagaaacaccagaagaaactgaagcagaacctgaatcaacttcagagaagcctagtgatgttaacacagaagagacctctgtggcagttaaagaagaagtcctgcctatcaatgtggggatgctgaatggaggccaacgcattgactatgtgctacaggagaagcctattgaaagttttaatgagtatttatttgctttacaaagccatctatgctactgggagtctgaagatacagtattgctcgtcctcaaagagatctaccaaacccagggtatcttccttgatcagcctttacagtaaaaatgacccatctatggctgcttaatacggacattgagggatccttccccagaaaatccacctgtttgttgctgcaattttcctctcctcagctgcgtcatttcctgcatgttgcctgccacttactcaccactggggtctttggaagataatcttcctctttggaaatgaatggaaaagcaaaaggccctattacttttaaccactggcttcatataaacacttgccatttttttctgcatagctgggggtggtttgtgtctttaattctttgatgatagtttatagttgccacactttattgattagtacttgacagggtgtaaagcctattttgggtttgatttgttttgggtggggtagacatgtttttaaggaacttattgcttatctttagaaaatgttctagtttggaaacagattcttgagattcagaaggcattttggagtacacttatctcttgtttgtgttgaactgaaggctaagtctcagtggacatggaaaagacttttgggtgatttatttttgaacctgcatttctttcttatgtgtagtgtatgaagaaagactagaatgtagctttaaaaaagtgttgtttactcttttagaactgacagacttattgccagaaatcactgatgttcattgtttttgcaactgtttgagctgctgtaagagtctaaagttgacaagttagttcatgttaggtgcatctttataaagcaaagatgttgtatatcctaggcctcccttttatatttgatagaagttatttgctaatagcttctattcttacgttgaaaatagttgtaaaagctgatgaacctgaaattgtgtagcctctacaggctgctgaggttctaaataaaaccttttagtggtgcctttatggtgaaacagaatttgtcacctgccatttctacttgagctaaggtagtattgtgtatcctctttccttcttaggtatccataatccacaaagcatatttaaaaggctcttggcacgggcagcattggttgagcaggtaggtttggctagggggaaatgtttaacttgttctgaaagaaaaacttatgtctgtagggtccaagaaacagctattccagagtcagtgtcagctgagtctggaacatatgaagtgaggtttacttctaagaacacaagtgactgcacactaattttgtcaaggcatcttttcactactttgctgtagatttttcttcttcattggtcagtttgtcattgtctttgtagttctctttatgataatcctttatacttgctctcagattccacaggcctctgtttatagagtggcaaaggcaggcgagctgtggtttattgtttataaatttttttataaatgttatggtattcaaagccactgacatttaatatttactgaagccattccttagacagcagtggtctttatccctttctggaaagaaaaggaaaatgaagggtaattactgtcaccatggagattgtagaggtaaggttggggtataggtcaggcctggcctttctttgtcatctgcttatagtctagtgctaagtatgccactaagtttcagatatatggaatactttatttttttaaaggtatataaactctgagttattgagaattaagtattcactgtatattaaggggaagcttttgccaagttgtggtcttcaaatttatgtttactcttcctattggcagaataggtgctatttaagagtaaaccaaaggataagcagagggagtccctataaccaaagatggacagcatagccctggatagccagataaaccactctttgtattaagaaatgtttctttcctagtggtgaggggtgggtaactgtgaaagagctttatatcttgtctattcatggtattatagctgtatattcccaggatgataagcttgattgaaatcctgtatttagtcatatattatttgcgctgcttcatttgtatcatgtgcaatctctagaccaaccctatttttaaactctggtacagcatcattttgtacatattcccagctgcagaactagtatcacttatctcagcaaaagagattgtttgcatggaaagattaatagcactgattagatttctaatattttgcatttttgaaatgtttgttttctacgtgattatatttaaaactttagtaaatactaacatgaaacc

SEQ ID NO: 437 - DNA, 3604 bp, Homo sapiens
ctttgggtagcaatgactgagcaaatagagggagtggaatgtttaggaatgtgctttcacctaatatcataacagtgagactccttggataaataggagtgggtgcattctcctcgctctcagatcaggaaactagagcaactgccccaagcagcatggcgggaagcgtgttctttgtaaattgttcttttcgttacattcgttaaaaggccttgtgtttttcaatctggggggttgcatgggacattttgagttcaaagacaccacgatgaggcacgaagaagatagaaagccagaaggaagaaatgccagggagttcccaccttgagggtctgtctagccacccctcccagaggattggtccttataggcaatgccatctccatggggccagaccctacctgtccagatggaaagctgcgatctcagcattgtgtctctgaaagtcaatgaagtagaagaagtccactggtgtctcctcatctcgctgctgtctggaaggaaggaaggaatcacgccctggactcagacttcagctgggagcctgagaagagagctgatgagcatgaccagcgagaaaggaaaacgggcttttatgcttttcatgtacacacaggcgatggcacggcaagtcaggaatggcctgtggctcccttcgccaggagaagacaagcaaagtgggaggagacaggcttcttgcaagacactgtcctgcaggcaccaccaataccaagtttcctgcttaagaagctttggtgacagtggctgattattttcaaaacccagcagttgagagggaagaaatagacattcttctgcaggtataaacagaagagaggggaatggttagcagaaccagaggtagtgcagatccagatgtccaaggatgaagaaaggtggggtatgagccaggaattggtaatggaaaagtggcccagaaatgcaacttagtatgctggggttgaagaacagaaaagttctgggtcttagggggatgtgggggaaatacgtggaccatcatcccctcagagaaacacagccggatcatgagggctgggggcagctggtgcagaggatattgatttatatacattaaatctctaatgaattcctgaaaagcgccaggctgcctgggagtggtggggcctgctgggtgtgtacattcatgaaagtgctttttaatccttaagggccttgtggtgtgagttctggcctctaggctgactttgcctcgaggctaataaacatggaagaatgatgatcttcgaataattttataatccactgtgtgggactgttgaaacgactgcaaggcgatttagatgtaaataaacgtgatgttgcagaaatctataaataagaagcactggcaatttaaaccgtgttgtgcattttgccaaaaaacacgagtgagtcctggaaaccacagtgaggtgctgccaaaagtagagattctattttaaaaggtgcagccaccgttacagcacaaccctccgtgctcaggcctggccagcttatcatcatcactggatgtccaggctagcaaggacaatccctcttcccagtctcattttaattcctgagtcccatctgtaggaacatatcatctttcagacaccttttaggttcttctaaaacattttctcatttttgtatgatgtaagataagaagtaattttaaattcaaaggttgtttttactttagatcagtgcttctcatactttgagaagcactaatgcacgtctcattgcacattatattgtatacattacattttaaaaatataaatctttatgttcctaatgtatattttccaaagttaaagttctacattctctctttaatcagaaaaaaatggtgttcgccttaaattacttacagaaaaatacaaagcgcataatttttcaagagatacattttaaaatgatagtattttagatttgggactgaattttataaaaatgtagattacactgtgttatggtatgaaaatagataaaattggtcctgtcactgaatgttggagggttttgcattgtatttcggaaaaaagctggctagttggaacaatttttgtatagacacacttcggagatattgcaggtttgcttctagaccaccacaatgaagcaaatatggcaataaagtcattcatgcacattttttggttccccacccaaggcatataaaagttacgtttcattatactggagtccaataaatatgcaatagcattatgtctgaaaaatgtatacatcttaatggaaaaagcactttattgctaaaaaatgctaacactcttctgagccttcagcaagtcataatctttttgctgactgactggggtggtggttgctgaaggttggtgaggctgtggcaacttttaaaaataagacaataatgaagttcgctgcatcgattcacaaaagatgtatctgtagcacgcaatgctgtttgatagcattttacccaaagtagaacttctgtcaaaattgaagtcagtcctctcaaaccctgctgctgctttatcaactaagtttgcataatattctaaatcctctgtggccatctcaacaatgttcacagcgtcttcaccagaagtagattctatctcaagaaaccactttctttgcttatccataagaagccactccttattggtcgggtgcggtggctcatgcctgtaatccaagcactttgggaggctgaggcaggtggatcacgaggtcaggtgattgagaccatcctggctaacacggtgaaaccctgtctctactaaaaatacaaaaaattagccaggcatggtggcgcatgcttgtagtcccagctacttgggaggctgaggcaggagaattgtttggacccaggaggcagaggttgcagtgagccgagattgcgccactgcactacagcctgagcaacagagcgagactccatctcaaaaaaaaaaaaaaaaaaaaaaaaaaaaagcagcaactctatctgttcaagtttgatcatgcagttgcaacaattcagtcacattttcagactccacttctaattctagttctcttttatttccacatctgcagttaccttctccactgaagtcttgaacccctcaaagtcatccatggggattgagatcaatcttcttttaaactcctgttaatgttgatatttttacctccttccacgcatcacaaattttcttaatggcatctagaatggagactcctttccagaaagttttcaaatgaccttgcccaggttcatcagaggaatcactaactgtggcagctatagccttatgaaatgtatttcttaaattgtaagacttggctgggcgtggtggctcgcgcctataatcccagcactttgggaggccgaggcgggcggatcacgaggtcaggagatcaagaccatcctggctaacacggtgaaaccctgtctctactaaaaatacaaaaaattatccgggcatggtggccggcgcctgtagtcccagccactcgggaggctgaggcaggagaatggcgtgaacccgggaggtggagcttgcagtgagctgagattgagccactgtactccagcctgggcgagagtgcgagactacggctc

SEQ ID NO: 438 - DNA, 3978 bp, Homo sapiens
atttcagcctgaagggaaaattggtaatcaagttgagaagtctatcaacaatgcttcctcagtttcaacatcccaaggaatttgttgtaggcccaaaacccatatttctaataagtatggaaataattccctccattcttcattactcacacaaaaacggaatgtacacatgagagaaaaatctttccaatgtattgagagtggcaaatcctttaattgtagctcacttttaaaaaaacatcagataacccacttagaagagaaacaatgtaaatgtgatgtatatggcaaggtatttaatcagaagcgataccttgcatgccatcgtagatctcacattgatgagaaaccttacaagtgtaatgagtgtggcaagatctttggtcacaatacatccctcttccttcacaaggcgcttcatactgcagacaaaccttatgaatgtgaagaatgtgacaaagttttcagtcgcaaatcacaccttgaaacacataagataatttatactggagggaaaccatacaaatgtaaggtttgtgacaaagctttcacatgtaattcatacctagcaaaacatactataattcacactggagagaaaccttacaagtgtaatgaatgtggcaaggtttttaatcgactgtcaacccttgcacgccatcgtaggcttcatactggagagaaaccttatgaatgtgaagaatgtgaaaaagttttcagtcgcaaatcacatcttgaaagacataagacgattcatactggagagaaaccatacaaatgtaaggtttgtgacaaggcttttgcatataattcatacctggcaaaacatagtataattcacactggagagaagccttacaagtgtaatgaatgtggcaaggtttttaatcaacaatcaactcttgcacgccatcatagacttcatactgcagagaaaccatacaaatgtgaagaatgtgacaaagttttcaggtgcaaatcacaccttgaaagacataggaggattcatactggagagaaaccatacaaatgtaaggtttgtgacaaggctttccggagtgattcatgccttacagaacatcagagagttcatactggagagaaaccatacacgtgtaatgaatgtggcaaggtttttagtacaaaagcaaaccttgcatgtcatcataaacttcatactgcagagaaaccgtacaaatgtgaagaatgtgagaaagttttcagtcgcaaatcacacatggaaagacataggaggattcatactggagagaaaccgtacaaatgtaaggtttgtgacaaggctttccggagggattcacacctggcacaacatcagagagttcatactggagagaaaccttacaagtgtaatgagtgtggcaagaccttccgtcagacatcatcgcttataatccatcgtaggcttcatactggagagaaaccttacaagtgtaatgagtgtggcaagaccttcagtcagatgtcatccctcgtataccatcataggcttcatagtggagagaaaccttacaagtgtaatgaatgtggcaaggtttttaatcaacaagcacaccttgcacagcatcagagagttcatactggagagaaaccttacaagtgtaatgagtgtggcaagaccttcagtcagatgtcaaaccttgtataccatcatagacttcatagtggagagaaaccttaaaagtgtaatgagtgtggcaagaccttcagtcagatgtcaaagcttgtataccatcatagacttcatagtggagagaaaccttaaaagtgtaatgagtgtggcaacaccttccatcacaattcaacccttgtaagtcacaaagccattcatactggagagaaactttacaagtgtaatgaatgtggcaaggtttttaatcaaaagacaacccttgcacgtcatcatagaattcatactgcagagaaactttacaaataggaagaatgtgacaaagttttcggttgcaaatcaaaccttgaaacacataagaaaatgcatactgaagagaaaccacacagatgtaaggtttatgacaagatttttgaatataattcatacctggcaaaacatattagaattcaaactggagagaaaccttacaaatgtgatgagtgtggcaacacctttggtcaaaattcacaccttgtaattcaaaaggcaattcgtactggagagaaaccctacaagtgtaatgaatgtggcatagtttttaatcaacagtcacaccttgcaagtcatcatagtcttcatactgcagagaaatcttacaaatgtgaagactgtgacaaagttgtcagtcacaaatcacagcttgaaagacaggagaattcatactggagaaaaaacatacaaatgtaaggtttgtaacaaggcttttgggagtgattcacacctggcacaccatactagaattcacactggagagaaaccttacaagtgcaatgagtgtggcaaagcctttagtgggcagtcaccacttattcaccatcaagcaatccatagtatagggaaacttgactaatataatgattgtcacaaagttttcagtaatgctacaaccatttcaaatcattggagaatccataatgagagatcttacaagtgtaataaatgtgacagatttttcagatatcgttcatatattgctattcatcatcgaactcatgctggagagaaaccttataaatgtcatgattgtggcaaggtcttcagtcaagtttcatcctatgcaaaacataggaggattcatacaggagagaaactcacaagtgtgatgattgtggcaaagcgtttacttcacattcacacctcaatagacatcagagaatccatgctggacagaaatcttacaaatgtcatcagtgtggtaaggtcttcagtccgagatcactccttgcagaccatcagacaattccttttggagacagttgtttcaaatgccatcagtatagcaagccatcaagcattaattgacattacagttaaatgagcactgacctgagtttgagttgacttaacattgagtttaagcattaattgacattaaactgtttatgttaagaggactgggctgggcactgtggctcacgcctgcaatgccagcactttgagaggccaagactggtaggtcactggaggttaagagtttgagaacagcctggccaacagacgggagccacttttcccagcctgtgttttcatttctattctttctttcttttttcttttttttgtttttgtttttgagatggagtctcttgctctgtcatccaggttggagtgcagtggcatgatcttgactcactacaacctccgcctcccaggttcaagcgatcctcctgcctcagtctcctgactagctgggactacaggtgcgtgccaccacacctggataattttttgtatttttagtagagactgggtttcactgtgttagcctggatggtctcgattttctgatcttatgattcacccacctctacctcccgaagtgctgagattatgggcgtgagccaccgtgactggcctgttttttgtttctttaacaaaaagttatggggatttctatgagtattgtgttgaatctaaatcacattcggttatataatcattgagcaatactaatttttccaatcaatatggattgtatgtgtatttatatgtttttaatcattttgatcaatgtttgtagatttcaaggtacaaacttctcacctttatatgtttattcctaaatatttcttactttaagctctttagcaaatggaagtggtttttaattttattttaaaattatttaatgttaatgtatggaaattcaactaatttttggtgctattattctattctgcaaatacactgaatatgtttattagttccagttgtattttggttgactgtgatattcttcacagatcatgtcatctacaaacaaataaaatttgacttctttctttctg

SEQ ID NO: 439 - DNA, 4854 bp, Homo sapiens
agtccaggtttcatctcggtttctctgccttccagcctcatccatgggacaacttccatatcctggaggcccctctgggaaacgctgccttcagcccatgaagtcgctccgctgtgcagtcgtgggcctgtagtaggcagctggagcgtggaccgttgggcttttgtaattaaacagcttttattgtgataaaatatttataatgtataagtgaccattttaaccattttaagtgcacagtttcatggcgttaagaacgttcatattgatgtgcagccatcaccaccctccatctccagaactttctcgtcttcccagatggaaactctgtccccatcccctccttctcctggcacacgccaccactctgctttctttttctatgaatgtgacaactctagggccctcacgtgaggtgagccatgcagtacatgtcctcttgtgtctggctgccttcaccgagcactatgccctcgaggtgcgtccgcgctgcagtgcgtgtcagaactccctttccaagcctgagtgtggacgggccacaccgcgttcatccctccaactgtcactggaccttttggtgccttccagcttttggctgcagtcaatgaggctgctctgggccttggtgaacaaccgtggcttttgccgtctggcagccccatgcgggtggcgctttgctctgccaggcaggagattggcggtgccatgttggtgcttttggtgaagaccagagtgttttcattgcttgccattgaggagtgtttttacttatggaaacgatatactgtctgtgaatatcctgctctaaaaattgataaccaggtcctgcccgatgggtgtttacaaatatttgccatatggaagtcatgaggggactcctgggtcacttacagagggaacagcctataggaggggtacttggcaggtggtggctggagtcccaagttcctgcccttcccaccaggctgcaagggtcaaactgacatctttgggacgagcacaggacatcatcctccagctcagtcccctttgctaaagacacactcaggaggggacagcaccttttgaaacctaactcctgcaaaggggtagatatgtaaacttggggtagccttgtgtcctgggggctaggctgacaaatatctttttaaagatcatctaactgctggggaggctgtctctttgaagatgatttacttcttctaactgggtttcatttttctctcctagcttatgttcctgaggaagaattgaaggcagcagaaatagatgaagagcacgtggaggatgacgggctgtctttggacattcaggaaagtgagtacatgtgcaatgaagagacggagatcaaagaggcgcagagctaccagaactccccagtcagctctgcgactaaccaggacgccggctacgggtcgcccttcagtgagagcagcgaccagctagcccatttcaaaggctcttcctctcgagaagagaaggaggatccgcagtgtcccgacagcgtctcgtacccccaggacagcctggcacagatcaaagctgtgtatgcaaacttgttctccgagtcctgctggtccagcttagctctggatttaaagaagtcgggttccaccaccagcaccaacgatgccagccagaaggagagctccgcccccacccccacaccccccacctgccccgtcagcaccactggccccaccacgagcacgcccagcaccagctgcagctccagcaccagccacagcagtaccaccagtaccagcagcagctccgggtacgactggcaccaggctgcactggccaagacgctgcagcagacgtcctcgtatgggctgcttcctgagcccagcctgttcagcaccgtgcagctctaccgccagaacaacaagctctacggctccgtcttcacgggcgccagcaagttccggtgcaaagactgcagtgccgcgtacgacacgctggtggaactgacggtgcacatgaacgagacaggccactaccgtgacgacaacagggacaaggactccgagaagaccaagaggtggtccaagcccaggaagcgctccctgatggagatggaggggaaggaggatgcccagaaggtgctgaagtgcatgtactgtggacactcctttgagtccttgcaggacctcagcgtccacatgatcaaaaccaagcattaccagaaagtgcctctgaaggagccagtgccagccatcaccaaactggtcccctccaccaaaaagcgggcgcttcaggacctggcgcccccctgctcccctgagccagcaggaatggccgcagaggtggccctgagtgagtcagccaaggatcagaaagcagcgaacccgtacgtcacgcccaataaccgctatggctaccagaatggcgccagctacacctggcagtttgaggcccgcaaggcgcagatcctcaagtgcatggagtgtggcagctcccacgacacgctgcagcagctcaccgcccacatgatggtcaccgggcacttcctgaaagtgaccacctcggcttctaagaagggcaagcagttggtgctggaccctgtggtggaagagaagatccagtccatcccactaccgcccaccacccacacgcggctgccggcctccagcatcaaaaagcagcccgactctcccgcggggtccacgacttctgaagaaaagaaagagccagagaaggagaagccgcctgtggctggcgacgcggagaagatcaaggaggagagtgaggacagcttggagaaatttgagcccagcaccctgtacccgtacctgcgtgaggaggacctggacgacagccccaagggagggctggacattctcaagtccctggagaataccgtctccacggccattagcaaagctcagaatggtgcgccctcatggggtggctaccccagcatccatgcagcctaccagctcccgggcaccgtgaagccactgccggcggccgtgcagagcgtgcaggtgcagccgtcctatgctggcggcgtgaagtcgctgtcttccgccgagcacaacgccctcctgcactccccagggagcctcacgcccccaccgcacaagagcaacgtgtctgccatggaggagctggtggagaaggtcacgggcaaggtcaacatcaagaaggaggagagaccccctgagaaggagaagagctccctggccaaggctgcgtcccccatagcaaaagagaataaagatttcccgaaaacggaggaagtcagcggcaaaccacagaagaagggccctgaggccgagactgggaaggccaaaaaggagggaccgctggacgttcacaccccaaatggcacagagcctctcaaagcaaaggtcaccaacggctgtaacaacctggggatcatcatggaccgctcaccggagccttccttcatcaacccgctgagcgctttgcagtccatcatgaacacccacctgggcaaggtgtccaagcccgtgagtccctcgctggacccgctggcgatgctgtacaagatcagcaacagcatgctggacaagccggtgtaccccgccacccctgtgaagcaggccgatgccatcgaccgctactattatgaaaacagcgaccagcccattgacttaaccaagtccaagaacaagccgctggtgtccagcgtggctgattcggtggcatcacctctgcgggagagcgcactcatggacatctccgacatggtgaaaaacctcacaggccgcctgacgcccaagtcctccacgccctccacagtttcagagaagtccgatgctgatggcagcagctttgaggaggcgttggacgagctgtcaccggtccacaagagggagggccggcagtccaactggaacccgcagcaccttctcatcctgcaggcccagttcgcctcgagcttgcgggagaccacagagggcaagtacatcatgtcggacttgggcccgcaggagagggtgcacatctcgaagtttactgggctctccatgaccaccatcagccactggctggccaatgtgaagtaccagttgaggaggacagggggaacgaaattcctaaagaacctggacacagggcatcctgttttcttttgcaacgattgtgcctctcagttcagaactgcttctacatacataagtcatttggagacacacttgggcttcagcctgaaggatctctccaagctgccactcaatcagattcaagaacagcagaatgtttcgaaagtcctcaccaacaaaactctgggcccactgggggccaccgaggaagacttgggctccacattccaatgtaagctctgcaaccggacttttgcgagcaagcacgcagtcaaactgcaccttagtaagacccacggcaagtctcccgaggaccacctgatctatgtgactgagttggagaaacagtagcgtccaggtatgcaagagaccgcggaacattgcactaaacgtcgtcgagctgcactaggcctggcctgagcctctgaaatcagtctttcctttgttgctggcccgcctctctggaccttggttttcttacacatattttgtatatttatatgctctctgtccgatctgtgcatgttatttttctttttccgtgagtcaaagtctgacctttattttcaacatctgttcttggtgttaagctatcttttgtaggaaatagtggggcacactactcagagacattatttagcagtaaagaaagacacaaataacaatgataaaaagacatcctaaaatggtgaagttgccatgacaataaaggtcatagaacctggtagtgtcaaatttaaccctttgaggactgtaattgcatttctgtgcctttcacttg

SEQ ID NO: 440 - DNA, 5008 bp, Homo sapiens
aagtaccaaggtctgcggcaggaggagaccggctcacaggagcagcagcattggaagaggcacccagcagcctcccaggcatcctggagggtctgctccctgtctttccaaggatgagtctccaggagatgttccgcttccctatggggctcctgcttggctctgtgctcctggtggcttcggccccagccactctggagcctcccggctgcagcaacaaggagcaacaggtcactgtcagccacacctacaagatcgatgtgcccaagtctgccttggttcaggttgacgctgaccctcagcccctcagtgacgatggggcttcgctcttggccctgggggaggccggggaggaacagaacatcatcttcaggcacaacatccgccttcagacgccacagaaggactgcgagttggcaggcagtgtccaggacctcctggcccgggtgaagaagctggaggaagagatggtggagatgaaggaacagtgtagtgcccagcgctgctgccagggagtcactgatctaagccgccactgcagcggccacgggaccttctccctggagacctgcagctgccactgcgaagagggcagggagggccccgcctgcgagcggctggcctgccccggggcgtgcagcggccacgggcgttgcgtggacgggcgctgcctgtgccatgagccctacgtgggtgccgactgcggctacccggcctgccctgagaactgcagcggacacggcgagtgcgtgcgcggcgtgtgccagtgccacgaagacttcatgtcggaggactgcagcgagaagcgctgtcccggcgactgcagcggccacggcttctgtgacacgggcgagtgctactgcgaggagggcttcacaggcctggactgtgcccaggtggtcaccccacagggcctgcagctgctcaagaacacggaggattctctgctggtgagctgggagccctccagccaggtggatcactacctcctcagctactacccactggggaaggagctctctgggaagcagatccaagtgcccaaggagcagcacagctatgagattcttggtttgctgcctggaaccaagtacatagtcaccctgcgtaacgtcaagaatgaagtttctagcagcccacagcatctacttgccaccacagaccttgctgtgcttggcactgcctgggtgacagatgagactgagaactcccttgacgtggagtgggaaaacccctcaactgaggtggactactacaagctgcgatatggccccatgacaggacaggaggtagctgaggtcactgtgcccaagagcagtgaccccaagagccgatatgacatcactggtctgcatccggggactgagtataagatcacggtggtgcccatgagaggagagctggagggcaagccgatcctcctgaatggcaggacagaaattgacagtccaaccaatgttgtcactgatcgagtgactgaagacacagcaactgtctcctgggacccagtgcaggctgtcatagacaagtatgtagtgcgctacacttctgctgatggggacaccaaggaaatggcagtgcacaaggatgagagcagcactgtcctgacgggcctgaagccaggagaggcatacaaggtctacgtgtgggctgaaaggggcaaccaggggagcaagaaagctgacaccaatgccctcacagaaattgacagcccagcaaacctggtgactgaccgggtgactgagaataccgccaccatctcctgggacccggtacaggccaccattgacaagtacgtggtgcgctacacctctgctgacgaccaagagaccagagaggttctggtggggaaggagcagagcagcactgtcctgacaggcctgaggccaggtgtggagtacacagtgcatgtctgggcccagaagggggaccgagagagcaagaaggctgacaccaacgccccgacagatattgacagccccaaaaacctggtgactgaccgggtgacagagaatatggccacggtctcctgggacccggtgcaggccgccattgacaagtacgtggtgcgctacacctctgctggtggagagaccagggaggttccggtggggaaggagcagagcagcacagtcctgacaggcctgagaccgggtatggagtacatggtgcacgtgtgggcccagaagggggaccaggagagcaagaaggccgacaccaaggcccagacagacattgacagcccccaaaacctggtgaccgaccgggtgacagagaatatggccactgtctcctgggacccggtgcgggccaccattgacaggtatgtggtgcgctacacctctgccaaggacggagagaccagggaggttccggtggggaaggagcagagtagcactgtcctgacgggcctgaggccgggtgtggagtacacggtgcacgtgtgggcccagaagggggcccaggagagcaagaaggctgacaccaaggcccagacagacattgacagcccccaaaacctggtcactgaccgggtgacagagaatacagccactgtctcctgggacccggtgcaggccaccattgacaggtatgtggtgcactacacgtctgccaacggagagaccagggaggttccagtggggaaggagcagagcagcactgtcctgacgggcctgaggccgggcatggagtacacggtgcacgtgtgggcccagaaggggaaccaggagagcaagaaggctgacaccaaggcccagacagaaattgacggccccaaaaacctagtgactgactgggtgacggagaatatggccactgtctcctgggacccggttcaggccaccattgacaagtacatggtgcgctacacctctgctgacggagagaccagggaggttccggtggggaaggagcacagcagcactgtcctgacgggcctgagaccaggcatggagtacatggtgcacgtgtgggcccagaagggggcccaggagagcaagaaggctgacaccaaggcccagacagaactcgaccctcccagaaaccttcgtccatctgctgtaacgcagtctggtggcatattgacctggacgcccccctctgctcagatccacggctacattctgacttaccagttcccagatggcacagttaaggagatgcagctgggacgggaagaccagaggtttgcgttgcaaggccttgagcaaggcgccacctaccctgtctcccttgttgcctttaagggtggtcgccggagcagaaatgtatccaccaccctctccacagttggtgcccgtttcccacacccttcggactgcagtcaggttcagcagaacagcaatgccgccagtggtctgtacaccatctacctgcatggcgatgccagccggcccctgcaggtgtactgtgacatggaaacggacggaggtggctggattgtcttccagaggcggaacactgggcagctggatttcttcaagcgatggaggagctatgtggaaggctttggggaccccatgaaggagttctggcttggacttgacaagctacacaacctcaccaccggcactccagcgcggtatgaggtgagagtggatttacagactgccaatgaatctgcctatgctatatatgatttcttccaagtggcctccagcaaggagcggtataagctgacagttgggaaatacagaggcacggcaggggatgctcttacttaccacaatggatggaagtttacaacttttgacagagacaacgatatcgcactcagcaactgtgccctgacacatcatggtggctggtggtataagaactgccacttggccaaccctaatggcagatatggggagaccaagcacagtgagggggtgaactgggagccttggaaaggacatgaattctccattccttacgtggagttgaaaatccgccctcatggctacagcagggagcctgtcctgggcagaaagaagcggacgctgagaggaaggctgcgaacgttctgatggcccgtgtgagcagtcctcgcaggagacaccaccagctgtgggagcttggggcggggtgggtagtggtcactgcggtctgggagtgctcagatagcccgcagaacaaatcatgtcaccaagcttcaagccatggaggttccttccctctcacctgcatttttgcccgtctttatgagggtcttgaaaatcaaaatagtagttgcacagtatgtgtaggaaagacagtactggaacggcaaggtttctcagcttatcttcagcaacatatatactggattagggcaagagaaggaatcacccagcacttcaccagttggaaatctctggaaatttacatctatgtatttaaagttctgctaatgcaaatcttttctctggaaagaagcacagaggaggagttctgatgacccaggggttagggctgagacaaccggacgtttgtcacctcctttcccattgggtttttaggaaaacagtgtgaacctcccccttttaatttctggtgttatgaggaagaataaaggggataaaaggggctaagatggactcatgtttagctaagttctgacttgtatccagcatgctggagaccaaagctgccgccttactgctatttttaagtgccctcttttcagtcatttgcataattgcgtccatagagctgcatatgttgtgaataaattctcactcatttcaactttgaataatttgactgtcttgataattggttcctcccaaagactcttctgcaactcccattcatgcccaccaggcctcagactccctcttttccccgccctgcactattggagccctgggttttgtgggagtgctcagcaccgtgagtcttactgtttgatcggacagttagcaagatcagatcctttttgcttattttctatcactttggagggttttctgtagcaaaatcagtgaccaatgaagtaacttaaattcctattgaagaaaaaaaataataaaccacttgattt

SEQ ID NO: 441 - DNA, 5734 bp, Homo sapiens
aaaacaccatgccctgccatctctgggtcttagagtcaccctaacatctgatctagattaattatcatcatgtgcgaggttttggcatgaagcacgccaggctcaccgtttcatgagcttagactatttacagcaaactcaaacagctcacttgctttttacaccctgcaaagaccaagggagagcctggaggggttgtttttttttctgttttattctatcaaagcagcaaatactgcaatttccacagtaaatggtcacagtggggaccaatatcctgccctccagacccgctgcatcagccaatacagcaagggaagacgcagctctgttttctagaaggatcccaccgaggcataaaaacggcgcagcccagcctggcgccgcgccgggtcccggagccccgggcgcgaacatggggaatgcgcactccaaaagcggggacaggcacagcgcgctccccggccgccccgagctgtctttttacggctctttccccaggaaatggagcgagaacgtcttcttggataacgagctgctgacctccaagatcctgtctatgctgcggccgcagtcggagcggggcttccgcgccggggacctccgctacccgacccactttctcagcaccaactctgtccttgcctctgtcacagcctcgctcaaggagcacccccggggcaccctcctgtccgatggcagcccggccctgtccaggaatgtcggtatgacggtctctcagaaagggggtccccagccaacaccgagcccggctggccctgggacgcaactcggaccagtcacaggagagatggatgaagccgattctgcgtttttaaaatttaagcagacagctgatgactctctgtcccttacatctccaaacaccgagtccatttttgtagaagatccctacaccgcctcgctgaggagtgagattgagtcagacggccacgagtttgaagctgagtcctggagcctcgccgtggatgcagcctacgccaagaagcaaaagagggaggtggtgaaaagacaagatgtcctttatgagctgatgcagacagaggtgcaccacgtgcggacgctcaagatcatgctgaaggtgtactccagggccctgcaggaggagctgcagttcagcagcaaggccattggccgcctcttcccatgcgctgacgacctgctggagacgcacagccacttcctcgctcggctcaaggagcgccgccaggagtccctggaggagggcagtgaccggaattatgtcatccagaaaatcggcgacctcctggttcagcagttttcaggtgaaaatggggagagaatgaaagaaaagtacggtgtgttttgtagtggccacaatgaagctgttagtcattacaagttgctgcttcagcaaaacaagaaatttcaaaacttgatcaagaaaattggcaacttctccatcgtgcggcggcttggcgtgcaggagtgcattctcctggttacacaacgcataaccaaatacccagtgctggtggagcgcatcatccagaacacggaagctggcactgaggactatgaagacctgacccaggccttgaacctcatcaaagatatcatctcacaagtggacgccaaggtcagtgagtgtgagaagggccagcgcctcagggagatcgcagggaagatggacctgaagtcttccagcaaactcaagaacgggctcaccttccgcaaggaagacatgcttcagcggcagctccacctggagggcatgctatgctggaagaccacatcagggcgcttgaaagatatcctggctatcctgctgaccgacgtacttttgctgctacaagaaaaagatcagaaatacgtctttgcttctgtggactcaaagccacccgtcatctcgttacaaaagctcatcgtgagggaagtggccaacgaggagaaagcgatgtttctgatcagcgcctccttgcaagggccggagatgtatgaaatctacacgagctccaaagaggacaggaacgcctggatggcccacatccaaagggctgtggagagctgccctgacgaggaggaggggcccttcagcctgcccgaagaggaaaggaaggtggtcgaggcccgcgccacgagactccgggactttcaagagcggttgagcatgaaagaccagctgatcgcacagagcctcctagagaaacaacagatctacctggagatggccgagatgggcggcctcgaagacctgccccagccccgaggcctattccgtggaggggacccatccgagaccctgcagggggagctaattctcaagtcggccatgagcgagatcgagggcatccagagcctgatctgcaggcagctgggcagcgccaacggccaggcggaagacggaggcagctccacaggcccgcccaggagggctgagaccttcgcgggctacgactgcacaaacagccccaccaagaatggcagtttcaagaagaaagtcagcagcactgaccccaggccccgagactggcgaggccccccaaacagcccggacttgaagctcagtgacagtgacattcctgggagctctgaggaatcgccgcaggtggtggaggcgccaggcacggaatccgatccccgtctgcccaccgtcctggagtcggagcttgtccagcggatccagacactgtcccagctgctcctgaaccttcaggcggtaatcgcccaccaggacagctatgtggagacgcagcgggctgccatccaggagcgggagaagcagttccggctgcagtcgacgcgtgggaacctgctgctggagcaggagcggcaacgcaacttcgagaagcagcgggaggagcgcgcggccctggagaagctgcagagccagctgcggcacgagcagcagcgctgggagcgcgagcgccagtggcagcaccaggagctggagcgtgcgggcgcgcggctgcaggagcgcgagggcgaggcgcggcagctacgcgagcggctggagcaggagcgggccgagctggagcgccagcgccaggcctaccagcacgacctggagcggctgcgcgaggcccagcgtgccgtggagcgcgagcgggagcgcctggagctgctgcgccgcctcaagaagcagaacaccgcgccaggcgcgctgccgcccgacacactggccgaggcccagcccccaagccaccctcccagcttcaacggggaagggctggagggccctcgtgtgagcatgctgccatccggcgtggggccagagtacgcagagcgccccgaggtggctcgccgggacagcgcccccaccgagaaccggctggccaagagcgatgtgcccatccagctgctcagcgccaccaaccagttccagaggcaggcggccgtgcagcagcagatccccaccaagctggcggcctccaccaagggtggcaaggacaagggcggcaagagcaggggctctcagcgctgggagagctcagcgtccttcgacctgaagcagcagctgctgctcaacaagctcatggggaaagatgagagcacctcacggaaccgccgctcgctgagccctatcctgtccggcagacacagtcctgcgcccccaccagaccctggcttccccgccccgagcccaccgccagctgacagcccctccgagggcttctctctcaaggccgggggcacagccctcctgcccgggcccccagctccctcgccactgccggccacaccactcagcgccaaggaggacgccagcaaagaagacgtcatcttcttctaaaagggccgtgactcaaggaaagtttttaatggaaagttgagccagaactaaaccagggagctgtctgaaatcatagcaccccatccgggtggcggggagatcaactccgagctgtttttccgaggcagtgaggaacggtgccggctctgcacggagctgaggacaggacagaccttgctttgagaaggagctgccggccggggccacgctccacagccgccgcgcgacagtggagccaagggttagggcaccaggaggggccaggtggcgtcggcagcatctgtccccagaatcaggcagaatccacttcccaaacagagccccacgcaggttcaccatgaacctcagggtcagggaatgagccaggcacgggggcatgggcagagagggccacggggcagggcccactgagggaacatcagtggccctccagtcaggttctgtgggtttggaagcccatcgtgaaaggggctgacctttgcccctttttacttggcattggttttgaaaccagctgtttcccaaactctgcttcccaagggcaaccgttgctgttcacacgctcagcctgtctgggggagcgggcctctagcttcagccagggcgggtacacaccctgggcacagggtcctcagcccccgggaaatgagctcccagggctggcgtcccaccttccaggtgggggctggcacatcacagactgtcgagagcgccatgtcccagggcatgcagaggatgcacctagagacgttgcagcaagtggacaagtggccgctgtgcgggcccctcgcttgtagtgagctgttgcagcttacggtccgttccctggaggggtggaggaaggaggtgttgggcagcatcaaaggtgctgggacatcccagggtggtgagatccatccacgatccagctccggtggagaaagggcccatgtcaagccttgttctgcaccccaagcattggtggtaggactgggtcctggctgatcgtccttgttcccagtggggtacatgtgagcccctgccagggccaagtccttctcccgaacccagggtcctgggaactgcagatcccggggggattcagcccttctcccactgtgctggcagaggcactcctgtgacgctgaatacagtgaacagggacattcccgccactcggggacagatgggcacaagggaggggaaactccatcaggaagtgctcccctgggcagaggcgcccactgggtgctgtgggctcaggagggggcggggcaggagctggtgccaaccgggaaccagagccccacagccatacagcccattggtgacaaggtcctgagaacacagtggccaggtgtccccaggctcctggcccctccgacgacctcaactctgcccagcccggtccctggccatcagcgacgctgtccgccccccgtcagatcccatgtgtgccatgtttatcatcagtgttttgtatttttgtactgagtatcggagcactttacagaagctgactgtacattcctgttctgttgtgaagagaacattcccagaccctggcaccctcctgagccggcgtgtgccggtccagccctccgagatgccacaattccttggatgggggagaagttcaaggaatttctgctcggccacgcggtgggaaccccgcgtccccgccatgtggcagaggggtctcagtcgtgctaggcatcgggcggcagcgccgacagcccttccctcgccagtgcccctcggccactcctgggttggagcccgattttatttgtaaagttgacagtcgagcaaatgttcctattttcgtgggatctgcacacgtctttgtcagttgtggtcatgatcttagtcacctgctaattatttttacaatgattacaacatttcctcactgcgggatatttctgacccgctttagaacttaagacctgattttagcaataaacgtgtccggggtgg

SEQ ID NO: 442 - DNA, 4966 bp, Homo sapiens
atgcggggcccagtgggcaccgaggaggagctgccgcggctgttcgccgaggagatggagaatgaggacgagatgtcagaagaagaagatggtggtcttgaagccttcgatgactttttccctgtggagcccgtgagccttcctaagaagaagaaacccaagaagctcaaggaaaacaagtgtaaagggaagcggaagaagaaagaggggagcaatgatgagctatcagagaatgaagaggatctggaagagaagtcggagagtgaaggcagtgactactccccgaataaaaagaagaagaagaaactcaaggacaagaaggagaaaaaagccaagcgaaaaaagaaggatgaggatgaggatgataatgatgatggatgcttaaaggagcccaagtcctcggggcagctcatggccgagtggggcctggacgacgtggactacctgttctcggaggaggattaccacacgctgaccaactacaaggccttcagccagttcctcaggccactcattgccaagaagaacccgaagatccccatgtccaaaatgatgaccgtcctgggtgccaagtggcgggagttcagcgccaacaaccccttcaagggcagctccgcggcagcagcggcggcggcggtggctgcggctgtagagacggtcaccatctcccctccgctagccgtcagccccccgcaggtgccccagcctgtgcctatccgcaaggccaagaccaaggagggcaaagggcctggagtgaggaagaagatcaaaggctccaaagatgggaagaaaaagggcaaagggaaaaagacggccgggctcaagttccgcttcggggggatcagcaacaagaggaagaaaggctcctcgagtgaagaagatgagagggaggagtcggacttcgacagcgccagcatccacagtgcctccgtgcgctccgaatgctctgcagccctgggcaagaagagcaagaggaggcgcaagaagaagaggattgatgatggtgacggctatgagacagaccaccaggattactgtgaggtgtgccagcagggtggggagatcatcctgtgcgacacctgcccgagggcctaccatctcgtatgcctggacccagagctggagaaggctcccgagggcaagtggagctgcccccactgtgagaaggaggggatccagtgggagccgaaggacgacgacgatgaagaggaggagggcggctgcgaggaggaggaggacgaccacatggagttctgccgcgtgtgcaaggacgggggcgagctgctctgctgcgacgcctgcccctcctcctaccacctgcattgcctcaacccgccgctgcccgagatcccaaacggtgaatggctctgcccgcgctgtacttgccccccactgaagggcaaagtccagcggattctacactggaggtggacggagccccctgcccccttcatggtggggctgccggggcctgacgtggagcccagcctccctccacctaagcccctggagggcatccctgagagagagttctttgtcaagtgggcagggctgtcctactggcattgctcctgggtgaaggagctacagctggagctgtaccacacggtgatgtatcgcaactaccaaagaaagaacgacatggatgagccgcccccctttgactacggctctggggatgaagacggcaagagcgagaagaggaagaacaaggaccccctctatgccaagatggaggagcgcttctaccgctatggcatcaagccagagtggatgatgattcaccgaatcctgaaccatagctttgacaagaagggggatgtgcactacctgatcaagtggaaagacctgccctatgaccagtgcacctgggagatcgatgacatcgacatcccctactacgacaacctcaagcaggcctactggggccacagggagctgatgctgggagaagacaccgggctgcccaagaggctgctcaagaagggcaagaagctgagggacgacaagcaggagaagccgccggacacgcccattgtggaccccacggtcaagttcgacaagcagccatggtacatcgactccacgggcggcacactgcacccgtaccagctggagggcctcaactggctgcgcttctcttgggcccagggcactgacaccatcctggccgatgagatgggtctgggcaagacggtgcagaccatcgtgttcctttactccctctacaaggagggccactccaaagggccctacctggttagcgcgcccctctccaccatcatcaactgggaacgcgagtttgagatgtgggcgcccgacttctacgtggtcacctacacgggggacaaggagagccgctcggtgattcgggagaacgagttttcctttgaggacaacgccattcggagtgggaagaaggtattccgtatgaagaaagaagtgcagatcaaattccacgtgctgctcacctcctatgagctcatcaccatcgaccaggccatcctgggctccatcgagtgggcctgcctggtggtagatgaggcccaccgcctcaagaacaaccagtccaagttttttagggtcttaaacagctacaagattgattacaagctgctgctgacagggaccccccttcagaacaacctggaggagctgttccatctcctcaacttcctgactccagagaggttcaacaacctggagggcttcctggaggagtttgctgacatctccaaggaagaccagatcaagaagctgcatgacctgctggggccgcacatgctcaggcggctcaaggctgacgtgttcaagaacatgccggccaagaccgagctcattgtccgggtggagctgagccagatgcagaagaagtactacaagttcatcctcacacggaactttgaggcactgaactccaaggggggcgggaaccaagtatcgctgctcaacatcatgatggacctgaaaaagtgctgcaaccacccctacctcttccctgtggctgccgtggaggcccctgtcttgcccaatggctcctacgatggaagctccctggtcaagtcttcagggaagctcatgctgctacagaagatgctgaagaaactgcgggatgaggggcaccgtgtgctcatcttctcccagatgaccaagatgctggacctcctggaggacttcctggagtacgaaggctacaagtatgagcggattgatggtggcatcaccgggggcctccggcaggaggcaatcgacagattcaatgcccccggggcccagcagttctgcttcctcctctcaacccgggcaggtggtctgggcatcaacctggccacggcggacactgtcatcatctacgactcggactggaacccgcacaatgacatccaggccttcagccgcgcccaccgcatcggccagacaaaatggaagcccagctgggctacatggatgagaaagaccccggggcacagaagccaaggcagcccctggaagtccaggcccttccagccgccttggatagagtggagagtgaggacaagcacgagagcccagccagcaaggagagagcccgagaggagcggccagaggagacggagaaggccccgccctcctcggagcagctgccgagagaggaggtgcttcctgagaaggagaagatcctggacaagctggagctgagcttgatccacagcagaggggacagttccgaactcaggccagatgacaccaaggctgaggagaaggagcccattgaaacacagcaaaatggtgacaaagaggaagatgacgaggggaagaaggaagacaagaaggggaaattcaagttcatgttcaacatcgcggacgggggcttcacggagttgcacacgctgtggcagaacgaggagcgggctgctgtatcctctgggaaaatctacgacatctggcaccggcgccatgactactggctgctggcgggcatcgtgacgcacggctacgcccgctggcaggacatccagaatgacccacggtacatgatcctcaacgagcccttcaagtctgaggtccacaagggcaactacctggagatgaagaacaagttcctggcccgcaggtttaagctgctggagcaggcgttggtcattgaggagcagctccggagggccgcgtacctgaacatgacgcaggaccccaaccaccccgccatggccctcaacgcccgcctggctgaagtggagtgcctcgccgagagccaccagcacctgtccaaggagtcccttgctgggaacaagcctgccaatgccgtcctgcacaaggtcctgaaccagctggaggagctgctgagcgacatgaaggccgacgtgacccggctgccatccatgctgtcccgcatccccccggtggccgcccggctgcagatgtcggagcgcagcatcctgagccgcctgaccaaccgcgccggggaccccaccatccagcagggcgctttcggctcctcccagatgtacagcaacaactttgggcccaacttccggggccctggaccgggagggattgtcaactacaaccagatgcccctggggccctatgtgaccgatatctagccgtcctcgagacttccctgtgttgcagcgctcatttccagctgagccacgcctgccgggccacctgcccgacccacatgggagagaaaagctgccacctttttaggagccagcgccaccttgggacaaaaagggaaacctagtaatgccatcacatggaggacgaggcccagctcagctgggccagagcccagaagtgccacctcatcataattcaagtgttcttccacacagcgttgcccccacaaccacgccggacgtgccccctcgccaccttttccagacgacttcttagaagagatttcatttatttgtacatcttttgcactttcctattgaagacttgaacacgtttgtcttgataaaagttggatgacgtatgg

SEQ ID NO: 443 - DNA, 4481 bp, Homo sapiens
aatgtgggagaggccggcggctctgaccttggtgtgttacagcccttgccacctccctccgctgccctgcatggggactcaaaccacaaacagcagctcggaaacaagcagacacgcgtcggactctggttcacggggaagagcgctgtttaggagatggacgtgctccacgcagagacgcgtcgggctctgattcatggggaagagctctgtttaggagatggacgtgctccacgcagacacgcgtccggctctggttcacggggaagagcgctgtttaggagacggacgtgctccacgcagacatgcgtccggctctggttcacggggaagagcgctgtttaggagacggacgtgctccacgcagacacgcgtcccgctctggttcacggggaagagcgctgtttaggagatggacacgctccacgcagacacgcgtcgggttccggctcacggggaggagcgcgctgtttaggagatggacacgctccacaccacctctggcgtcctctctgccctcaggctcttgggcattcagagccaggagctgtttctggggaggcagagatccctccaagccccaggaaaggcctcctgctgcctcggggacaaagctgtgtcaggctcttctctccacgctccccaagggaggggaggtgctcagaaacagaccaagagactcagttggtgccaggatggtgcccgtgaccagggagatgtgcacatgcgttcagcgtcactggggaagggacagccacacaggcagtctcaggctgtagctgaaaccccaggcatttccctaaagcaccagcgtccagaactgaagaagggaccagccccatccggccccagaccacagtggggaaccttccagggccagtctccccctgctgcccttcccgcagggccaggggctggtcagcagcacaggccgcccccggcgctgcagtcctggacgtccatggctgacagctcctgggcctggaacactgccctttcctccagctctgcaaagacacttgaggttccagccaggacacgggacataaagggggtcagccctcacggacagtgtttccatagagggttcaggaggtttataaacaccagcaggatggatgacaccacagccaccacaggagccagcatccaagagaccccgtgagatgccaagggtcactcgtgcccgaggtgccctccggaaccggagactacagataccaggggatgcttgggccaagtgtgtccagccacgaaggttactgcccggccctgggaggtcactgggaccaggagctgcccccacaaggaatgggcggaaggaaagggtgaccgagtgcccggccccgtgcccgtggctcaggaagacatgctgtgtttgcatttctgttgttcccagagcgaggggatgagaagcctgaggccggcccgtccctgctccagacgcccccccaccgctccccctcataggagccaaggaggaggaagtgcttcattctttgcaaagaatactccgcctgatgcaatttgcgtgtgcaagatgtgtgaagtgccttttccatttcatcagcacccgcagcctgtatgaagctgctgtttgctctctgccagctcgtggggcttgaatggtatcacgggaggttcttcatcttgcggtgggacggtcgcctcctgctgatggctccgcgttttcattgaccacattcattacaaagagacatttcaaaacatgttctgcagctgatttgctccttggccccaagaatggaatacagataatctgctcacatccatcaggaagcactggttttctttcgggacacaaccgaacgtgccaggactgcaggagccgctggattacagagcagcaaaccaggcatggcaggcggtgctcgcggaggtaccacggggcggaccagggtgtgcagcgttacgtgacttgggaagatgtggggggcccgatgtatctaccaggagacagtggagacctctaccctttagctgtcctctgtcccacacaacccagcccccactgggcggccactgcaggggaagctcagctggaaggttccatgggagagaccagaccagtcctggcactgtccagcagctgccttcggcccatgttctgaaaccgggatgcacacagcatggagatctcagccctgggcaggcctcgccccctccagcagctgccctcggcccatctcccaaagcctggacgcatacactggggagacctcagctctgggcaggcctgggttcccatcgcttcggcgtccctgggcccgggacacggaacacacttgctgcgtgctgtgtacaagaatgaacgaatcggcctgcctagcaccccttggccggctccaggcctccacttgctgtgtcaagtgaggctcccacgtgctgaggggacagagggtccctgtgacctgcaatgctcccactctcacccacgcagctgctcacctacacagccggtttctccagggctaacaggccacccagatgcaagccagtctcagcccctgaccacactggttttcaaatgaactgtggactctcatgacagagaagcggctgggagtcccagcgtgggatgtggtgggacggggctggggtgtgcagagacgatgatggaggagctcctgggggcacacagacctagtgtcgctctcagggctgggtccgcaggccaccctccctccctcaacaacactcacgcctgctgcagccccaggaagggtcaggactcacagatgccaacaagcaagcagcccgtgctggaagcatcaccaccaccggccccagcaaaggcttcctggtgtgtgcggctgaccatcggccactcgggtagacagaagtgtgggtgggctgtgtgcatgccagggcagacggacagcccggggtctcaggccaatggaaacaggaagtttccggctccatttgaatactggtggaaatgccgggccctcatgctgaataggacactccatccaagcttgccgcctcctcggaggcttgggccagtcaccgggcccggctgtgctttcacagctgcttttcttatgggagagcaagatctcctgggattcaagaccctaccaggagtagaagacaagggtcatgggaaggctgtgtgagccctcaaggggcaccatggaccccgagcaccagcgatttgcgctcctggttccgagagcccagcgctgaatcctggcagatggggaagctgagctctgtctgacctgctctggaaaacaactggtccagagaaggacgaagatgtcacttaattctgagttgctgaggataagccaggggccctggaggtgactgtgctgcccacagcatcccaagggatgccacatccccacaggggcagcccaggtcccccagaggattgtgtgccccccaccaccaaggtccttgcccactggtctgtgcctcaataggacagcctccttctcacactattttgaaatataaaaataacactcatcacccatcacccagtcactcagaatcacaccagcgggggcacagaggcgacggcatgtagttctccagcctgtttgtgagcacgggtgtacatgtacacacacacacacacacacacacacaaatgcacatgcacggacacatgcacacacacatacacgtgcacacacagacatgcacacacacgtacacacatgcacacacacacacgtacgcacatgcggggtcagggagctgatgctgtgcgaggctgtcgagggcttcttcactcagcggcacttgggaagcgctgctctgtgggaggcccctcatccatgtcctcgttattggcagcacaaatctccaagtgaggaggggccatgtttaccagccgtccttccagcccacgtctcctacggttccttattttcacaggtactgttttgcagacacagagcccccaagcagcccacacgtcttagccgggtgaagctttgctttatgaagtgctgcctggacccctgatggtcggccctccccgtcgagacagtggcaggcaggcgggggtgctcagggctgtctgcagggggcagccaggacctcactgaggtggccgactgggtccacgccctcctcagcctgcactgctggacaggccccaagaagtcgtgctcggcgtggcccaagaacgggaagcggcagcgtcctggcgtcctaggtgagacttcaagacggctccctgctcccacctgggctaaaggtggaaccccaggtgtaaagagccccctggggtacaggggaggctggatcagcagacgccggctctgggagggccctgaggggctgtggagggaaggtgaccccgcagtggcagcggcagcggaagcaggacggcgcggtgcccgacacctgaggccactctccctggacggggggcgggcggcactgagaggcggccataaaaaccggagtttatttaataaaacaagagcccacgcggc

SEQ ID NO: 444 - DNA, 5098 bp, Homo sapiens
agtttgcatcttaggtcacaccactcctgtgattcctgtggtattgccccaaagcggcctcacaccagagacgggttaagaagagggattggaggtccaccactccactagcccaggaaggacttatctttcgtctcagccagacctcaccccaattctgtgaatcagcggaggaaggcaaaagtgcagagagtcagaggaggctgtgtaaggagcagagaccagggctcacacagctggccccagcccaggccctggcccaggcccaggagcctgcttccctgcatcgctgaggaagaacagcaccatgctgggtcctcacctcccacctccgccccttgcacccagcgaagggaggcctaccccctgcgccttccagatccctgatggaagctacaggtgtctggctctggaagccgaggagagcagcggtgaggagggcctgcagggagaggtggggcctaccgacctggaagaggatgagggggtcagcaggagtggggacgactctgcctgcagagtcacccaggggacaccgcagctgcccaaagccctgggcatccaaccacccagctgctccagagaggaacaaggggcgtcccagcacgacgacagggccagccaggactgggatgtagtgaaggccgggcagatgatgacagccagccccagccctggccctgggcccagagtggcccagaaaccagcgttgggccggagcactagcctcacggagaaggatctgaaagaagccaaggcgcggagccagcagattgcagcccagctgaccacccctcccagctccaattcccgtggcgtccagctcttcaacaggcgccggcagagggtgaacgagttcaccttggagagccacggccagaggggacagaagcccagccaggagtccctcagagtgctcccttcaagcctcccaggccatgcaccggggctcagcctgagttccacctcgctgccggagccaggccctccacggcaccccagtccccagagccccgacagaggggtccctggccacagcatggaggggtactcagaggaggctagcttgctgcggcacctggagaaggtggccagtgaggaggaagaggtaccactggtggtttatctaaaggagaatgcagcactgctgacagccaatgggctgcacctgtcccaaaaccgagaggcccagcagtcctcaccggccccacctccagctgaggtccacagcccagctgcagatgtcaaccaaaaccttgcctcgcccagtgccacgctcaccacaccaacttctaacagcagccacaatccgccagccaccgatgtcaatcagaacccaccggcaactgttgtcccacagagcctgccactttctagcatccaacagaattcctcagaggcccaactcccatctaatggcacagggcctgcttccaaacccagcaccctgtgtgctgatgggcaaccccaggcaccggctgaggaggtgagatgcagcacactcctaattgacaaggtatcaactccagctaccaccaccagcaccttctccagaggagctacgctcatccccagctccaggcccccagcctcagatttcatgtccagctccctgctcattgacatccagcccaacaccctagtggtgtcagcagatcaagagatgtctgggcgagcagctgccaccacgcccaccaaggtctacagtgaggtccacttcacactggccaagcccccatcagtggtcaacaggacggccaggccttttgggatccaggcgccagggggcaccagccagatggagaggagccccatgctagagagacgacattttggggagaaggccccggctccccagccccccagtttgccagacaggagcccccggccacagagacacataatgtcccgcagccccatggtggaaaggaggatgatggggcagcgaagcccggcctcagagagacgccccttggggaacttcactgcaccccccacctacactgagaccttgtccacagcccctctggcttcctgggtgaggtctcctccctcatattctgtcctgtatcccagctccgaccccaagtcttctcatctgaagggccaggcggttcctgccagcaagacgggcattctggaggagtcgatggcccgccggggcagccgcaaatccatgtttactttcgtggagaagcccaaggtgaccccgaatccagacttgctggatctggtacagacagcggatgagaagcggcggcagagggaccagggggaggtaggcgtggaggaggagcccttcgcactgggggccgaggcctccaacttccagcaggagccagcacctcgtgacagggccagccccgcggcggcggaggaggtggtaccagagtgggcctcctgcctcaagtcaccccgcatccaggccaagccgaagcccaaacccaaccagaacctctccgaggcctctgggaagggagctgagctctacgcccgccgccagtcacggatggagaaatatgtcatcgagtcttcaagccacacgccagagctggcccgctgcccatcacctaccatgtccctgccttcctcctggaaataccccactaacgcccccggggccttccgagtggcatcccgaagcccagcccggaccccgcctgcctccctctaccatggctacctgcctgagaacggggtcctgcgcccagagcccaccaagcagccgccataccagctgcgcccctcgctctttgtcctctcacctatcaaggagcctgccaaggtctcaccaagagctgcctcgcccgccaggcccagctccttggacctggtgcccaacctgcccaagggggctctccctccatctcctgccctgcctcggccctcgcgctcctcaccgggcctctacacctcccccggccaggacagcctgcagcccactgccgtgagccctccttacggcggtgacatctcccccgtgtctccctccagggcgtggtctccccgagccaagcaggcccccaggccctccttctctacccggaacgccgggatcgaggctcaggtgtggaagccttccttctgcttcaagtaacgaaccccacgggggtcccactgccggtcaagttcccctccttgagggccagatggagagcagatgtggcaggaaatggcacagagctgagtgaggagaatggggagtccatggttcaaggtcagatgtggccaccagctggctttgtgaccttgggcgagtcgcctcccctctctgagctgaagccgcccctcccctactacaacaggggtcggactccatgtctgagcggggaggagggtcatggagagagaactgtctggcagccctgatgcggtagaggggcatcctctggcctttgtgagctgtagggatgcagagtctgatgccagcgtcctgctgggggagtggcctagaaggggatcctaacagggacttctggagcagacagagcctgccagtgcctgtggagtcagccagccgagggtctgcctcctcagctgccccaggggggcctccctcctgaggctcaagctcctggcgtctttcttcctgttgctggattctcacctccatgggcctgtctcttctgcctctgccttctggacaccgtttcctctccgctgcttcagagagctttgcctcgcctccgcctgcgctcccctccagggtccttctgctggctgcggactcggcccaccactgctgtctgacgcttttcttcctgccccctctgaggcctggctctgttttagggagatcactgggcccaggcctcagccccagttctacctggcttgctgtcaccgctctaggggtgggggacgtcccaggggatccccaggagaaggagagccctgtagggggctgtgcagatgtgggtgtgccacagggagggtggcccctagccatgtatccattggctgttttggcttcagattcaaccaagatctgcctgactaaaagaagccacctcagcgcagtggaacggggcccagggggaggcaggagaggagggttccggtcccatgtcaccttctcatttgctgtgtgactttggcccactcacattctctttgggcctcagttttatcatttatacaaggagggcttttctagctgtaacaatctgtgaggattgagaggataggctggtgctttgaagaaaggccttgtaagtgacaagacagtcccctgggaagaaagagaaaggaaatgggctattgccaaaggacaggtggcgttagatggctgtgagggtgacctggtgagggaagggttggaatgagctgctgcaggaggccaagggatgcctgggctgggctgggctgggctggcttaggctcaggattgcctggggacagtaggagcatggcaggagctggggcaggtgcatagcagtgcagtgggaagggacagaggagatcttagaattttgaggaaaatctgggacttgagacctggattctaacagaccaactgcatgtgtgtctgtaggtctcagtttccacattcatacagtgagggtgttaagtcaggtagctggagacttcccatcgcctctgacacttttggaggtgatatgatacagcccccgaccaaaccaggctttgtggggggtgagagaatacagacacaagtggcaggattcagatggaagcttcgcaaggctgggggccgaggaccacccacttctctttcccagccctagttctgggttccccagtggggcaaggggtggtggaggcagtgcccatgctgggctgagcctgcagtttttgtgagctctgggcttgtctccatgggaacaggggtgccttcttagtgagctcatttcacacagatcgagggggtatgcgtgggggagttgtgagtgagctcagctccttcaggcctggcctctcccagaacagagtgaagcccctgccctggacccctgctcccttctacccttgagggccaccaatggaagagcccgcccttcattctgcagctcctgcggccaggctgagctctgcccccaactttgttttctctcatgttctcaatacactctgcctc

SEQ ID NO: 445 - DNA, 4946 bp, Homo sapiens
atcctttccaaagtgtacctcgagcacaggtctcctgacggtgccatccactacctgagccaggccttggtgctagggcagctgctgggtgagcaggaatcctttgagtcttctctctgcctggcatgggcctatctcttagccagccaggccaagaaggctttggatgtgcttgagccactgctatgctccctgaaggagacagagagtctcactcaaaggggagtcatctataacctcctgggacttgcactccaaggtgaaggccgggtgaacagggcagccaagagctatcttcgggccttgaacagagcccaggaggtgggagatgtgcataaccaggcagtggctatggccaatcttggccacctgagccttaagtcctgggctcagcatccagccagaaactatctcctgcaggctgtacgactctattgtgaacttcaggccagtaaggagacagacatggaattagtacaggtgtttctctggttggcccaagttctggtgtctggacaccagctgacccatggccttctttgttatgaaatggcattgctgtttggcttaaggcatcgacatctaaagagtcagcttcaggccaccaaatccctctgccatttctacagctctgtgtccccaaaccctgaggcatgcatcacctaccatgagcactggctggccctggctcagcaactcagggaccgggagatggaagggaggctgctggagtccctggggcagctttatcggaacctaaataccgccaggtccctcaggaggtcactcacatgcatcaaggagagcctgcgtatcttcattgacctgggggagacagacaaggctgctgaggcctggcttggggcggggcgactccactacctcatgcaggaagacgagctggtggagctgtgcctgcaggcagccatccagacagccctgaagtcagaggagcctttgctggctctcaaactttatgaagaagcaggtgatgtgttcttcaatgggacccgccacaggcatcatgcagtggagtactaccgagctggagctgttcctttagcaaggaggttgaaggcggtgagaactgagctccggattttcaataagctgacagagctgcagattagcctcgaaggctatgagaaggctttggaatttgccaccctggccgccaggctcagcacagtcacaggagatcagaggcaagagctggtggcctttcaccgcctggctacagtgtactactccctgcacatgtatgagatggctgaggactgctacctgaagaccctgtccctctgtccaccatggctgcagagtcccaaggaggccctgtactatgccaaggtgtattatcgcctgggcagactcaccttctgccagctgaaggatgcccatgatgccactgagtacttccttctggccctggcagcagcggtcctgctgggtgatgaggagcttcaggacaccattaggagcaggctggacaacatctgccagagccccctgtggcacagcaggccctccgggtgctcctcagagagggcgcggtggctgagtggtggtggcctggccctctgaggaaagctgtcctgtctctggacatttggcatggccagactctgaccccactgccctaggctcttaaatactcattgggagggtccgagtccttacctggcctagccccctcatttcacaagaagaagaatgaagtccaggaggagaagggctcattgcaggccacagaaagatttgatggtgcagcgatgagaattcctggttccaggctttgcatctggagcctttaccggttgactgttgccttccacacaaacagcctctgaaaagcactttctccatacataattctggagaagatgagggatcttgccctccaggagccttccttcctcccccaatgaggaaatcagtcactgcactggtgcaaaggcaagcagattggaatttgtgctcttcaccgattttctcagggaaagaccccttccccttgccagcagaggaacctgtagttttttccatttctttcttcagaaccaaagtatgtatcactcctcatgctcacagggattgacaggagagaattcaccaggatcttagctcaaaagacacagcctcagaatggccagatggattgcacgaaacctgacttggattcaccatcttcctcctgccataaggctgtgctcccacataacctcccagaagctccagggaagctttccaagagcaaaggcttggaaattgaatgttaagaaaattatgacataaattacatgtaaatagtgtatatgattaaatattgtccagttacatttacacacacattttgtctcatccacaatgggggcagatgagatggaggacttgatggatgggagagaataccaatacatgtctttttttttttttttttttttgagacagtttctcctctgttgcccaggctggagttcagtggtacagtcagggcttcctgcgacctcagactccggggctcaagtgatcctccagtgtcaacctcctgagtagctggaactacaggcatgtgccatacccaactacaaggcatcttattgatttcagggcagctgctttacaaagcatctctattaataacatcactgcatagcacactgagtggcctaaaacacttataatctcatggtttctgaagggcaggaatccaagcatgacttagctgagcccaccagcttagggtggttcacaggctgcaatcagctggggctgcagttatctcaacttcaactagagaaggatgggcttccaagctcacccacacagctgttgttaggagtcagttttttgctagctgttggccagaggcttcctgcagccacttgccacgtgggcctctccacagggcagtcacaacatggcaccatgcttcactagagggagcaaacaagaggagcaagaaccagagtgagcaggagaaaagggagtgactctttctataacctgatcacagaagtgacatctccttagtcttgcctattcaattcataataaatgagtcactaggtctagctcccacaagaggggagtgtttaccaacagcttgaataccagatggtgaggaatcattggggatcatttcagaagtgacctaccacagtatctgagttctttgataatgaaattgggaattctctaatttcagcaaactgaaaatatggtccactaaccagcagcatcagcatcacctgtgagattgtttgaaatgaaaatctgtggccccacctatgatctctgaatcagaatctctggatcccagaacgctgactcgtccaagctttcctggtgattttaatgcaccctaaagtatgggaagcaccactgcagggcaagagccctcagatagtgtgcataactattacctggtgaggttgtggaacatgaacttcttggtttctatctctaataattctgattcagtagatctgggatgtatcccaggaacatgcatttttagaaagcaactcaagcaagcctgatgcaggtggttcacccttgctccttttctgtgaaccacaaggataccagccataattccctgcatctgatgcccatcagcttagcttttattatcagaccatctgcccttaatttctagcttcttgggctgaccagatgattggttgtatgaaagggtgagatgggagtggtgagttgagccgccattgcatcttctagtcatcaaggttgtctactaattggcacacattttctcttagagatgtggttggttgtcaaaaggctgtctactctagagagtattctccaggaaggagaagcttccagttgtctaattagtaaagttatctaatctactaccatggagaatagatgtggttttgcccccaccacaagctgtaaaagccccaagctgggagggacgttgcggttgaggctattcagtctaatctcccgtgcatagtcctttcaacaacattcctgggagacagtcaggggcacacacattccagaacagttacatatcgtgtatttgaagaaggctcacacagccctggaaaccatgccactggccattccccatctgactcaggttacagatcccctcccttttcccactgaccactcactctcctctggccagatttgtttctgtttctctgaaagagcagttcccacaactgcatgaggcttttgatattggccggtgggtgaagagtacagagggatgttactatacttaatttgattcttcctctccccagcagccacatctgtccttggcttccattgagctttataatcagttgaaacttctgtgtcttctgacttgaacttctgtttggacagatctttctcaattgctgcaaatatgcacatgcatttgcatatgcatacacatacacacacatacgtgaagagcgttgtttctatccatgttacatctccttggaaattttagctaaaatttcccaattctgtgcactttgatttacctataaatctgatgaatttacccataaccaggtcagttataaaaatgtttagcatgtttccaaagacaagggtaagactatttttttaaaataagaaaaacattgtgctatataattgcaattactacattctatatgtaaaccgcttgctaaaactcttttaaaaagtgtttaaaattttcatttttgaaatgtgggccaactattccctttggaaacatgttgatgctgtctttttttcatgatccacagagagtaaagtggtgattggatttggtctctacttaaacatttaaaaaaataagtgtatcatagccaaacatgatctagttaccctctttattctaattgttccctcaaatcttatatgggctgtgtgactgctggctccttacatctaatctaaataaagaacaagaagggcattgc

SEQ ID NO: 446 - DNA, 4719 bp, Homo sapiens
atatgatgcccatcagagtgcttcgtctaggtgggatcaggctttcaagagtccatgggaacatgcagggttagctatatgattactggtaaggccgagtggtccctggcctcagactttaggcatttcttttgctctggtgctctgtcccagcagcagttccttttctctgttttttgggggaaacagagatacacagttttcatttctgaatcttcaaagggagagagagagaaggatccctgtggcccaaacaggcttcccttgcctttgggctgtgcttggtctttgattgaagattctcataggagtagaagggaatgtgcttgtggggccctggggagcaagtgcctgcagagatggggtctgcccagtagctgctcacccccattccatggatctggcctggcatgggagcagagctgctgggtttgttcccctgccctttacatcccttgaggggggcagttagaagcataggactgctttccatgagagcctggcatggaattgggggctgatcctactttctcaccttctgtttcagtgacatcccggagactgtgcctttgtccactgtcaatagacagtgttcgtcggggctacaggcagtggccagcatagcaggtggcatcagaaatgggtcttatgacattggcatggcctgtggggtggagtccatgtccctggctgacagagggaaccctggaaatattacttcgcgcttgatggagaaggagaaggccagagattgcctgattcctatggggataacctctgagaatgtggctgagcggtttggcatttcacgggagaagcaggatacctttgccctggcttcccagcagaaggcagcaagagcccagagcaagggctgtttccaagctgagattgtgcctgtgaccaccacggtccatgatgacaagggcaccaagaggagcatcactgtgacccaggatgagggtatccgccccagcaccaccatggagggcctggccaaactgaagcctgccttcaagaaagatggttctaccacagctggtgagactggtccggggtaggggtatgagaaagcaggccatggccatgctgggtgctgtactctgggaacctggaatagaccaggcccctctgcaaagtagaagtgggagggctgggatctcctcatccccaccccgatgccttcttaccccaacagtttgcccctaggaaactctagccaggtgagtgatggggcagctgccatcctgctggcccggaggtccaaggcagaagagttgggccttcccatccttggggtcctgaggtcttatgcagtggttggggtcccacctgacatcatgggcattggacctgcctatgccatcccagtagctttgcaaaaagcaggtaaggtggctccttcatatagtatctgggtcccacctggatcctgcagctgccctgcatgctgttgccaggggcatgagggtggtcctgtgggtgctgcagagtggaggtggggcaggctagtgtcccatacttcaagcccttcctgaccccacagctgggattggctcacccttctggaagagacacacaccaggcagcctgtaggcccatggatggggtgggccccaggggaggcagagggccagtgtgtcagctcaggtctttaccttgtctgcagggctgacagtgagtgacgtggacatcttcgagatcaatgaggcctttgcaagccaggctgcctactgtgtggagaagctacgactcccccctgagaaggtgaaccccctggggggtgcagtggccttagggcacccactgggctgcactggggcacgacaggtcatcacgctgctcaatgagctgaagcgccgtgggaagaggtaaggctttgctcctggcggtggggtcatagggggatatccaagttagggcacctgaagggcaggggatagaggtaggtgggctttggatcataatctcgacagacacagtcctgagcaccataatcccaaatgttgaaatcccaaaagatcaaagtccctaaggtcttggctggtccagaggtagtgagttatcttgattgttcagttacagatcaaactccatgttctactctttacccccttcttacttctacacttgactagtcaaggagaaaaatccttactgtctaaaatcccaaaaatcacaatctcaaaagattaaaatcctgaatgttgaaatcctaatgttgaattcatgttatgaattctagggaagggattagtgcattttccgctgtatgcaggatagtgcatcatattagttataccatgtaactaatatgatgcaaccattaccttgttattgtctttatttgaattaagtatggtttaaggagatgtgaatgggtgctaagttgacaaggaatggacttaattttgggaatacctagaaacctgacaaagcattgctttgggtgtgtctgtgacggtgtttgcagaggaggttagtgtgtgcatctgagtggaccaggtggggaagatccgccctcagtgttggcaggcatcagctaattgcctggggccctggagagaacaaatacagaaggtgaactgtctctctcagagccgggacacactttttttctgccttggacatcagaaatttgattccatgaaagtgcattatcacattgactttgtaagccttgtgcatgtacataaaaatgttgaaacttcctcagtaaaagaggtgtgctatttgtgcacctgcgtttgtgaaagataaaatttctcaagatcttggttctttggttgactacttgtgcagtggtgacccatcacaggttggtttgttgagacagggtcttactcaggcgcccaggctggagtggagtggctccatcttggctcactgcaacctctgcttccctgactcaagcaatcctcccacctcagcctcctgagtagctgagactacacgtgggtgccaccacacccagctaatttttcgtattttttgtagagacagggttttgctatgttgcccaggctggtctggaactcctgggttcaagtgatcttcccaccttagcttccaaagtgctgggattacaggtgtgagccacagtgcctggctctatcagtttttgatcaatctcatcaaaagacgtaggttgtccatcatggtattcatatgactgcagttataaagctgggtgcacatgattaccagcaatttatacagtttgcttttaacctatttatgaatacagtttgtctgtttataattgttataatcctgtgactattgttagcatacctgagtgtttatgcttgcagaaatttgtaattattttctattttattgtgtaaagtagcctgtgaagtgttctgttgtttttgtttctcaaataaatccccttttaaaaatgtacattttttttttttttgacatggaatctcactccgttgtccaggctggctggagtgcagtggtgtgatctcggctcactgcaacctctgccttttgggttcaagcaattttcctgcctcagcctcagcctcccgagtatctgggattataggtgtctgccaccacacccagctaatttttgtatttttggtggagacagggtttcaccatgttggcgaggctggtcttgaactcctgacctcgtgatcctcccgcctcggcctcccaaagtgttgggattacaggtttgagccaccacacctggcctaaaaatgtaaatatcttttaaatcaatcttttaaaaaagtttttttctaagatggggtcttgctatattgcctaggctggtcttgaactcctaggcacaagtgatcctcttgcctcagcctgctgaatagctgggactacaagtagatgccaccaggccaggcttccaaattattttttccagaattatattttcaggattttgatcttttaggattgtgattttcaggattttagactttagggattttgttcttccaggatttcaacatttgggatgattgtgtttgggattgtgtcttttgggattatgatcgatccctggggaggggaacatgcacacagaaacaccctgaacttaggatgtaggggcatgatccctgttttccttaagggccagccttgaaagggatactagcctgcagtgggcatctgtcaccgtgtgtgtgcccaagtgggaggccagggtaccgcttgcccacagatctggtctgatggttttgcatcctacttgtccatgacgtccttctgggtcagcctggtctggaggtaatttggtgggtgcctttgcccagccaattaagttttgttttcacagggcatacggagtggtgtccatgtgcatcgggactggaatgggagccgctgccgtctttgaataccctgggaactgagtgaggtcccaggctggaggcgctacgcagacagtcctgctgctctagcagcaaggcagtaacaccacaaaagcaaaaccacatgggaaaactcagcactggtggtggtggcagtggacagatcaaggcacttcaactcatttggaaaatgtgaacactgatgacatggtataggagtgggtggggtgttgagccacccatcagaccctctttagctgtgcaagataaaagcagcctgggtcacccaggccacaaggccatggttaattcttaaggcaaggcaaatccatggatgagaagtgcaatgggcatagtaaaagtgcatgaattt

SEQ ID NO: 447 - DNA, 3500 bp, Homo sapiens
tatttttagtagagaccgggtttcaccatgttgcccaggctggtctcgaactcctgacctcaggtgatccacccacctcagcctcccaaagtgctgggcctacaggtgtgagccactgcacccggctgagacaaaatcttctagactgcaaagttacgctcttttcacgaagtccttgcccacctgcccagggtcccttgggcctgctttttgtcccccgggtggggtgtaacatcccagctggcttgagtcagggcaaggcacgggtaggggtgaagtgggtagtgggctgcctgctttgaggggagcaggggtcaagggtgtgcctaaggcttgcatcccgccctctgggcacagggcctgtgcttggggtgagagcctgtgctgtggagcaggaaccagcattgagtgggggccacctggtgtgtggggctgggctggtcccttcatgtgggaatttgatcctcttaataacactcagcgggaaagactatattgtgcccattttacaaatggggaaactgaggttcagagatgcggtacttgcccaaggccacactggtgcagggacctgaacgcagcagtgcagctccaaggtctctagctgtcctctggctgcatggcccacttcagcatgagggctgagtctccaagggcagtcccaagagaaccagcagacactgtctcaccatttgtgacccagcctcagaagccacatagcatcacttacctggagtggcacgcaagcctgcctagagtcaagaggaagaaaggaaaccccaactctcagcagaattgccagaatctccatgtcagaagagcacgtttggaggcagatcctgctgccatccacttcgcagaatgcagagcgtgcccgaggagaagtggggtctgggtgagcagcaccaatgtccactccagtaggggagacactgcatgtccaggacacaacctctgatcgaggctgtcagggggcccaaagaagggctgtgggggccgggcatgggagccacagatgcgggttcagctccaggctctgctgctcccttgcctacatggatggagagccctctgggagaagatgtgcccccgccagcctctgaaaggaagatgaggtttagatgaggaggggaggttggaaggagctcttggctggggaccctgccccacaggggcacctctaggggtgggagatgaaagcagtgtgcttggggcacctcagatgccgtggagatgaggctgggctgagactcagtcagagggttcccaagtggtcccagtgacaaaggcccagagaaacagttccattcaggaaacatgtgatggctcaatgtggagaagacactcaggaagtccacagagcctgaatgtccccgctctggtgcagggtctcgtgctcaggtccgacctggctgtcagcggcactgggacccagggctgccccgccatcccaccgccaggagcggaggagctgtctccagcagcagctgctgcacagagccccaggtggagcctggggaggcaggctcagtgttctcagcttatcaccagacactcagttctgcggctcattagtctagacttgtttctgtcagagaaggtcctctttcccctgggatgtgtaggctgttctggctcagccaacagcagtatatgggtcttatcggaatatgaaatactaaaatgtgggaaaaaaaaaacaaacttttaagtgtttgccttggagggatgggcaatgggactcgtgaactgttttcttctttcgtaagcagcctcgctatcccttgcagccacagaactgacgcacagggccaggtcccttggggcccagcaggaaaaatggatgccaggaagggcatgctagtccaggcctggggaacacaagctgcttcccatttgctctctctctacggctcgattgccagttccaactgtcagtctatcttgatccccaaaatgtttgagtatagatacgtctgctgattcccctcattcttttagtgtcttttctgctgtgaagcagttttggggcaagatcttttgctctggtccggataactctgggcaatatactccaagtcaaaggctacagtgaatctgggtgactggcaaataatcgatgaatcatgactccagaattcttgtctctagatgggggagtaaaatcacaaacgagatatgctgtcggctggggatgctttagaggccccaccatacatgttcccatctttaataatgaaacccttgatttttagctcagcgtgtggctacctggaccaattctgtctgatggggtgtgcagtagtgtcatgaactacttctatcccaggaagtaacttgtaaatgagtggatgagccaattctccttctttttcttcctgctggctgaagtgtggacatgatggcaggagctgcagcagtcacattggaccatgggtcatcgtgggaatggaagtcacacaagggtatttaaagccacacaaggataatgagcactggatagatggagcccgagtccccatcacagtgtagcccctgtaacagatctagacttcctgcctcccacattgagtaaactgctctcttgcttaagccactattatgttaggattttttcaacccatagtcagagatagtcctaactgattcaccaccctcagagagtttacagccaattatgtttctcatgaaaaaggttagccagtggttgtaagtgatcccggactggagcgccagctgcactaaggcagttcgtctgtgggatggctctgtccttgtcagggagaggacccctcctacacactggcatgttaccacaagtacagtggtaactaagcaggtcggcataggtgcccacagagcagactgaacaccccgtttgcttccctctcctctccgaactccctggacatggccaagtagcataagccaagcagaggtgagaaggagagtggggcacaggcaagttaccagtgggcccgcggctatcatggacttccagaaaataaaaaacaggcatgatggtgttggtttataaaccaaagcagagggcactggagccccgtaagtgtgcaggagtgaatgtatgtggcagggagaagggtagaagggaggaggttgggtagaaggctacctctaccagctggaaatgagtggtgaagtcagctggacttctgggtggggcggggacttggagaacttttctgtcttacaaagggattgtaaaatgcacaaatcagcactctgtagataggattgtaaaacgcaccaatcagctctctgtggctagctagaggtttctaaaatggaccaatcagtgctttgtaaagtggaccaatcagcacactgtaaaatggaccaattagtgctctgtaaaatggaccaatcagaccaatcagcactctgtaaaatggaccaatcagcaggacatgggtggggacaaataagggaataaaagctggccaccctccagtcagcagcaggcaacccactgggtcccc

SEQ ID NO: 448 - DNA, 3943 bp, Homo sapiens
ctgtcttcaggatttggggtgttctgcaattctttaccctggctctgaaccccagctgtcaattctggggcaaatggaaaagttcctgctgctatcctgttccacctataaccccagcctcatgttacagtcctggcaagtgctacaaagggcagggcagagaatgttctgatctcatctgggggtgctctgaggaagtgacttttgtaggtcagaccaggtcaaaagaatggcatgtcccaaggtcccaaagcaagaagcagtgtggcacatggggagatgggaagaccggtgggtgtggggtgttgagactgagggcagagcggtaagagttgaggctggcggtggcgacagtggcaacagcaacatttatagatcatttctgtttatgcatttcttatttaataatcgcaaaagaggaagtagctctgattatctctcttttgtagatggaggttcacatcttgctcagagaggtgaggcgattcacctgagagcacgcagcaggtgtgtggggaagccgggttttttgttttttattttttgtttttttttttttgagacggagtctcgctctgtcgcccaggctggagtgcagtggcacgacctcggctcactgcaggctccacctcctgggttcacgtcattctcctgcctcagcctcctgagtagctgggactacaggtgcctgccaccacgcctggctaactttttgtatttttggtagagacggggtttcaccgtgttggccaggatggtctcaatctcctgaccttgtgatccgcccgcctcggcctcccaaagtgctgggattacaggcgtgagccactgtgccttacggaagctggggttttaacctgggtccagagttggaactggcctctgggcctatttgactctcctgtgctccgacatcccagcagacccaaggaaggggcagtctgtcctgcccctacccaccccttctccctttctactgcctactcctgggagcctgtatgaggggctgaggtgggcatgaacaggtcagcctctgagacaaaggaggcctgattggcaagagaagtaaggcctttgctgtcagcaggcctgggttttagtccccacactgcccctcactgggctgtgtgactctcggtcagattcttcctttttctctgattgtcagtttcttcatttgtcaaataacccaccctccttgagagtgtcgttttattcccattttacagatggcccagagaagggaagcaagacagtggcacccaggagcccagcaccaagcccagggctgtttcccctacacctggccatcatctttccaggggtctgggcagtgccagtccaaggggactaattgtaggcaatgtggatggtttttgtagaggcccagacttctaaagacaggcggtccaggggctctcatgataggagaatgggaatggccaatccaaagaagagaaagcgcgaccaagaactggtattcagattgggtggcccaggggctctcatgataggctggctggagagagttgcagactgagcccctccctgtccctgcactcatctctgggcctgcctgagagctgattgtgctgcggccgcatctgatctgggcagactggtccccgcagacaccagcgtccatcagggccacagcatttcccagggccacatacctagatctctgcttcccacgtgcgtgtgcgtgtgtgtgtgtgcatgcacatgtgtgtgtgcctacatgtgtgtgcgtatgtgtgcatgtgtgtgtgtgtacgtgcgtgtgtgtgcgtgtgcgcgcgtgtgtgtgtgtgtatgtgttttgggtcagggagggggctgagttaggaagtctggagcacagcactgcagcaggggtgggggctctgttgaggtgtgtctttgccctcactgggcttctcctgcctcactcccactctgggcacagctcacactccaggcctgagcagatgggggccctgaccagggatgcctgagccctgatggtcctcaatccactctcagatgcagattcacatctctgagccccagcctgagctgaaccctgactctagttctaagctgagacccaaagctgaccctagagtgagcatgaccccagctccatgcttagccatgatcatagtcccagactgagccctaatcctggttccaggatggatcctcaatctggttccaggctgagccctgaacttgctctaaaactgagccctcgtcttttagacaattctttgaaccctgttccaggctgggcccttactatactctaaactctaatcctggcccctaactaaaccttgactccgatcagaaattctgtcatgattcacttctattttgtttattttattttattttatttttgagacagagtctcactctgtcgcccagcctggagtgtagtggtgtgatcttggcttgctgcagctccagcctcctgggctcaagctatcctcctgcctcatccttccgggtggctgggaccgcgggcatgtaccaccatgccctgctaattttattttttattttgtagagacggggtcttaccatgttgcccagggctggttctgaactcttggcctcgggtgatctttctgcctcggcctcccaaagtgttggtattgcaggtgtgagccactgcatccggccatgactcacttttaatttcagtcctgacctccgtccttagctgatctgtgcctgtgaccacagtctaacccctaatttccgaacaacaaaccaaccgttaacctcaaacctagcccaaatgggagcgcaagatcccttccaatggcaggacttgtgctggaaccagaaggaaagttagtgtttcaccgagcggagctgtggaaactgtgcacataggcgtggagtgggaatgtggagaatggaaatggccaacccgagaagagaaagagttactgagaactgctatccacggtgggagtgggcgtggcgggaggactctgggtgcagtcacagctggggttcaaatctagggtccaccgcatatcagtaaccttattttggatgggtcaggtgtgtgtggggaaaagaaagagagatcagattgttactgtgtctatgtagaaagaagtagacataagagactccattttgttctgtactaagaaaaattcttctgccttgagatgctgttaatctgtaaccctacccccaaccctgtgctccctgaaacaagtgctgtgtcaactcagggttaaatggattaagggctgtgcaggatgtactttgttaaacaaatgcttgaagacagcatgctccttaagagtcatcaccactccctaatctcaagtacccagggacacaaacactgcggaaggccgcagggacctctgcctaggaaagccaggtattgtccaaggtttctccccatgtgatagtctgaaatatggcctcgtgggaagggaaagacctgaccgtcccccggcccgacacctgtaaagggtctgtgctgaggaggattagtaaaagaggaaggaatgcctctttgcagttgagacaagaggaaggcatctgtctcctgctcgtccctgggcaatggaatgtctcatgtaaaacctgattgtatattccatctcctgagataagggaaaactgccttagggctggagttgggacatgcgggcggcaatactgctcttgaaggcattgagatgtttatgtgtatgcatatctaaagcacagcacttaattcttaaccttgtttatgatgcagagacctttgttcacctgtttacctgctgaccctctctccactattatcctatgatcctgccacatccccttctctgagaaacacccaataatgatcagtaaatactaagggaacccagaggccggcgtggatcctccatatgctgaacgccggtcccctgggcccccttttttctttctctat

SEQ ID NO: 449 - DNA, 3673 bp, Homo sapiens
cttaagagctgaggaatgacacttatgcctataaaactaactgcacatataggatagatttttattattgaagagggatttggtttaaccaaagctaaatcattcttttcaacctgtttctttttaatagtagatcttggacatttcttctatgtcggtacttacagatctaccttattatctttagtagctatttagtattccatatacatgtatgtatggcctataatttatttaacaattcccctgttgctggacttacagattttttttttttccttttttttttttgagacggaggctcgctctgttccccaggctggagtgcagtggcgcgatctcggcccactgcaaactcctcctcccaggttcaagcgattctccttcctcagcctcccgagtagctgggactacaggagtccgccaccacgcctggctaatttttgtatttttagtagagatggggtttctccctattggccaggctggtctcgaactcctgaccttgtgatccgcccgcctcggcctcccaaagtgctaggattacaagcgtgagccactgcgcccagccaacttacagatattttttaaagcagatttcactatctgttctaggtgatcatttttacaaatgatactgcagtgaacatccttgtgcatatcttctttcacatttatgcccatatgttggatacatttctagaagtagactatatgttacatgcatgagaaattgattagtactgttaaatgcccctccaaaagttgtatcaatttatacttcattgaataggggacttgatttggtatttatggacaggagcctagggatggattgtagggaatgcatttccctgaagagatggtccttagctttcagcagtttctggaaactgagtggtgagaataataatgtgagaaatccggaacactgataatgtcctgtttcctaatcggtctgtgcccctgtgtaatttactcattatacgtgtccgtgtcacagtacctggaaagttctctccgtttcctttctcttgggcaggaatgaaagggttttggaggcaatgacagaaagagctgagatggatgaagtggaacgtttccagccgctgctggatggattaaaaagtggaaccactattgcactgaaggcatgtatatcccctgaaactgggcccaagaatagaattcaagatggacagacttaaattcatttgaccttttaataaaatacatggagtgcctcccaactatatattttacatttcagaatctgttatgaagggaaaatgattaaccttctttctaagaaggtaaagaatgaactgttttcctcattatgagatggaaaaggcatgatatctatttacaatctaggaaaaccaagacctacaataacatatactctcaaatccttgaaaccatttagagtttaggctctccggatctgtactcaaaccaggtctcattgctatagtagaaaagtcatctttagagtttttgtattgtatctttcaggttgtattggggacctaagaatgcatgtaaagaaaatggattcttgatctccaggagttagcattgacatagctgctgaattttcttattttaggttggatgcctacagctgatcaatgctctcatcacaccagcggaggaacttgacttccgagttcacatcagaagtgaactgatgcgtttggggctacatcaggtgttgcaggtaagatattacacttcattagaaaggctagactggttccttcttgctctacagccccaataatcccggggataattctggttttcaattaaaaaccaggttgaaaagcttaggtttctaaccacagaggatacttttgggttccctgacttctacttttgttgttgacaggaccttcgagagattgaaaatgaagatatgagagtgcaactaaatgtgtttgatgaacaaggggaagaggattcctatgacctgaagggacggctggatgacattcgcatggagatggaatatccttttgctgactaggttcaaggcagatgagacattcattgtatttagttccctgatccctgtgtggaatggtttgggagatgatgactcagaacagagcatcaggcttatgtgtcttctcattaaataaggcaggtgtatttttattgcgctggctttacttagcttatcatagatcagggaagtcagtaaaggtgatctgagggttgttgagcatggaagccatcaaaatcagtgtaaacttcctagaatgtgatagcttagcttactaagatgtagaactggcttttagagatgtttggactgacagagggagtaatttagttacctgttaatattttcagtaagtgactttgaggcagttacctcttattttctgtctactgcctgatcttcaagccaagtacttactaggaatcctctgtgtgtatagtaccacccaattcactggtcccttaaaggacgttttagaaagcttaaagtttctggtgatgtttacaggaagaacagccagtagaatggaagtggtgtcttgctacttttccctagctttttcaagagttaaataagccacctgtcaaacataatttctgcatatttgctttccttagcctatttcccttttccactgactttaatgaagtctttcagattctcttaaacacagtgaaggattcaaaggcagagccacacttcctttccatcctgcagcacttactcttggtccgaaatgactatgaggccaggtaagatgctgtgcttatgagaagttttgaatttgagcctaagtggagagagtgaattccttaaattcaaagattgttctgtaaaaggaaaatgtaaagacaaagacccaagattagggttcattagtcaccgatataaaggaagttgtcttatttctttaatccaactcaaaggcatccctatggcagaggtcagagtgtataaggtgaaatgccgttctgtttttggaggggagtaggtaaataggatgaagatgttagcaaacagaagtggcaatttaaaattctttctagtttcctggaagtatagatttagcaatagcactatccatcacaggaaggatcaaacgcaaatttttagatgggaaagtattggcactaggagcggatggcaagaagttttgattatttgaagtagatagggtagggtagctgatgtggaaaaaggagttttcttagcatggcagcaatacttgtgttaactttacaaaagtttttccaggtctctcagttgtcagagcaattacgttttcttggtcctgaatacttctgaaaattatattttgattttcctttgatgaccctgtttttattctcttgtagacctcagtactataagttgattgaagaatgtatttcccagatagttctgcacaagaacggggctgatcctgacttcaagtgccggcacctccagattgagattgagggattaattggtaagcatactcttctatctggctcctccaagtattgcttcttcctttcattttgcatcttgtttcagtgaaaatgtcagagaagatacctttccagtccccagatagttctatttttgtcctttcttaggtcataaccagcatctttgctaggaatctataggtctttagtttatttttagataaagcac

SEQ ID NO: 450 - DNA, 3544 bp, Homo sapiens
atgatttgtaaatcaaaccaggatgcttgaagatgaaccttgtggggttttttttgttgtttttttttaagagacagagtctcactctgtcacctaggctggagtgcagtggcacgatctcggctcactgcagcctccgcctcccggtttcacgcaattctcctgcccctcagcctccccagtagctgggactacaggcgcgtgctgccatgcctggctaatttctttattttctttttttttgagacagagtttcgttctttttgcccaggctggagtgcaatggcgcgatcttggctcactgcaacttctgcctcccgggttcaagcaattctcctgcctcagcttcccgagtagcgccatcacatctggctaatttttttttttttttgagatggagtctcactctgtcgccaggctggagtgcggtggtgcagtctcggcttactcccgggttcaagtgatgcttctgccccagcctcccgagtggctgggatgacaggcgcccgccaccatgtccagataatttttgtatttttagtagagatgtggtttcactgtgtcttgaactcctgacctcatggccaggctggtcttgaattcctgaccttgtgatcgtgacctcatgatccgccagcctcggcctcccaaagtgctgggattacaagggtgagccacctcacccagcctaattttgtatttttagtagtgacggggtttctccatgttggtcgggctggtctcaaactcctgacctcaggtgatccgtctgcctcggcctcccagggtgctgagattacaggcatgagccaccacgcgcgacctggctaatttcttttgcattttagtagagagagggtttcgctgtgttgcccaggctggtctcgaactcctgagctcaggcaatctgcctgcctcagcctcccaaagtactaggattacaggcacgagccactgcgcctggtcagccttgtggtttttcacactgaaagggtatgtggtggtgtggactgatgtgacaggaagaccagttaatttgtggactctcacttaaataaagttaccttgaagtagtatgaatacaggctttttgtaatttattttaacttaatatgaagaatatttattccttgagaagcaacctaaggcattaaatagggcttgctctttgcaaaaagtcagtagcattgtttctgcttctctctcccagatcaagcactgcgcctagcagaaattttactacctctccaaaatcatcagcaagtccctattcctcagtgtctgcctctctcattgcaaatggtgatagcactagcacctgtgggatgcacagttccggtgtcagcaggggtggatctggcttttctgcttcgtataattgtcaggagccaccatcctctcatatacaacctgggctctgtggacttggaaacctgggaaacacctgcttcatgaactccgctttgcagtgtttgagcaacactgcaccactgactgactactttctcaaagatgagtatgaagccgaaatcaacagagacaaccctctggggatgaaaggggaaattgcagaagcctatgctgaactcattaagcagatgtggtctggaagggacgcccatgtggcacctcgcatgttcaaaactcaagtaggacgttttgctcctcaattttctggctaccagcaacaagattctcaggagctgctggcctttcttctagatggattgcatgaagatctgaaccgggtaaagaaaaagccctacttggagctgaaggatgccaatgggcggccagatgcggtggtggcaaaggaagcctgggagaatcacaggttgaggaatgattctgtgattgtggatactttccatggcctcttcaaatctactttggtttgcccagaatgtgctaaggtttctgtgacctttgacccattttgctatctaacgctgccactgcccttgaagaaagatcgagttatggaggttttcctggttcctgctgaccctcactgcagacctactcagtaccgtgtgactgtgccgctgatgggggctgtgtccgacctgtgcgaggctctctccaggctgtctggcattgctgcagaaaatatggtggtcgcagatgtgtataatcaccgattccacaaaattttccaaatggatgaaggtttaaaccacatcatgcctcgggatgacattttcgtgtacgaggtctgcagcacttccgtggatggctcggaatgtgtcacgcttccagtctacttcagggagaggaagtccaggccatcaagcacttcctccgcatcagcgctatatgggcagccactattgctttctgtccccaagcacaagttaacccttgagtctttgtaccaggctgtttgtgatcgtatcagccgctatgtgaaacagcctttacctgatgagtttggcagctcacccttggagccaggggcctgcaatggctccaggaacagctgtgaaggagaagatgaggaagaaatggagcatcaggaagaaggcaaagagcagctttcagaaacagaaggcagtggggaagatgagccaggaaatgaccccagtgagaccacccaaaagaagatcaaaggccagccctgcccaaaaaggctttttaccttcagtcttgtgaactcctatggaacagctgacataaattcacttgcagctgatggaaaactacttaaactcaactctcgatctacactggccatggattgggacagtgaaactcggagactttactatgatgagcaagaatctgaggcctacgagaagcatgtgagcatgttgcagcctcagaagaagaagaagaccacagtggccctgagagactgcatcgagctcttcaccaccatggagacccttggggagcatgacccctggtactgtcccaactgtaagaagcatcaacaggccacaaaaaagtttgacctatggtccttgcccaagatcctggtggtccacctcaaacgtttctcctacaacagatactggagggataagctcgacacagtcgtagaattcccaatcagagggctgaacatgtccgagtttgtctgtaacctgtcagcaaggccttatgtgtacgacctcattgccgtgtccaatcattatggagccatgggggttggccactacactgcatatgcgaagaacaaactgaatggtaaatggtattactttgatgatagcaacgtgtccctggcctctgaggatcagatagtgactaaagcagcttatgtgctattttaccaacgtcgagatgatgaattttataagacaccttcacttagcagttctggttcctctgatggagggacacgaccaagcagctctcagcagggctttggggatgatgaggcttgcagcatggacaccaactaatgctgactccacgatcctgccaccctgtagcgccagtgtaatcccccaggagaacatctttgacactctgcagactgctagtgttctgtctaaaaaccagacaaggaaatacccttcttttatgagcagaaggaacc

SEQ ID NO: 451 - DNA, 3409 bp, Homo sapiens
gatgatgcgccggtccctggagcgcacacagcagctggagctgaaaaagaagtattcgtggggagcaccactggccattggacccggaggacatgatggtttagcagccagcaccctccctccggatgcagggaccactgccgcagctgccgagtccaccaacgcatgtgacaaactttcaacatcaactatgagtttgccaaagccaacggagcctcccatgaataaacgcctgtcttcatccaccgtggcaatatcctattccccagaccgagctcctcttggccctcttaacccttcttacaagtcttcacccactcgaaacattgagaagaagaaagctacatctacgtctacatctggtgcaggagatgttgggaaagaagccctttcaggaggagaggcctctctggtggagaaggtgaagcgggggcaacgaacagcaacttctcttcctgttgtgaacttcgggtcccctctgagaagatgtgagttttctggaggcattcctaagagaccatcttctcctgtgatatccaagacagctactaaagcttatccacagtctccaaagacaacgaaacctccctacccagggtctcctgtgaagtaccgcttacctgccctttctggccaagacatgcccaagaggaaagcggagaaagagaagagcaacaaggaaagggaaggtaccttggctcagcaggctgctggcccgcaaggagaggaagccctagagaagcatgtagtggacaagcatgccagcgagaagcatgctgctgccgcaggagggaaagccgaaaacagcgcagccttggggaagcccacagcaggcaccactgatgcaggagaggctgcgaagatcttggctgaaaagagaagacaggcccggctgcagaaggaacaggaggagcaagaacgactggagaaggaagaacaagataggctggagagagaggaattgaaaagaaaggcagaggaggaaaggcttcgcctagaagaggaagcccgaaagcaggaagaagaaaggaagcggcaggaagaggaaaagaaaaaacaggaaggggaagagaaaagaaaggcaggcgaggaggccaagcggaaggctgaggaggagctgttgttgaaagaaaagcaagaacaagaaaaacaagagaaagccatgattgaaaagcagaaagaagcagcagaaacaaaggcccgggaggtagctgaacagatgcgtctcgagagagaacagattatgctgcagattgagcaggagagactggagagaaagaagagaatagatgaaatcatgaagagaacaaggaaaagtgatgtgtctccacaagtgaagaaagaagaccccaaagtgggggtccagcctgctgtgtgtgtggaaaagaagacaaaactggttgtccccaacaaaatggaaatcagtggattgaacacctgccaggaagttaatggtgtggatcacgctgccccagaaacttatccccaagacattttctctaatgggcttaagccagctgggggactcattcatctggatgcccttgatgggaaatcaaatagcctggatgattcaactgaagaagttcagtctatggatgtgagtcctgtttcaaaagaagagcttatctctatcccggaattttcaccagtgagtgaaatgattcctggggtgtctctggaccaaaatggaactggtaatgcccgagcacttcaagatctcttagatttcactggtcccccgacattccccaagagatccagtgaaaatctcagcctggacgactgtaacaaaaaccttatcgaaggatttaacagtcctggccaagaaactcctctcaacaccttctgttgacaaatacagcatccctttaataaaaggtgtttggagaacccgtaaagctgctgatagtcaaatccgagctactagctgcttgaagaagcttctgtcacccttaccgctggatcccaaattattagctcggaatgtaactgtattcctaggtagtatgtcaaacactggccactcttggtagaaaccttgaaactttcaccttgctgggctttagcaaagtttccttttacagttctgtttatgagcttcagctactgataaagcacttcctgaacttctctattatcatagtgaccctctgaataacctgagtgactggctcggcaattcgctttataaccattcttattcccaaagttggagcacataaacatttagatgtcttttcctgtaaaatattctagacatttacccaaactctagttcaacatatactcaacttgcactgtatatctccctgtcttttttgagacagagaagaaattcaggaggttccccatctccagagtttctctgttggaaagcagtatcaagaagcctttaaaaaattgttgttaagctttgccacctgcagaaatgcattgccccacattattcttctggggttaaagtagtaagtttggttgaggaaggaagtcaaaacagtcagtaatgatttctgttctcttatgcatattcgtgtatacatgggcaactgaatctagcaaggactctttcgtgtcacaccttaaaatcttcatgctgtagtcactccagaccatggagtggctttccagctgaatgaatcctatgtctcgcgtgcaggtggttggttttcaatgttcttgctaattttttttctattggatcttgggagttttctttgtttgctcctgtgtttgcccagctttaataaaaccaggcgcaaacaaaaaccatagcattctgaaacaatagggggcccacattggacccagtatgtcactttaatggacttcaagaaaaaatctgaatgggaaaaatgacactagaatgtatactccacacattttatgccatataatggtgtgttttcttaattttgtttcttgtggcgaaatgtggctttcaaattaaaatgaccttttcttctttgaaactttttgttttgacttgtataattaagggtttggaaagattcataattctgagagaggtttgcaaccaggagatacaaagaagtctcagtagtaatcttgttcatgtgcttttacagccagctacatttaagaatgtattagttacagaaattatatgtctgtgtatgtgtctctactcaataaagtacatgcctccacataatgcggtgctgtccatctcggcaaatactggccaagtccctttatgacaggcacacagaaaccatagcatggtctggctttcagaaaatgcctctcatctttcctggaaccttattttgctaaatgtctgttttcttgtgatttgttgtacctcacagcaccattgtgaccatggtgatgcctcatttgcatgatatgtaccttgtgtttaatgtgaaatacattttcattgaag

SEQ ID NO: 452 - DNA, 2864 bp, Homo sapiens
attttgagccgctgccgccattggagtgggccccccccctttcccccttcgcctcctgacaggaaaggtttaagggggacagagccctgggaggccgggccgggctcgggggccaccccgggggcccgggccatggatgtgcgccgtctgaaggtgaacgaacttcgcgaggagctgcagcgccgcggcctggacactcgaggcctcaaggccgagcttgctgagcggctgcagccaccgccgcccgggctgcagccgcacgcggagcccggcggctactcggggccggacggacattatgccatggacaatattaccaggcagaaccaattctacgatacccaagtcatcaaacaagaaaacgagtcaggctacgagaggagaccactggaaatggagcagcagcaggcctatcgtccagaaatgaagacagagatgaagcaaggagcacccaccagcttcctcccgcctgaagcttctcaactcaagccagacaggcagcaattccagagtcgaaagaggccttatgaagaaaaccggggacgggggtactttgagcaccgagaggataggaggggccgctctcctcagcctcctgctgaagaggatgaagatgactttgatgatacccttgttgctattgacacctataactgcgacctccacttcaaggtggcccgagatcggagtagtggctatccgctcacaattgagggctttgcatacctgtggtcaggagcccgtgccagctatggggtcagaaggggccgtgtatgcttcgagatgaaggattttgaatgtggaaatgacgtggaactgtcttttaccaagaatggaaagtggatgggcattgctttccgaatccagaaggaagccttggggggtcaggccctctatcctcatgtcctggtgaagaattgcgcagtggagttcaacttcggacagagagcagagccctactgttctgtcctcccggggtttaccttcatccagcaccttccccttagtgagcgtatccggggcaccgttggaccaaagagcaaggcagaatgtgagattctgatgatggtgggcctgcctgctgctggcaagaccacatgggccatcaaacatgcagcctccaacccttccaagaagtacaacatcctgggtaccaatgccatcatggataagatgcgggtgatgggcctacgccggcagcggaactatgctggccgctgggatgtcctgatccagcaggccacccagtgcctcaaccgcctcatccagattgctgcccgcaagaaacgcaactatatcctagatcagacaagtgtttatgggtcagcccagagacgaaaaatgagaccatttgaaggcttccagcgcaaagctatagtaatttgtcccactgacgaggacctaaaagaccgaacaataaagcgaaccgacgaggaagggaaggatgtcccagatcatgcggtcttagaaatgaaagccaacttcacgttgccagatgttggggacttcctggatgaggttctgttcattgagctgcagcgggaggaagcggacaagctagtgaggcagtacaacgaggaaggccgcaaggctgggccaccccctgaaaagcgctttgacaaccgaggtggtggtggcttccggggccgcgggggtggtggtggcttccagcgctatgaaaaccgaggaccccctggaggcaaccgtggcggcttccagaaccgagggggaggcagcggtggaggaggcaactaccgaggaggtttcaaccgcagcggaggtggtggctatagccagaaccgctggggtaacaacaaccgggataacaacaactccaacaacagaggcagctacaaccggtctccccagcaacagccgccaccacagcagcctccgccaccacagccaccaccccagcagccaccgccaccacccagctacagccctgctcggaaccccccaggggccagcacctacaataagaacagcaacatccctggctcaagcgccaataccagcacccccaccgtcagcagctacagccctccacagagctttggcttttttccctccactttccagccgagttacagccagccaccctacaaccagggaggttacagccagggctacacagccccaccgcctccacctccaccaccacctgcctacaactatgggagctacggcggttacaacccggccccctataccccaccgccaccccccaccgcacagacctaccctcagcccagctataaccagtatcagcagtatgcccagcagtggaaccagtactatcagaaccagggccagtggccgccatactacgggaactacgactacgggagctactccgggaacacacagggtggcacaagtacacagtagccagtgtgacccagaggctcccggaggcccctgccagcttcctccaccagcgcctgcctcggcccctcctctgcccccgccagatcccgtggtgctggggatggggtcatcccagggctgcctccctccagcccactgcctcccctctgaggggcttccttcccctccatagggccaggcatttttttctggattcaaacaggcaacaatgaccttttattttctgtttgtccccacctccccagccttccacctcctgttcttcctaccttcttcctttttgactaaataatccccacctcccttgatcatacagtgaggctacagtgactgaggggagaatcccctcctgttcactctcccaaccctgctccagcccctcagcttcccagaccctcatgcagttggttgtaaattctcccaggagctgttttactgtctacttttcaggattaaaaaaaaaatcaaaactt

SEQ ID NO: 453 - DNA, 3908 bp, Homo sapiens
agcagcagcagcaacagacgacgacgacctctcaggtgcaagttccacagatccagggccaggcccagtccccagcacagatcaaagctgtgggcaagctgacgccggaacacctcatcaaaatgcagaagcagaaactgcagatgcccccgcagcccccaccgccacaggcccagtctgcgcccccgcagccaacagcccaagtgcaagtgcagacctcgcagccgccgcagcagcagagcccccagctcacgacggtcacggccccaaggcctggtgccctgctgacgggcaccaccgtggccaacctccaggtggcccggctcctgcaggcgcaagggcagatgcagacccaggcaccccagccagcccaggtggccttggcgaagcctccggtggtgtccgtcccggcagctgtggtctcctcaccgggagtcaccaccctgcccatgaacgtcgcggggatcagcgtggcgatcggtcagccacagaaggcagcaggacagaccgtggtggcccagcccgtgcacatgcagcagctgctgaagctgaagcagcaggccgtccagcagcagaaggccatccagccccaggctgcacagggcccggcagccgtccagcagaagatcaccgcacagcagatcaccacccctggcgcgcagcagaaggttgcctacgccgcgcagccggcccttaagacccagtttcttaccacacccatctcccaggcccagaaactggccggggcccagcaagtgcagacccagatccaggttgcaaaacttcctcaagttgttcaacagcaaacacccgtggccagcatccagcaagttgcctctgcttcccagcaggcttctccacagactgtggcgctcacgcaggcgacggcggccgggcagcaggtgcagatgatccctgcagtgaccgcgactgcccaggtggttcagcagaaactcattcagcagcaggtggtgaccacggcgtcggccccgctccagactccaggcgctcccaacccagcccaggtgcccgccagctccgacagcccaagccagcagcccaagttacagatgagggtccctgctgtcaggctaaagacacctactaagcctccgtgccagtagtcagggcagcagggctgcctctcatctaaagcaaaactaccttcctcacagaaaacgctttattagtgaaccttgggaccatgtcacgcaagagattcagcactgggaaagatataattgaaacaaaatagtgtaatcattttattaaaatgcatcccacactgcaggacaaatggtccttatggagtgccgcgttctctgtactacgtggctcatggaaaaagtgacaacatggcttcctctaaatcatttcacctttcagtccccacccgcacccgtcccctagagccatagtactgtgttctgaaagccatttagaatttctttgtgagcatgtagtgctttgcacgccacagaagccgtctgccgtgtgtgaggagcatacaatggactttctaaagataaggcgtgggcttccacagtgtctgccagagtttagttctttataccttactgaaaaatgcctcgtggtcttcgcagaggggaaggcctgtctaaagtcaatcatccgagatgggttttccattccaaagaaaggcaatatggttccttccttccctcctaaaatatgacttaacttttaagagaaatgttctgacacccacctaaacacacaaggcacgttcctggcctgtgttcaagggaaatgatcagtcattgcattgttattccaaagagcagccaacagtggcctcccccaggccctaccctgcaatgggattcgctttcatttaatggaaacttctgggactgatgcccaactcagtgcactcaagacgcatctccagttttcgggggaagctggtatttgacatagtgtgttaaacagctcctgagaacctttgggacactctgccatggctggcgtgaggcccagaggaccacgcagaggcaatggtagtacagatgtcacagctgagggtacgatgaggcctgggctcagtgagccaggacgaatgtgacagacaccccttgctgccacagtcagccctttgacgaaggtgggctggtgattctggaagtattggctatagcggtgggcccagtcaactcttccttgtggacttacgacagcagattttctctaggataagcttgtgtggttctgccagtgaagcagagaaccacctgtgctgttgtggaaggcgtgccgttgagggggaaaacgaagcccagtatttgctactgtttttcctttttttactatgacaggaaaataaatgcaattttagtggaattgattgacagtgtctccttactttgaagttttcaccaaagcaaaaaggtccatatccaatagtatcctttgtgctgtggcttgattttggcctattttacattatttggtccaggaaattaggttatattaggttttttgtatactaaaaatcagttatggcacaataaagattttctgtttttaaattgtatttcatctgcttcctccccattctctcactttaagtgacattgaggaaggtattctgtcccacaggtttctgtggacagcgatacagcaggagtcagtgaaatcaactggggagctcacttgagctcttgataagaaatgtggagaaaagtaaaaaccaagctttgaagaaacagaagaaattaatcttttagttagttgaacataccaaagcagaggactggaatctgtttgttctaaccaacccgttctccctggcttggcacgtgccgtgagagcgcagcttgccggagggagggccgctgtgtgcgcctcacatctggctcccagtggaaacttttactcctcctcatccgcagatgtgatagaactgaagtatctaggaattctgcctttgtcatttgttttaatttgtgtgccctgttcattttttttgtctttcccaaatcttggtagtctccttatagttgaagataaaatgttgagtgcacttattttagaatatcctagacataactgtctaagtaaaagcgctctattaatctaaaacactacaagagaatttaacaccatctctcaaatgcttttttggagagcttaatgggattctgaatatttgcaatgtggagtttccgccccgatctcacgtcagtgagggtctcctgtctctcaagtgtgtttcctttggctgttccctaatacaaaacacggacatatttttactcgtagcactcaatttagtaacttctagatgctaccgttgacctgagttaaattcatttagtcgtgtacgtaaaaactctccttttagtgtgttattttcttggccttcccttttaaaggttaaagtttctaacctaagaattaagtacgcgttcaggaagctgttgtctaggccttccccttgtgaatctgggttcattccaatacggcaagtaagagttggaaactttgagaacacagactataaaggcagcagcccgaacactgtcagactctaattggcgaccctgggaaacagttgccctgctattctttaaagaaagacgtttattctgatgataaaaacagttagccagactgtttttaaagcacctggcgggaagcagaaggttggatccaagcccttgttcagatttggtgcctgataagacaggggtttctctttttgtgacctttattattattattttgttaactgttgtaaccagttagctgttgtgttttaagatagaaaggaacaagactaaaattgtaaatactttgtaaacatcagcatttgtacttgaatagtaggattttaaagggcattgatagcataccaaacaaaaggcaaaataaagtgacctttttat

SEQ ID NO: 454 - DNA, 4819 bp, Homo sapiens
aaaaaagcccttctccagcaacgtgatcgcgccgcccaagttccctcgcgcggcccctctcacttccaagtcctggatggaggataacgctttccggaccgataatggtaacaatctgttgccatttcaggaccggagtaggccctatgatacttttaacttgcactcgttggagaactccttaatggatatgataaggactgatcatgaacctctgaaaggtaaacactaccctcccagtggcccaccaatgagtttcgctgatataatgtggaggaatcattttgcaggacgcatggggataaatttccatcatccaggaacagataatattatggcacttaacagtcgatcttctctctttccctttgaagatgccttcctggatgatagccatggtgatcaagccttgtcatctggcttaagttctcccactcgctgtcaaaatggggaacgagtagaacgctactctagaaaggtgtttgttggaggacttcctcctgatattgatgaagatgagatcactgccagctttcgcaggtttggacctctcgtagtagactggcctcacaaagctgaaagcaagtcttattttcctcctaaaggctatgcctttctgctgttccaagaggaaagctcagtacaagctttgatagatgcctgcctagaagaagatgggaaactctacctgtgtgtgtcaagccccaccatcaaggacaagccagtgcaaattcgaccatggaacctaagtgacagtgactttgtaatggatggttctcagcctttggaccccagaaaaactatctttgttgggggagttccacgaccccttcgagctgttgaactggcaatgatcatggaccgtttgtacggtggtgtctgctatgctggcattgatacggacccagagctgaagtaccccaaaggtgctggccgcgtggcattctccaatcagcagagttacattgcagccatcagcgctcgttttgtgcagcttcagcacaatgacattgacaaacgggttgaagtaaagccatatgtgctggatgatcagatgtgtgatgagtgccagggcacacgctgtggtgggaagtttgccccgttcttctgtgccaacgtcacctgtctgcagtattactgtgaatactgctgggcgagcatacattcccgagccgggcgggagttccacaaaccgctggtgaaggagggaggcgaccgccctcgtcacgtcccgttccgctggagctgagccacgggccgacccagccacaagtactggagtagataacaaggagggaaaagagagggcactgcctcagggcttacagtgttctggaaatctgtgcattcgttctcgatttttaaagaagaattgggtctttttattattattattattatttacagtcatattactgaactcagtgtccagtataatgcagaattgcagagtgtagaatggtactgatttgcactttgattcacacctttgtctgcttggtaccttaattttttatacctgatttgtcactcgtgacagtatgtagactgccattctcatcagcggccgtcaggctactgtctgtgattcttttgtttgttgttgtggtgttgttctgattgttttgaactggagcatgcacttattttcagaaacttagagagttgcccctaggacaagacttaccaaaggtaatactcgtgagtaggtggcagatgtagcaaaaacttcacaacaattcagcaatcattagctcgggtcacttagagtaaggataacccttcatgaaaataagcctttagttgctctctattttgacttgtaaggatacctcataagctggatcttttatttttccttcatgtttgatttttgttttgccgaggattttggttagatcttttagtattatgtaaatttatgctgcaatagcttttgctgctattaaaatggtattattaataccataatactctattcaggctaggatatcaattaaacacaaaaacccaacaacacacttttgtgattttagggatagagtcagctgccgaacggagatcagaatagacttcagaaagcttcggtggaaggtcactatttctgactgcatgtttacttaatcaggttgctgcatgcaataaattttatatccaatgtctagtataaaacgttcccacaatgcacaaattaagaatctatataagctataaaaatactcattttttaaaaaaagtctttttcattcaaagaattggtaattgaccggaggaaggcatgcctcaataaatggaatgctctgaatgggaagagcccataacagaatgacctatattacaaccgatataaaacctaggtgtaggatattcttcaagcaaatttgtggatggtagatgaagtactttgcggtgctctgttatatattgtgaaatttattttacatagtaaagtgattatgtctaactgtgatcaaacttaactgtttaaagcctctgtcagacattaatgaacttgacagttcataactgatatattataaactaacacatgagctcttagttacaatctcttagtgcttgcaccattttacatagcttcagaccttgtccagaaaaccaaagagctcatcttagcttacaaacactaagaatatatacaggatatagagataagttgtcagattgacaaactaggcacatttttaagaaagttgtgtaatggtgatgctaaagaaatgtctgtacaaaataagatggcctgggcagagttggttgtctgagtgagaaactaactacttaattccctggatttatcctgttaagcttgagtagaatgaaggcctgctagcactagcgtggtctagaatgaaggcctgctagcactagcgtggacatttttctagcattcacccttgggctgcagatagtaatatataaacacacacaatgattgcaagactatgtaaatctttttttaatcttcttcctatgttttggaattctggggacaatctgactggatatgacactgcagaatagatttaagtcgctgtgttttctgtgctgtgatgtccttgtactgtcttaagttagtgttgcttgtttttgttttgttctcccatgtttagttgcaattactggctctcaagctatagtttgttttcaaaaaggaaaaacaaaatagttttttactggattaaaaatgcttattttagaatcctcccctttttgaggctttttggtaataattgcttttttccagcccaggtgtggttttgtttgtttttttctatgtttgtgggttttttttcatctgtacaagaaattttgttatgcactactactttttgtattctagacagttttcaaaagttggcagatttttttttttgtttttaaggaaaaaggcatgctttctgactgacatgatcttttgcaatacctcaattttgaaatataggaaagaaaatgatattttctaagtaagtttattcagaaaaatatatattaatttaattctgcaagaaaatgatttaacagatgggtaactttatttttttcatgcttatttgtgttttttgaaaatgaagaagttagagctttataactataatattaaagatcatatctaacctacagaaatctacctaattatgtgaaagaagcaaaactttttgaagaagcacccctctttcatgtattaaaataacactgagatttttttaaaagctggaagattgtacagcataaagctaaagtgaaggcaaaaaacattgtcctgaagaataggttacaaaaaataaactccatttggtgctgaaagttgtgaatagatggtggaaactactttcccttaatttgtatatttctaatcaagtgttgattgtgcgcgactgaccaggattgtgaaagagttcttctgtttgtatttttttaaagagaacttttttagtttattaaattataacatgttcccttttgttttgtaaataaatgtgcccccaagttgttaatgttatattaaaagagagggtccttcaaaaaaattattttttaaaacacagaggtgttctgacctgcaacttgactgggaagcccctgggtaacacaggtcctgctgtggcctttccttggtgtgacacttgaactagtcgattttttgaaggctataacctaacctcgactatttgttgttatgtgcaatactgtttgtactgtttgtataaaaaatagaaaaaaaaaagaaaagaaaaaaggcataaatctttattgcagatttattttcattgcaaactttagacattgtgattcactgaaatcatttttctactgtcaaatatgtaccttttcttcatgctggtattttttcaatagtaatgtagcctttgtactgagacaaattttcattgttatttttagaaagattttttgctaagaaaaaaattaaacatatttacatatttttcattttatttcgtattttctttaaggagtgctttctcaatcattaatagagttgtttctgggagggactttcatatctggtcaatgtcataatattattttgtatttttattggaataaattaattttatgatgctaattctttaaaagtttatttttttcattttcagttatttttgaagctaaaacctttgtaatattgttactaaagtgtctagttttttgaaatgcaaagctttatgtattaacttgccgatgtggtttacaatagtgtgacaacgatgaaaatgcttggttatgtaaagtgattggaaatgtaatggataattgggtaataaaatgacagaatgagcag

SEQ ID NO: 455 - DNA, 5248 bp, Homo sapiens
atgatcccgatattttaaaagctgagatctccactacaagattaaggtatggccaacttaaaaattgaactgtcaaaattggacagtgaggcctggcctggggcactggatattgagaaggaaaaactgatgctgattaatgaaaaagaagaacttttgaaagagcttcagttcgtcaccccacagaaacgtacccaagatgaattagaacgcctagaagctgaaaggcagcggctggaagaagagttgctgtctgtgaggggaacaccaagcagagctctggccgagagattgagattggaagagagaagaaaagagctgctacagaaacttgaagaaactactaaattaactacttatttgcattcacaacttaaaagcctctctgccagcaccctgtccatgtcatctgggagcagcctgggttccctggcatcgagtcggggctctctgaacacctccagcagagggtcactcaactccctcagttccaccgaactctattacagcagtcaaagtgatcagatagatgtggattatcagtataaactggacttccttctgcaagagaaaagcggttacattccttctggacccatcaccaccatccatgaaaacgaggtggtcaagtcccctagccagcctggccagagtggactctgtggagtggcagctgcagcaacaggccacactcctccactggctgaggccccgaagtctgtggcctccctgtcctcgaggtcctccctttcctccttgtctcctccaggctctcccttggttttggaaggcacgtttcccatgtcttcttctcatgatgcctctctccatcagttcactgctgactttgaagactgtgagttgagtagccattttgcagatatcagcctcatcgaaaatcagattttgctggattctgattcaggaggagcctcccagtctctttcagaggataaagaccttaatgaatgtgctagggagccattatatgaaggaactgcagatgtggaaaaatcattaccaaaaagaagagtgatccacttgcttggggagaaaaccacttgtgtgtcggctgctgtgtctgatgagtctgtggctggagacagtggggtctatgaagctttcgtgaaacaacctagtgaaatggaagatgtcacatacagtgaagaggatgtagccattgtagagaccgcccaggttcagataggactcagatacaatgcaaaaagttcaagtttcatggtgattatagcacagctccgaaaccttcatgccttcttgatacctcatacttcaaaagtatattttagggttgccgttcttccttcctcaactgatgtcagctgtctgtttcgcacaaaagttcatccgcccacagaatccattttattcaatgatgtgttcagagtcgccatttcccaaacagccttacaacagaagacactgagggtagacctttgctctgtcagtaaacaccgaagggaagaatgcctggctggaactcagatcagcctggcagatttaccattttccagtgaggttttcactctatggtataacttgcttccttccaagcaaatgccttgcaaaaagaatgaagaaaatgaggactctgtatttcaaccaaaccagccgttagtagattctatagacttggatgcagtgtcagccttacttgcaagaacatcagctgagttgttagctgtggaacaagaattagcacaagaagaagaagaagaatcaggacaagaagagccaaggggcccagatggagactggctaacaatgctaagagaggcctctcatgaaattgtggctgaaaaagaggctgaagttaaattgccagaggacagtagctgtacagaagatttaagttcatgcactagtgtgcctgagatgaatgaagacgggaacaggaaagaaagcaactgtgccaaagacctcagaagtcagccacctactagaataccaacactggttgacaaagagacaaacactgatgaagccgctaatgacaatatggcagttcgccccaaagagcgcagcagcctgagctctagacagcatccgtttgtgaggagcagtgtgatagtgcgctcacagaccttttctccaggagagcggaaccagtacatctgcaggttaaatcggagtgacagtgacagttcaaccctggctaaaaaatcactgtttgtgagaaactccaccgaacgccgcagtttgagggtcaaaaggacggtttgccagtcagtccttagaagaacaacacaggaatgcccagtgcggacatctctagacttagaactggaccttcaggcatctctgacccggcagagccgcctcaatgatgagctgcaggcgctgagggacttgcggcagaagctggaggaactgaaagctcagggagagactgaccttccaccaggcgtgctggaggatgagaggttccagaggcttctgaagcaagctgagaagcaggctgaacagtccaaagaagagcagaagcaaggtctgaatgcagagaagttgatgaggcaagtctccaaggacgtgtgtcggctccgggagcagagccagaaggtgcctcggcaggtgcagtccttcagggagaagattgcctacttcaccagagcaaagataagcatcccatccctgccagctgatgatgtgtgattacatgacttaagaaattattttttcatctgttcactttcttagggagggtaaaagactgaagatttgtgtttttgttttggtgtttggttttttttggtaacgtaactgtcaactcttgaagaacttttatttcacatcagattttcaacacattaatttgtaaagtaccttgagtgtaatttttatatgcttaaaaaagaaaaaatcatataagaaagatgggataacctggtacacaaatgttgcccagtatgtgcgcattgccagtggacttcattttgtaaaaatggaatagaggcagtaccccaccatgtgtactgttgagccggctgttgagaaacaacttggttcagccggtggttttgcttctcctttgtgttcctgtgagtaggctgtgccgatggcagcagcgccacgtggtatctgtgcgctggcgaggagaggagcgctttccatttggaggcagtgtgagcacacgctggagtgcagcgttccaaagtccgcccgaaatggatgctgcgtccacggccatcacctgtgcgggaacacctggtttccttaagacaatttcctttttgtccttttatatttttctaaagaaaactaagatataaactaccaagtgctcttaagaataaaaataagaataagaatacaaaggagcactactcttggctacacgaaagatcttgggattcatgacactgagggcagggagaagaaagaacaccagccacgcagagatacaaataagctcatcaaatgagcagctggtttgtctcactcagcctgaatttgcattaagtgttcaaaagtgagtttctggcttgcactagtgttttgccctaaatctaaggatggtgcctagtggtggccctgtgttctgaggacagagagagctggaggggtggagggaaatgcatcggcactcatttggtgtaaccaagaagagggggaaagatgtcttgatagaatcaaagttgccaaaaacaaagaagagtttatcaagcagatttctaacatttagtagaaactacttcatagctctcatttttagggggttctatctataatttatggtaaatagttgggaggcaaagggaagaatgtgtgtggggggattattaatttgaagtataagctgaattgtttattaaaaagcctattttggatgaacaagtttagagagataaactgactaatgtgtcctccagtttagaatttcaccttacccgacccaggcacttcttaaaaacacagatcctcagtgcagctctgccagcatcaaggcttttaaaatatgtagtatttaggccatttaaaccatacttattactcaataacccaagaaacaattttgggttagccatctaatatagcaaataaaatagattttttaaagaaatccaaaattgtcttaaaggaatggaccccttgaagaaaaaaaaaaaaagttttgttcctcagttagaatgctcactagctcactagcaagaatttttattttcttgaaagcaattatatatattttggaaagttcatgttattggaattgaagttcaaattaagcaacttctgagcctagaactttaattactttttcctaaatgtcccaacacttacatacaaatttctttgaagacataactggacatggcagacactgctttgaacaaaaaccagcctagtgaattgactgagtacagtcctttaaggctgcccagttcattctattagatgactaaggaaaactagaaaaagaatacagttcacccttgtcaaggtcaaatgtgaaagacagaagtttatttaatgtagaggtaaatgaaggtgagctgttttcagcatcttagtttgaccatgaaaatgtctatagaattatgtgtagttgttccgtacgattttattttcttcatttatttatttacagtcttatttatgttctgtttaatatatagtttgattctggccattttaaatatttgacacagaagagactatattggaatatttacagctttataagtctttcatcagattagctgttgactttttgtaatacaaaaagtttcagacaagtattaaagaataaaatctgtctcaggctggtagttagcagttgtgaccaagatgcttttggttgttgtatttcacaaaatttcctcatttctaacatgagaaatgaacttattttaatataatcctttttctacactttaaaagtcagcaatagtgttatgtatttataggcagcttttaataatcttgtcatatttgtactaacccaaatgattcacagtgacaaaacattttaataacttgatcacaaaaccatatggacaaatatgaattttaatattataaatactatttttaaaaggtagaatttattcgcacagggtaaaaagaatgtaatatttagttctcaagtttgaattatcagtatattattacaattttgtatatcagaatcttaagtgttacaggtacaaaaagaatattgctagccaaatgaacaaagtttagctaaatctctgtagcatgcaaatcaaataaattaaaattttttgct

SEQ ID NO: 456 - DNA, 3642 bp, Homo sapiens
agcggggcgcctgcgcgcctgcgcgccgctggccgacggaggggagcctgccgatgccgagcgggtgctacgtcccgcggtcggagccgcgtcttctcccggctccgccaccagccggggctcgggtgggggccctccggagtgcgcagggcgacggccccacctccggccactgggacggcggcgcggagaaggcagactttaacgccaaaaggaaaaagaaagtggcagagatacaccaggctctgaacagtgatcccactgatgtggctgcccttagacgcatggctatcagtgaaggagggctcctgactgatgagatcagacgaaaagtgtggcccaagctcctcaatgtcaatgccaatgacccacctcctatatcagggaagaacctacggcagatgagcaaggactaccaacaagtgttgctggacgtccggcggtcattgcggcggttccctcctggcatgccagagggacagagagaagggctccaggaagaactgattgacatcatcctcctcatcttggagcgcaaccctcagctgcactactaccagggctaccatgacattgtggtcacatttctgctggtggtaggcgagaggctagcaacatccctggtagaaaaattatctacccaccacctcagggattttatggatccaacaatggacaacaccaagcatatattaaactatctgatgcccatcattgaccaggtgaatccagagctccatgacttcatgcagagtgctgaggtagggaccatctttgccctcagctggctcatcacctggtttgggcatgtcctgtctgacttcaggcacgtcgtgcggttatatgacttcttcctggcctgccacccactgatgccgatttactttgcagccgtgattgtgttgtatcgcgagcaggaagtcctggactgtgactgtgacatggcctcggtccaccacctgttgtcccagatccctcaggacttgccctatgagacactgatcagcagagcaggagacctttttgttcagtttcccccatccgaacttgctcgggaggccgctgcccaacagcaagctgagaggacggcagcctctactttcaaagactttgagctggcatcagcccagcagaggcctgatatggtgctgcggcagcggtttcggggacttctgcggcctgaagatcgaacaaaagatgtcctgaccaagccaaggaccaaccgctttgtgaaattggcagtgatggggctgacagtggcacttggagcggctgcactggctgtggtgaaaagtgccctggaatgggcccctaagtttcagctgcagctgtttccctgaaagccagagaagaccttcctcttacatcacattaaggtctcacccttccatggaaggattgggaggggtggaatttcctttattaaaagggtttctgtccagagttttttattcctgccaccctgccctgcccgtttgtgtttgcctttacttcagaggccaatagcagagcctacctgacacagaggggacctgggggcctggcacagaatcttatgcctctcccagtgggcttttggatgggctctctgccacctccctggtgttggaggaagtgggtttctgaagcttgcagctgcttttgcaacctgctgggcctgggctgccctagttaccgggaacctcctagtcaccccatagaaggtgaactggaacatgggatgccctcttactgctcctgcttgcctgcatcagatggacacagaaggagggggctgctgctgaaggagtcaggcttgggatggagagcaagaggccaaaggactcgtctgggagcatgatcggcccctcttactagcagctccatcagctgatcagaaatcagagacagaagggaactaggttactcgttaaatcctacctattttcagcctagaaatcacatgggcgtttccagtcaagtgggaaggaagctcatttttagggcctagacctagactagttttgcctgccttttttttcctccctgctttcttctacaagccacacaacattgcttataaaaggtacttttattactatttttagaatatatacaccccatatgtaaattaccctcacttttaaagtaataatagttccttcacggaaaaaaaaatagttctcatcagaaggatgagcttctaagatcctgaattttactttctacttgattaacattttcgctttagccagagttgctatttgcaaacagctttccacttccaaagtgccactttctgaccggtttttcttcctgttttcctcaaatcatcctactcccaaataggcacccactcactaccttggcgtcgttttttgggtctgacttgtctcgtcaactgctggtctctcccacctggttggaaatgtcgttggaaacttgcaaagactctccagaccttagggaacaagaggcatcactcagtccttctgggacagcttccctgtaagcaaagccaggtttgttttagattcactctggcctgaaaaaaaaagtgccttttgctgctttaaagaattggggtatatggtatgaagcagccatgtacttgtattttcctggtctttcctgggcactcttctctcttggcagatgttttcttaaagtgaacacaccagaagcactctaccccaccatatccagtcctctttgcatgcctgttgtgtgcagggtggagggtgtcccacgtgccagagcagctgggagccctgtccgctgagttacactaagcactttatttttatttattttattattattttcttttttctgagatggagtctcactctgttgcccaggctggagtgcagtggtgtagtctcagctcactgcaacctccgcctcccaagttcaggcaattctcgctgcctcagcctcccgagtagctgggactacaggcacctgctaccacgcctggctaatttttgtatttttagtagagatggggtttcgccacgttggccaggctggtctcgaactcctgacctcaggtgatctgcccgtctcgtcctcccaaagtgctgggattacaggtgtgagccaccacgcccagccaccactacgcactttaaaaccaaaaaaagctcaaagggatggatcattgtccatggctcaggagccccactgtggggtaagtgtgatgtcgatggattaatttagacagtggtgtattcatcagggcaaaggaaattcttccagaggtgatgatgcggcagatattcccagtgctctcccaaagcaagctggccctcttgtcatcctctcagtgggcggcaccagctgcccctccttccacaagtactcaagcctgtttgtaaatactgaaggaattgatggggttgaggaaaggaggtgcatgtgaccagggtcccaaggccacagcttttcagatcctaggaagcaagtggcatttgcttgagttgtggcctcggaaggagaatgtttatctgttttctaactttgctgacaccaggattctccctgtcattgagaagaaagcattatctaattaccttcaggtggtttacttattctgtaaagaatatgtgtaaatattttgtacagagccctgtatcaaataaacagccatatgtggttact

SEQ ID NO: 457 - DNA, 3543 bp, Homo sapiens
gttgacgacctagctgggtaaggtcttcacgtcctagtaagaaatcggtggctgcgggaggtcttcgtggactgggactcgaacctgaccgacccggcagtgcgggggagaagcccgaggaagattgaccaattttgtaattctagaaacatggtccatggggtgcatctcgttatgttgcccaggctgtttgccaactcctgggctcaagcagtccttccaccttggtctcccaaagtgctggtataacaggcatgagccaccacaccaggccagcagcaggattcttgaagaatgtggatcagtgacattcagggatgtggccattgacttctctcaggaggagtgggagtgcctgcagcctgatcagaggaccttgtacagggatgtgatgttggagaactacagccacctgatatcactgggaagttccatttctaagccagatgtgattacattactagagcaagagaaagagccctggattgttatttggagtcaaaatatggacctgagaaaatatctccagaaaatgatatttttgaaataaatttacccaaacatgttataaagcaaataagtaaaacacttggcctcgaggccttttattttagaaatgactcagaatatagaagtagatttgagggacgacagggacatcaagaaggatatatcaaccagaagatcatcagctatgaagaaatgcctgcttatactcatgcttctcctattcataatacacataaaccatatgaatgtaaggaatgtgggaaatactttagttgtggttcaaatcttattcagcatcagagtattcatactggagagaaaccctataaatgcaaagaatgtgggaaagcctttcaacttcacatacaacttactcgacatcagaaatttcatactggtgagaaaacttttgaatgtaaggaatgtggaaaagcctttaatcttcccacccagcttaatcgccataagaacattcacacagttaagaaactgtttgaatgtaaggaatgtgggaagtcttttaatcgtagctcaaaccttactcagcatcaaagtattcatgctggtgtaaaaccatatcaatgtaaggagtgtgggaaagcctttaatcgtggttcaaatcttattcagcatcaaaaaattcattccaatgagaaaccctttgtatgtagggaatgtgagatggtctttcgatatcattaccaactcattgaacattgccgaattcatactggcgagaaaccctttgaatgtaaagaatgcagaaaggcctttactcttctgacaaagcttgttcgacatcagaagattcatatgggtgagaagccctttgaatgcagggaatgcgggaaggcctttagtctcctcaatcagcttaatcgccataagaatattcacacaggtgaaaaaccatttgaatgtaaagaatgtgggaagtcctttaatcgtagttcaaaccttattcaacaccagggtattcatgctgatgtaaaaccatatgaatgtaaggagtgtgggaaaggctttaatcgtggtgcaaatcttattcagcatcaaaaaattcattccaatgagaaaccctttgtatgtagggaatgtgagatggcctttcgatatcattaccaacttattcaacattgccaaattcatactggtgggaaaccctttgaatgtaaagaatgtggaaaggcctttagtcttctgacacagcttgctcgacataagaacattcatactggtgagaaaccatttgaatgtaaagactgtgggaaggccttcaatcgtggctcgaaccttgttcaacatcagagtattcacactggtgagaagccctatgaatgtaaggagtgtgggaaggcttttagacttcacctacaactttctcaacatgagaaaactcatacaggtgagaaaccctttgaatgtaaggaatgtgggaaattctttcgtcgtggttcaaatcttaatcaacatcgaagtattcataccggaaagaaaccctttgaatgtaaggaatgtgggaaagcctttcgacttcatatgcaccttattcgacatcagaaatttcatactggtgaggagccctttgaatgtaaggaatgtggcaaggccttcagtcttcacacccagcttaatcaccataagaacattcacacaggtgagaagccatttaaatgtaaagaatgtgggaagtcctttaatcgtgtctcaaaccttgttcaacatcagagtattcatgctggtgtaaaaccatatgaatgtaaggagtgtgggaaaggctttagtcgtgtttcaaaccttattcagcatcagaaaactcattccagtgcgaaaccctttgtatgtaaggagtgtaggaagacctttagatatcattaccagcttactgaacattaccgaattcatactggtgagaaaccctttgaatgtaaagaatgcggaaaggcctttggtcttctgacacagcttgctcaacatcagatcattcatactggtgagaagccatttaaatgtaaggagtgtgggaaggcctttaatcgtggctcaaaccttgttcaacctcagagtattcatactggtgagaaaccctatgaatgtaaggagtgtgggaaggcttttagacttcacctacaactttctctgcatcaaaaacttgtacaggtgagaaaccctttgaatgtaagaaatgtgggacagccttcagacatcagtagcaacttactgaacatcagaaaattcatacttgggtgaaaacctttgaatgtaaggaatgtgggaaggcctttcaatatcattaccaatttcatggacattatagatttcatattcgtgagaacccttatgaatgtcaaggatgtgggaaatgctttaccagtggtagaaaccttagagtacatcagagaattcatactggtgagaaaccatatcaatgtgaagaatgtgggaaagcctttagtcatagttcaaacctgttaaacatgttaaaattcatactgatgagaaaccctatgaatgtaaggaatgtgaaaaggcctttagcagtaattatgatcttactgtacatctgagaatccgtactgctgagaaaccctgtgagtgtaaagaatgtggaaaacttttggatttagcttagtctttactgcacatcaaagaattcatactggtatgaaccgtatgaatgtaaagaatgtggaaagacctttacttgtagctcgagccttgttcaacatgttaaaattcatactggtgagcaaccctgtgaatgtaaaggatgtgggaagacctttagacttagttcagtcctttctgcacatcacagaattcatactggcatgaaaccctatgaatgtgaagaatgtgagcaaacccttactgtgaatgatctgcttacgcaacatcagaaaattcattatagttagaagttttatgaatataaggagtgtagacaagccttcactgtgtatgaaaaatttactcaacaccagagaattcatattgatgagaaatcctgtgaacataaaagatggtgaacct

SEQ ID NO: 458 - DNA, 4521 bp, Homo sapiens
tatgccctaaaatctgggccctgggcaagcacacagcaggagagacaggcccccggtgggctatgggcagaacacgagggctccggcaattgggctgacaccgtccctgagcgtcagggatggccctgccagcacctgccgttctctgggcctcactttccttgaaagggtgggaaaggtggccctgaccccctttccagctctgcgcacctgaagactctcaggacccccaccccagggccgtggcttcatttgcttcattcagaaacacattgcaaaatggaaaatcaagcgttagggtaaagaaagaaagtagccagaaagagcccccaggccctcccaaggcgacatggccaacacagagttcccaggccagcccctgccctggacgagcggcctcctggggccactgggccacctggagcagctcccagagctaacagcacaagacagcatagccacattctctggggaggggttgggggacctggaggccccccatggggtcttggggatcaacgacgcggccactcagctgccctgggggtcttgggggttggtcagtgacatggccactcggctgccctgggggtctcgggggtcactgacaccgacccgtggatgtcctgggcccccgagggggcggcaggcagaggtgcggcgcgagcatgcgagagcgccaggcggccaccagggggcagcaccggcctccgccccgccccccgcccccagccataccttgcagtgtgcggtacccaccaggccgccgcaggagggagctctggccggtcagctcgtgcacgatgcagttatcagcctcggtgtcgggtgctgtgggcaccacgtgctgtgggcaagcagcgctgagccatgcacgggctggccgggcgccccccacgctggcgtctccacctgcctggctgctcacctggtcagactcccgttcctggggccactggtccagctctgctagctccagctcccgagcctcatacccctttgccgcctccttcctctgcagagaccagcgtcttgagcccaaaccagctccacaccccacccagaggcaggaggtcctgagaccagccccatggcctggcctcagcccacccaccatgggtggcaggtgctcacctggccggaggggcggtacgcgcggagcttgcgcagagaggccgtggcgtagcacagcagcaggaggacgccggggctggcatacacaggccagtccaggccggtgttgaggaccagcgcgtgggggctggagcagttggtgggacccacgaagtccttgagacccagcaccctgtccagagaagacccgtcacagcctaccaccccagaggcagtggggccacaggggctagacgagccaggtgggcgggaccagggtggcaggaaaaaggggctgtgtggcaagccgttacctagcccagatgccggcaggcgggagcagagcctgtgccaagggcatctggtagcagtagaggcagatgagatggccggcgccgaagcaccccaccgcggcgcagagtctgttgaagccccgagtgctgatgggaaagtggcaggcccaccaggtgcagagggccaggaagagcagcagtcatcagggaactcccaagacccctcccagtgtgactgccagtgccccctgcctcggtgcgtacctgccagtgcaagcagtgttacggccaggacccgcccagccgccaccagcagccagtgggccgtgactcggaaacgagcggccagccgtgacctccgtgtaggggccagcgttgctgcttcctgcagccctgccgtcgggctggcatccacatccctctcatcatcatcctgccaaggtcacggacaggggcaaggtcaggtgtatcgcactgacgccacctctccagcccacacctgcccagccaggagcgtgggaggcggccacatccacagctgctcctctgagggccacaggacagcctccccgggcacaggccccagccgtccctgaggtctgcctgacaccttcctacttcctcactcaagctcacagttcctgcaggccttcctggtagcagctcccaccctggccgaagacccagggtctgtcctgccaagcccaggcacgtgatgaccttgccaggtacagacagaccacagactgtcctataccacctcatctccccgaaccacgcacccagggagcagcggggccctgtctataccccggggggtctctagagaccaagggggcctgagggacatggccaggctccagggtctcctgtgtacccctgccagccttctgggtggctctgcctggaagataggggtggtactcctgccctccccaagcctctggggggacagaggtggccagctgcctagaagaagtgacaggccggcctggggctggggagagagacctgccgggcctgttttccctggacctgactaaagatttcccagaacacagccatttcccaaacaccagggaaagccaggtgtggtggaaagaacacggctgtcgtcagatgccctggctctggcctggctgccaccggcccagtgtccccatctgtgactcgggggctctcctggtggctgaggcgccaggtgcccgggctgagaccgcaggctgtggggctggacgataggccccaccccagctctgacagtctccgtgctctgcaggccgaggcaagtcacagcctctcggagcctattccccttctgtcaaatgggatgggggcttgacgggacagatgaaccagaccagtcctgtcctcacaggcctccagggctgcaggggctgctgggagactccgaggccagggtaacagggagatcagggcaggagaggcccaggccctgagcccacccctctcagagaccacacagcagctgggggcgaggctggatcagaacgcagggcgccatcgctcaccccacccacagcctggccctggccctggccctgggaaatcttctgagcagagccgtgaaaaatgagcatttctgggagtggaaagaacagaggcagctgctgtgagagaacaggtgtgaggccaccgaggggcaggcccggccctgacttggggtatgaggccaccgaggggcaggcccggccctgacttggggtgtgaggccaccgaggggcaggcccggccctgacttgggccccacgtgccgcagccatgctgcagacgcccctcaccctcctctagcggccagcacccctcgggctggctggcacactccgtcgcatgcctgcaaacacgtgtgtgtgttgcccatatgtgggagtgagggtcgcccgggggccctgccaggccgggtcatggggcttctagatctttcggaacggtatcctgcaggtgcctggtgcccccagctcactctgaagtctgtccacgctggccgcccagggcgcagctgcacactcaggctcccatcacaccaagatgaagatgaccagagtccagccacccagccccttcccagcagccaaactctaggaagctcatgccccatgcccccatcagcatggaggggctgacgagggaggggcgggtctcttggaggacaggcagcagcacagtcctcatgagcgctggaccccctcaaatgcccggaaaagccacttgacctccaggtccccgttcccacttctgaaatgcgggcaccagccttgccccatggggtggcgacaggacaggcaggagggcaggccgcctctgcaggctgagcaggtgtactcgacctaccgtgtggcttggggaacccctttccctctcgggactcctctagaagttgaggcccatgtgcgtggcgagcatcagctatctgacgagtgggcactgggagggtgaggtgggaggaggctgggtgcccggggcagggagttcgtgggccaggacacccaggtggccataaatcctggctgagcctggggatggcaagtgtgggcccaggcagggacgagagggtctgagcagtcaacgttgggtgtcgcaggccccagctcatgccctgtccgtgtgagggggccatagctcagagattcccggggccggacctccaagtcttgtagcagctaaagttcactctgcctcccactccgaggacagaggccctgcttcaggcccgtcgctcctggggtccaggcccctgctggggctctgggccgacagcctgtttgcctgtaagtgcatggggcctgctggggccgccccttctcagcccttctgcagtggctctccagccagacccactgcccagcactgcaggtttccaccaccgcgtggccccgaataattcccctgtgaagagttcctaagggcacagatgccatgtcggggcgtggaggtttctgactagaggcagagcccgagtagaaacaggtctgaacggatggaactgcaggctgggccccggggtgggatttggaacttcctcctctctttaacaccaacttacaaccaaaacgtctacatctgttttaaaaagattaaaataaccctcaaaatg

SEQ ID NO: 459 - DNA, 3772 bp, Homo sapiens
gagcaagggggccactcagcagtggtcaggtcacacggctagaggggcacagtggggcctgggcctctggtccctactcctctggtccctctgtctcctggccctgggccagtcaccttagatgatttgatcgctgcggttgtagtcctgggatttaaatctcctgccctgggtggccctatgcagcatgaggccgccagttgctggttgagaagacaactgactccccggcggctgagttctcgctggtggaggacgtggcgctgcactttgcctgcttgatgggccgcctgaacgagcagcgcctcttccagcctgacctctgcgacgtggacttggtgctggtgccccagcgcagcgtctttccggcacacaagggtgtgctagccgcctacagccagttcttccactcactcttcacccagaacaagcagctgcagcgtgtggagctgtccctggaggcactggcacctggtggcctgcagcagatcctcaacttcatctatacgtccaagctgctggtcaacgcggccaacgtccacgaggtgctcagcgccgcctcattgctgcagatggctgacatcgctgcgtcctgccaagagctgctggacgcccgctctctaggcccaccaggtccgggcactgtggccctggcccagccggctgccagctgcactccagctgcgccgccctactactgtgacatcaagcaggaggccgacaccccaggcctgcccaagatctatgcccgcgagggccgtgacccttactcggtgcgtgttgaggacggggcagggactgctggtggcacagtgcctgccaccattgggccagcccagcccttctttaaggaggagaaggagggtggtgtcgaggaggccggtgggcctccagccagcttgtgcaagctggagggtggagaagagttggaggaagagcttgggggttctggcacctacagccgcagggagcaatcccagatcatcgtggaggtgaacctcaacaaccagacactgcacgtgtccacggggccagaggggaagccaggtgccgggccaagcccggccaccgtggttctgggccgggaggacgggccgcagagacactcggacgaggaggaggagggcgacgaggaggaggaggaggaagaagaggaagaggaaggtggtggcagtggacgggaggaggaggaggaagagggtggcagtcagggagaagaggaagaagaggaggaggacgggcacagtgagcaggaagaggaagaggaggagaagcagcaccatccatgccagaagtgcccacgagttttcaacaaccgctggtacctggagaaacacatgaatgtgacccacagccgcatgcagatctgcgaccagtgcggcaagcgcttcctgctggagagcgagctgctgctgcacaggcagacagactgcgagcgcaacatccagtgtgtgacatgtggcaaagctttcaagaagctttggtccctccatgagcataacaagattgtgcacggctacgcagagaagaagttctcatgcgagatctgtgagaagaagttctacaccatggcccacgtgcgtaagcacatggttgcccacaccaaggacatgcccttcacctgcgagacctgcggaaagtccttcaagcgcagcatgtccctcaaggtgcactcactgcagcactcaggggagaagccgttcagatgtgagaactgcaatgagcgcttccagtacaagtaccagctgcggtcacacatgagcatccacattggccacaagcagttcatgtgccaatggtgcggcaaggacttcaacatgaagcagtacttcgatgagcacatgaagacccacacaggagagaagccgtacatctgcgagatctgtggcaagagcttcaccagccggcccaacatgaagcggcaccggcgcacgcacacgggcgagaagccgtacccgtgcgacgtgtgtggccagcgcttccgcttctccaacatgctcaaggcccacaaggagaagtgcttccgcgtcagccacaccctggccggcgacggcgtccccgctgccccaggcctgcccccaacccagccccaggcgcacgcactgcccctgctcccggggctgccccagaccctgccgcccccgccccacctgccgcccccgcctccgctcttccccaccactgccagccccggcgggaggatgaacgccaacaactagctgccgagctgcacccgtgcacccgctggggcctggagtcagggcccactccaggagggacccactgccttcccggggagcacagtagtgcgggcctgggccctgctccacctccagaagtggctggatgtaccctgcctgaggccccgacgaggaggggtatgcaggctggcaggccccagagctggtggagggcatctcactcccaagtgccccccctttctgtgactccttgaagcctttacttttttttttttttggaagtgaaggaaaaagaaactatttacagcactcccctccaggtgaggggggtgctgggggtctgcagcagaaagaaaggggcctgggcagcaggtgtggccagtccctctgccaaggcctgtgccagaggggttggccagttggagcctgggtcagcctcagcagcctatccccatgtcctctatgcccctaatttgcttcctcatcttggagggtttggggagaagttggcgtgccacccccacaacccctgaggaggtgtagacccagtctgagagccgcaagcactgaggcagggcctgagactggacctgggtgagcgtggggggtggagggtggcgaggtgcggagactgcagaccagtgcttcactgtgtggagtggggcaggcaggggctggaccccagggacttgccttccccacccactctgctgccagcaggcccagggatccctgacctgcaccaggtggcaccaagggtcctgagtcctggagatgtccccagaagctgctgtgcctcacagcgctgtgagccagaccctccttgggcagacaggctgactggcagcaccagctttgggggcagagtcctaggatgaggcttgggcagtgctggtagggtttcaaggtgctattagtggggcaggggcagggcggctgctcacagagcaccccagttcctcaccagctactctggccatatatcccacaccagaaggaacaagtgtggctgtgtccatctctgctcccccaaaggcccgctctaggccttatcctccctctaggtcctgccacaacctgtccctggctggctccagcgtcctcgtccctcctgggcctgtgcaccggtgggtggggcgcccatagcactgccggtaaaggagcctgcatgttcaggcccctcgggggattggggggactggggaggcgcagcctagacccaattgcttgcccccatgaggctagcactaataggaaacccttttttgttgtcatttaatgtctttattcctgcctttaatatggggaggaaggttccataagctacatgtttcctagttaagctctttcctattgtgtttatacagttttgtttgttatactctttgcaccttaaacccccaccactccccgacactattgccttcccagcatggctggagtgggaagaggcttgggccccgggggaatggttagggggactgaacccctctgaccttatgaggcccatggcactggggcagggagctggggacattttaatcatcaataaacgaagcactttattctgt

SEQ ID NO: 460 - DNA, 3513 bp, Homo sapiens
tttccattttatttaccagttttcagagaagtactactacaaaggtgaccaataaaaggatttttggttttgtgtcattatgaactcatgaattctaaacatatttgaatgagtttcaatccattgcacttatttgtttgctttttttgatgcttaaattgaactatccctggctagtaggagcttattgagatgggctactctgtccttttgacacgccctcatcattctgtgagcctttctcacatcttccatgacaatatgtgctaggttcatcctgtactctccctgccccaagcctggaaacagccatttctttcttgcttttcttttctttattttctttttctttttctttcttttctttcctttcctttctttccttacctttcctttctttctttcctttcctttgtctctctctttctttcttttcttttactttatttttctttcctttctttcctctctctctctctttctttcttttttctttttctttcttttttttttttttttttttgagtcagagtctttctctgtcgcccaggctggagtgcagtggcacaatctcggttcactgcaacctctgccttctgggttcaagcaattctcctgtctcagcctcttgagtagctgggattacaggcacatgccaccacacccggctgatttttgtatttttgcagagatggggtttcaccatgttggccaggctggtcttgaactcctgacctgcctggtgatccacctgccttggcctcccaaagtgctgggattacaggcgtgagccactgagcctggccagaaacagctatttctttaaggagcactgattcctttcagtggagagtggcattcaaaggccaagatttgggggctcggcatgcttgctgctactagattggtcattgtttctaggccctttcaaaagatggagctaggaaataattgttttttaaagagaagatgatacatcatgggttcatatggacatcctggctatgttttgggattttttttgcattttattttttttaaaatttttttaatttttaatttttgaggggacatagtaagtgtatatatttatggagatgttttgatataggcatgcattgtgtaataatcacatcatggagaatgaggtatgcatctcctcaagcatttatcctgtgtgttacaaacaatccacttacactctttatttttttttttttgagacaaagtctctgtcgcccaggctgcagtgcagtggcacagtctcggctcactgcaatctctgccctctgggttcaagtgattctcctgcctcagcctcttgagattacaggcgcacaacaccacgcccagctaatttttgtatttttggtagagacggggtttcaccatgttggccaggctggtctcgaactcctagtttcatgtgatccgcccgccttggcttcctaaagtgcttggattacaggtgagagccactgtgcctggctacttacacttttagttattttaactggctctgttttgaaggtaagccagcagtatttagtgatgatcattcaccaaatattcacacccaccgaattcctcagctttataatctgcaagaagccctgttttactgcatccaattgtgttattttaccatagatgacagtctttggagtctagacagtgacagagggcgctttaaggcatttttatatagaaacccctgtggggctggctgtgggctgtcacacttcttactgtctctgcttgttccatcccctcctctgcttcattcccttgctttttctctgcccccttgccccggccatggctccaggtttctgacgttccgatgactggcaaccccgcagaagaaggtgatgtccccagaagcagtccacctgtggcttttacagaggtcctccaggcaccggccatcaggattcccccctcctcccctctctgtggcctgggtggctcccccagagaccaggcctcagggcccgatgcgagcgagggggccaccgggcctttcctggagcccagtcagcagcaggcagaggccacatggggagtatcgagtgagaatggaggggggctggaggctgtgagtgggtcagaggagctgctcggtgaggacaccatcgaccaggagctggagcagctctacctgtctcacctgagccgcctacgggctgctgtggctgcgggtggggcagggggtggtggggagggctccacagatggagggatgtcccccagccatcccctgggcatactgacggaccgcgacctgatcttgaagtggcctggccctgagcgggccctgaacagcgccctggctgaggagatcacgctgcactatgcccggctggggcgtggcgtggagctcatcaaggacaccgaagaccctgatgatgaaggggagggtgaagaggggctctctgtcacaccctccagcccagaaggggacagccccaaggaatcgcctccagaaatcctctccggggcccgttctgtggtagccacgatgggagatgtgtggctcccatgggcagagggctcaggatgtgacggccctgtggttctgggtacagagggtcagttcattggggatcctgagaaagggatgggcaaggacaccagctctttgcacatgaatagggtgatagctggggtgactgagtccctgggggaggccgggacagaagcccagatagaggtcaccagtgagtgggcaggcagcttggatcccatatctggcaaggagccagcctctcccgtccttctgcaggggcaaaatcccaccctcctcagtcccttgggggccgaagtctgtctctctagtgtagccaggcctcatgtgagctcccaggatgaaaaggatgcaggcccaagccttgaacccccaaagaagtctcccaccctagcagtccctgcagaatgtgtgtgtgcactgcctcctcagctccgggggcccttgacccagactctgggggtcctggccgggctagtggtggtccctgtggctctgaacagcggtgtgtccctcctggtgcttgcgctgtgcctctctctggcttggttctcataggctctgcttgtgggatcagcagaggcttaagatgggatacatggcctgtgcagtgaggggacctgggtcctttgcttctgagaatgctcaactgaaagagaggccttctcatccccaagctctccagtcaacacagggctccctgtggtgacaccagtggagatgagggaacgggtagatggtgtgagtgaggggaacttttagagtggaactgggcatgtcctccgcctaccccccgagcctgtatttatttttgtataattctctggatgagggagagtggtcgtgagctggtcttggggcacaattacccagagatatatttattaacagccaacctgtgcaacctgctggagctttatttttaatttaatttatatagagtacctattattatatgccacaatagagctctatgagaaacagtg

SEQ ID NO: 461 - DNA, 3549 bp, Homo sapiens
aaatatttcaatgtaatgcacgtgtcaaagtttttagtaaatttgcaaattcaaacaaagataagacaagacatactggagagaaacactttaaatgtaacgaatgtggcaagtcatttcagaagttctcagacctaactcaacataaaggaattcatgctggagagaaaccctacacttgtgaagaacgtggcaaagactttggatggtacacagacctgaatcaacacaagaaaattcatactggagagaaaccttacaaatgtgaagaatgtggcaaagcctttaataggtcaacaaaccttactgcacataagagaattcacaacagagagaaagcttacacaggtgaagatcgtgacagagcctttggatggtccacaaacctgaatgaatataagaaaattcatactggagataaaccctacaaatgtaaagaatgtgggaaagcctttatgcattcctcacacctgaataaacatgagaaaattcatactggagagaaaccctacaaatgtaaggaatgtggcaaagtcatttcctcatcctcaagctttgctaaacataagaggattcatactggcgagaaaccctttaaatgtttagaatgtagtaaagcctttaatatttccacaacccttactaaacataggagaattcatactggagagaaaccctacacatgtgaagtatgtggcaaagcctttagacagtccgcaaacctttatgtacataggagaattcatactggagagaaaccctacacatgtggagaatgtggcaaaacctttagacagtccgcaaacctttacgtacataggagaattcatactggagagaaaccttacaaatgcgaagactgtggcaaagcctttggacggtacacagccctgaatcaacacaagaaaattcatactggagagaaaccttacaaatgtgaagagtgtggcaaagcctttaatagttcaacaaaccttactgcacataagagaattcacaccagagagaaaccctacacatgtgaagatcgtggcagagcctttggattgtccacaaacctgaatgaatataagaaaattcatactggagataaaccctacaaatgtaaagaatgtgggaaagcctttatacattccttgcacctgaataaacatgagaaaattcatactggaaagaaaccctacaaatgtaagcaatgtggcaaagtcattacctcatcctcaagctttgctaaacataagaggattcatactggcgagaaaccctttgaatgtttagaatgtggtaaagcgtttactagttccacaacccttactaaacataggggaattcatactggagagaaaccctacacatgtgaagtatgtggcaaagcctttagacagtccgcaatcctttatgtacataggagaattcatactggagagaaaccctacacatgtgaagaatgtggcaaaacctttagacagtccgcaaacctttatgtacataggagaattcatactggagagaaaccttacaaatgtgaagagtgtggcaaagcctttggacggtacacagacctgaatcaacacaagaaaattcatactggagagaaactttacaaatgtgaagagtgtggcaaagactttgtatggtacacggacctgaatcaacagaagaaaatttacactggggagaaaccttacaaatgtgaagagtgtggcaaagcctttgccccatcaacagacctgaatcaacacacgaaaattcttactggagagcaaagttacaaatgtgaagagtgtggcaaagcctttggatggtccatagccctgaatcaacacaagaaaattcatactggagaaaaaccttacaaatgtgaagagtgtggcaaagcctttagtaggtcaagaaaccttactacacataggagagttcacactagggagaaaccctacaaatgtgaagatcgtggcagatcctttggatggtccacaaacctgaacgaatataagaaaattcatactggagataaactctacaaatgtaaagaatgtgggaaagtgtttaaacagtcctcacacctgaatagacatgagaaaattcatactggaaagaaaccctacaaatgtaaggaatgtggcgaagtcattacgtcatcctcaagccttgctaaacataagaggattcatacaggtgagaaaccctttaaatgtttagaatgtggtaaagcgtttactagttccacaacccttactaaacataggagaattcatactggagagaaaccctacacatgtgaagaatgtggcaaagcctttagacagtcagcaatcctttatgtacataggagaattcatactggagagaaaccctacacatgtggagaatgtggcaaaacctttagacagtctgcaaatctttatgcgcataagaaaattcatactggagagaaaccctacacgtgtggagactgtggcaaaacctttagacagtctgcaaatctttatgcacataagaaaattcatactggagataaaaccatacaagtgtaaagaatgtggcaaagcctttaagtcatactacagcattcttaaacataagagaactcataccaggggaatgtcttacgaaggtgacgaatgtcgcggtctttaaatgctcctcaatcctttctaatcataagataattcataatgaagagaaactctaaaatgtgaaaaatgtgagaaggcttttaatcacacctcaatctgttgtagacataagagtaattatattgatgagaagccaaattaaaattaaaaatgtggcaaagacttccaattctagtcagttcttaatgtaattcctactgaggaaaacacctggaaatacaaaaaatgtggcaaaacttgtaaccaatgcttagcatttttgcacatgatagtatttatatgtgagactacttgtacaaacataaaaatatacaaaagctattgtctacttgaaatttatagttaataaaagcattataaatgtaatttctgttgaaagaccttttagaaaatataggccattaaagtgaagaatagtcttaagacagagaatacaaagataaagagggctctagtacctgtacttgtatcccagaacttactatatgcattttgtactagaggaaaactctgaagcagttgcttaaactttgttcaacatcagagaatttatattggagagaaatcctacaaatgtaataaatgtggaaaaacctctgttcagaaactgcaggttaagaaaccagaggccaggcgcggtggctcacgcctgtaatcccaacactttgggaggccaaggagggtggatcacctgaggtcgggagttcaaggacagcctgaccaatatggagaaacctcgtctgtactaaaaatacaaaaattagcaggacatggtggtgcatggctgtaatcccagctactcaggaggctgagacaggagaatggcttgaacccaggaggtggaggttgcggtgagctgagatcgtgccattgcactccagcctgggtaacaagagtgaaactctgtctc

SEQ ID NO: 462 - DNA, 4923 bp, Homo sapiens
cttattggtttaaatcagattgcagaaaaataaaagctcaaatattatctgttatgtcaaagttactatttgagctgtagatgctgttttcaaaacagatcatcctccttaaagcacccatctctctccactgacatgtgcccctgtgtccagccgcaccttccagcagagttccctgcaaagacgcttccctgcagcctctgtgggtcaggaattagaatgggtgcagctaggaaggcctgtgtctgcctcgtgatgtttggggcctcacctggaagactcagaagccaggactggcaacatcccgaatcccagtcactcgtgtgtttgatggttgatgctgcctgttgggtgggacctaagctggggctgtcagccagaacacctacacatgacctctgcaagtggcctgggcttccttccaacatggtggctgggttccaagggcaggcatcacatgagagaggtacatggctgggcagaagtcttgtttcctctgtgaccttgcctcagaggacacagagtgtcaattttactccatctgtagtcaacacagtcagagtcccacttagggtctagggtagcagaaatagactctgcctctggatagagagtggcaaggttctagaagagcatgtggactaaaatatgaccatggccatttttggaaaatgtaatttgcaacagtaaataagtgaatgtgtattatgtcagattgtgatcaacacaatggaacaagatagagtaagaggaattgggaccaccaggggtggggcaaggttcttttctgcaaaggcagccaagcagggctcaccgaggagaccacatagcacagcccagcaaaggtgaggctgtcgccaggtggccctctgtggtcggcatcttcctggccagggaattgtgtttgcactgttgtggtggccaccttaaactgagtacttgtttgtagttaacatcacgtgctatatgcttatgttctactgtattgtgtaaaacaagctgaattttacctagatttttgtgttgtacttattctctggtaatatgactggagaagtattttatgtctcaagaattattatgcatttcttatttctctgtcctttagttttgaagggtcagtataaaaatactttattcagtatattctagctcattctccacatacaattatattccaatatttgtagggtttattctctccaagcagcatgatcaatcagaaaattggacagttttaaaaagtggtccagagaaccagcaaatatgaaggcaggctaataaaaatgcatatcactctaacagtttcaaggcagtttcctcgggagactgaggtgggaaggtcgcttgagcccaggagttcaagtcctgcctgggcatcccagtgagaccccacctcttaaaaaaggaaagaaaatggttttttaaatcatttcatttcgtataagattattttgcgaggttggtgcatgacattggagttgcccagcaattggaaaaagacatgagcgtttaatactgggcgttctttctaaggctcttaaagtgaaggcaatcacataaggctatcttgcttcatgggtaattaaggcatttccttctgcagttcccaaatctaatgaagaagaaggaatttctcttttgctgaaatatttcttgtaaggttttcatttcttctcattgctccgactttggaaaaatgttctttttacctctgattttctcttgtaatgtcttcttgaattgtgagtcggggaaaaaagtaaaagattcgctacagattcagacttgcaaaaaaacgcttagaatcttgctgtccgtaaaactgaaacatccagcctcacaaatgtccacatttctctctcatctgtgaaggcccgttgagactgctcagttggtgtctcctctgtccacaggacatggccgtagccgtgtgtggagaagggttgtgatggtggccatcacgagacccagataacaggagtggttagaagcgcagcggaggagcctgtcttcctgggtccgagttgcgtggttaggagcgcagcggaggagccggtcttcctgggtccatgttgcgtggttaggagcgcagcggaggagccggtcttcctgggtttgagttgcagctccacctcttcctggcgggtggcctgggcgagtgcctcacgctcccgtcagtgctctcagctgtaaaatgggaacgatcaggttgtctacctccaagactgttgtcaggattcactcaatgaactcctgtgctttgagtgtctggcgttcagtggcaggggaccctccatgtggggacagagactgccacccattcctttctgaggattcagttcttatagactacagtattactcgtgggagccaaattatgtgcagtgtattttcagattttattgactcacctaagaaaggctcggggacactgttgtgttctgatgtaagagatcacttgttatattatgctttttaaatgttgaaggcaatactcatcagagtatgcattaagtagcattgaaccacatttttaaggtgactcttcaactcaccaagaatatcgtggccgctgaggtcctgcacacctggggatgcgtcgtgggcgccgaggagagcgtagcctcctgttaacgtagcctcctgctgctctttggggtagaccagccgtttccacgcacaggctgcacattgtttcatggcctttgcagttgagcttgtgttggcctctttccgtcgtgaaccatggacgtctctccttgacctcctccctacctgggagaacctggctggccacatagtggaactggaaatgcctccatgctgacgtgtctgcctttcatgaaagatagtagcaaaagttattgttatacgttacaaaaaaccagtttaagacatggacttttttcatatgtacatctgaaaatgactttagcagagattctagctaatacatggagttgtgcttcctaagtattgatagcggcgtatatataggattcccacaatttgcagttgtacagttcaaacaccaaactgtttgtggggaggagggtgatttgcagtgatcttttcctcaactcaggccagtctatacaatactattgatatttactgccttggagcagccttggcagccttgtattctgagctgctgtcagtggtttaaacatttcacttgggttagccttgtcccttcgactaggctggaagcccaagaaggcaggagactcgtctcagatatttcctggtgtccctgaaagtccagcacagtgtgtgcacgtggtatgtccctgatggaaactgcttctcaaagtggaagacagggagcacctctgcaggcctatagggaggtagtaattggatttgcgatgtatttcttttctgcaagtatggttttgtgtgatagaaaccaatgcttcccaaagttcacattgtggaaactgaagccagcaagatactgtgaaggaaaatgcttggagaatgttgcagcctgtgtccctgttggagtttttgctgcccaataccaaattaagggctctgaggaacgcttcctttgaaaataccctagtttaacttaaactctttcttaccaaaccagctatgccacgcccttctgctttggctgtgtagatgctgttccagtcctggggagcacaggtgtgtcctcacgtgcgcttggagaaagtggagttttaattacttacccagcaacattcaggacgtcctgagacctcgtcacttctgatttgggaaaagtctgtgagcaaatgggattttactaatatgaaaacccagaacattccagatgtcctaggaacacaggtcctaggtgttttttttttagcttgggaaagttacgatgacccataagcctgctccacaggatggctgtagcacagacaccttcccctgggacccccattggctgtgtgtcccccagcttctaattcctctagaatatcatgcccaggttaggcactctttctgtattccccaaagcttcataacatggttccatatgtgtcctttttaagagtcttgtcgtttcatactctcattttggcaagacaccttcgtcttagagtgcctacatccatttctgttgaaactggtcatagttagcatttctccatgtctgtgcttttatgccctcctgaaagctggttccatttaggggtgttccctgtcattttcgtgctgtgcaatagttgatgaagataacatagtttataacgcacacctcaaaattcatttcttctcacgtaacaactttcttagtgcttgtacttgtgtgcctcttggagttacttgttgataggacagcgttaagggggtcgtttctttctggtttgaaagttgagaagtaggtcatcactgtcatcgtcatagtggggacacactgagaggttactttctaccaaactgtttcctaattgcactccctgcattgtcttattcagtcccgactttcccaacgcctcgcagcccgatgatacagagacggggcagcagtggagagctcggctcaaagtgcgaagttgtttagatttccacgttacacaaacacacaagcttctcaggggaagagcatgatgaatttctttcttttttttttttttaaactaaaattagaataggccgggcccaatggctcacacctgtggtcctagcactttgggaggccgaggcgggcggatcacgaggtcaggagtttgagaccagcctggacaaaatggtgaaaccccatctgtactaaaaatacaaaaacattagccaggcgtggtggtgggcgcctgtaatcgcagctgcttgggaggctgaggcaggagaattgcttgaacccgggaggcagaggttgcagtgagccgagatcgcgccttgcactccaaccagggagacagtacaagactctgtctc

SEQ ID NO: 463 - DNA, 4355 bp, Homo sapiens
gcgcgcgccagtctggcactctgggagctgggtcctagcaccacagacttatccttcgcctgcactttccgtctttcttctctgggcgcccaccaacaatggatggcaactccctgctctcggtaccaagcaacttggagtcatcacggatgtatgacgttttggaatcgcagcagggcagaggctgtggcagctcaggaagcggcccggggaactccatcacagcctgtaagaaggttcttcgcagcaatagcctgctggagtcaacagactactggttgcagaatcagaggatgccctgccaaattggttttgtagaagacaagtctgaaaactgtgcttctgtctgctttgtgaatcttgatgtgaacaaggatgaatgcagcacagagcacctgcaacagaaactggtcaacgtttcaccagatcttccaaaacttatcagttccatgaatgtccaacaaccaaaagaaaatgaaattgttgtcctaagtgggttagcctctggaaatctccaggcagattttgaagtttcacagtgcccttggctgccagatatctgcttggtccaatgtgcaagagggaacagaccaaacagtaccaactgcatcatctttgaaatcaacaaatttctgattggtctggaactggtgcaggagcgacagctccacctggaaacaaacatcttgaaactggaggatgacacgaactgttccttatcttcaatcgaggaagactttctcaccgcttctgagcacttggaggaggaaagcgaggtggatgaatctaggaacgattatgaaaatataaatgtctcagccaatgttttggaaagtaaacagctaaagggagccacccaggtggaatggaattgcaacaaggaaaagtggctttatgctttggaagacaaatacatcaacaaatatcccacaccattgattaaaacagaacgatctccagaaaacctaacaaagaacacagccttgcagagtctagatccctcagccaagccatcacagtggaaaagagaagctgtggggaatgggagacaagccacacattattatcattcagaagcttttaaaggtcaaatggaaaaatcacaggcactgtatattccaaaagatgcttatttctccatgatggataaagatgtaccttctgcatgtgctgtggcagagcagagaagcaacctaaacccaggagaccatgaagacacaagaaacgctctccctcctagacaagatggagaagtcaccactggcaagtatgctacaaatttagcagaatccgtgctgcaggatgcatttattagattatctcaatctcagtccacattaccccaggaatctgcagtcagtgtttctgtaggaagttctctgcttcccagttgctattccacaaaagatacagtggtttctcggtcatggaatgagctccccaaaatcgtcgttgttcagagtccagatggcagtgatgctgccccacagccaggcatctcctcctggcctgagatggaagtcctgttgaaacctcaagcatcctctctggagagaactccagcagacaaccccagagtgctctagaagtggcgttagcttgtgcagccactgtgattggaactatttccagtccacaggccacagaaagactcaaaatggagcaagtggtctcgaactttcccccagggagcagtggtgcactgcaaactcaagcaccccaaggactcaaggaaccttccatcaatgagtactcctttccatctgctttgtgtggcatgactcaggtggccagtgccgtggctgtctgtggtctgggtgaaagagaagaggtgacatgctcagtggctccaagtggtagcctcccgcctgcagctgaggcttctgaagccatgcccccactttgtggtttagcaagcatggagcttggcaaggaagccattgccgagggattgctcaaggaggctgctctggttttaacaaggcctaatacctacagcagcattggagactttctggactccatgaacaggagaatcatggaaactgcttcaaagtctcagaccctgtgctcagaaaatgtcgtcaggaatgaactggcacataccctgtccaatgttatcctgaggcattccattgatgaagttcaccacaaaaatatgataatcgaccccaatgacaacaggcattcatctgaaattctggacaccttaatggaaagtacaaatcaactgcttttagatgtgatatgcttcacgttcaagaagatgagtcatattgtacggcttggtgaatgtcctgctgtcctttctaaggagaccatcagaaggagggagacagaaccaagctgccagccatctgatccgggtgctagtcaagcttggacaaaagccactgaatcctccagcagctctccacttagcaattcacacaacacgagtcttgtcatcaacaatcttgtggatggcatgtattcaaaacaagacaagggtggagtgaggccaggcctcttcaagaaccccacgctgcagtcacaattatcacgtagtcacagagtgcccgattcttcaactgctacaacatcctccaaggaaatatatctgaaaggaatagcaggagaggatacaaaaagccctcatcacagtgagaatgaatgcagagtctcttccgaaggacaaaggtccccaacggtcagccggtccagaagtggttcccaggaggctgaggagagtatccacccaaacacccaagaaaagtacaactgtgccacatctcgcatcaacgaagttcaagtcaacctgtccttgttaggggatgacctgctgcttcctgctcaatccacgcttcaaacaaagcatccagacatctactgcattacagactttgcggaagaattagcagacacggtcgtctccatggcaactgaaattgcagcgatttgccttgacaactccagtggaaaacaaccctggttttgtgcatggaaaagagggagtgagtttctgatgacacccaacgtaccctgccgatccttgaagaggaagaaagagagccaggggagcgggaccgctgtgaggaaacacaagcctccccggctcagtgagatcaagaggaagacggacgagcaccctgagcttaaagaaaagctgatgaacagggttgtggatgagtccatgaaccttgaagatgtcccagattctgtcaatctttttgccaatgaagtggcagccaagatcatgaacctaacggagttctctatggtggacggcatgtggcaggcgcagggctatccccggaatcggttactgagtggcgacaggtggagccggctgaaggcctccagctgcgaaagcattcctgaggaagactccgaggccagggcctatgtcaacagcctgggcttaatgagcacgctgagccagccggtcagcagggccagctctgtctccaagcagtcgagctgtgagagcatcaccgatgagttttccaggttcatggtgaaccagatggaaaatgaagggagaggatttgagttactgctggattactatgctggcaagaacgccagcagcattctgaactcagccatgcaacaggcgtgccggaaaagtgaccacctcagtgtgaggcctagctgtccctctaagcagtccagcacagagagcatcactgaggagttctacaggtacatgctgagggacatcgaaagagacagcagagaaagtgcctcctccagacggagcagccaggattggacagccggcctgctgtctccttctctgcgatccccagtgtgccacagacagtcgtccatgccagacagcagatccccatgctccaggctgacagtgaatgtgcccatcaaagccaactctttagatggctttgctcagaacttcccacaagatttcctaagcgtgcagccggtcagtagcgcgtcctcatccggtctctgcaaatctgactcttgcttgtatcggagaggtgggactgaccacatcaccaacatgttaattcatgaaacgtgggctagctccattgaggctctcatgcgcaagaacaaaatcattgtggatgatgcagaggaagctgacactgagcctgtttctggtggctctccctcgcaagcagagaagtgtgcaaatagattagctgcgagcaggatgtgcagtgggccaactctgcttgttcaggagtctctcgattgcccgaggaaagactctgttaccgaatgtaaacagcccccagtgtcatctttgagcaaaactgcttctcttacaaaccacagccctttagattctaaaaaagaaacttcctcgtgccaggaccctgtaccaataaaaccactccgacccc

SEQ ID NO: 464 - DNA, 3741 bp, Homo sapiens
agaggagagcggacatggctgcacggttctggcctcctgcccagactagctggctcgtccatggcgtctttggtctgtggggctgtccttcctgtcccctgccgctcccagcaccaggtggccactgttcgtgctgcgatagctgggacgggaggactctgggattttcggggcatggcctgtgctccagctttccattgttgtcactgccccgtgatggagcagagcaggccccagagtctttctgtcccatcccagctgttcccacccagggtagcccaggcctgcattgcttttctcctggacaccctgccaggccctcaggcctggctctccctcttgctggtctagctctggccacctgcccacactgtgcatgctggggccccagcccagccccccaagtgtgggaagggctggcccctgggaggagctgcaccatgttcccaggatactcaagcctccatccttgtccacttctttaaggaatgcagtttattctactccaagagattctgcctcccttgtgtccgggagaacatcaatgcttttcctcaggaaattcggcaagacttggagaaaaggaaagctccatcaaagaggacccccagccagcccggttctcggacgtgagtgcaactggggctaggtcatcgggcggcaccctgcacagagctcctgggccagcctgcgccagggatgctgctgagctgggagccgccatgcctggccttgtttctggaccactgggagcagcactgcagcccaggggagctggagtccagcttggagcagccacaggcccagggagctgtagcaagagggtagtccaaaggcagatgccagacaagacacagccaggaacccggccaggtccccccacatgcccctcagggcccaggcctgagtgagtgctgctcagatgtgactgagagggatgacctccttcagcagggcagctcctaagaggctgcgtgcaggtgcgtgtggggggagatgccacactgtgtcggggccatggtgcactgtaggtggctgcaatggtctctctgtaaggaaaatcactgacagcagctccttctggacccagtctggaaggtctagagggggatagaatttttatttcatatccttatgtggtgcttggaaaatgtttttaaccttgaccatgtattatgtttataattaaaaacccaaagaaccagctcatgtttggaaaaggaatcttccactgaaacatttggatacccgacgttctccctggacacttggcccggcaatagttggggtctcctgggaagctgagtgctggcttctagcctctccagttccctcagactctgtcttcagctcgggcccctccgttctgtctccctcgactccaagtcaggaataccgtgggcttcctgccctcaccccacacctcaagaccatcccactgcttgcctgcttgccccctgccatctcgcactcagccctgggtgcctgtgaagcctggccccactgcctgccgggggttcctgcagcacccccctactccaggctccccatctccctgaagcttccagggtagcagctggtgggacactgatctgtgagctctggaatgtctgcttagaattctgagaggcaggaactgctctgtctttgtaactactcaaggccaactgtcacatgaaggaatgaataaagagtttttactgacttgtgcactgatggactttaagatgctcactgctttaaaagttcccgttgtatgtgacttcagacgaaaggatgtcgtattccggagccagattgtccttgatccattctgtatgttgaaggacacaaaagggactgtgcaggtggagacagcctccatgaggggcgcagggactgttctggcggagggcggaccccacagctggggacttggttcttttagaccaaacagtccatctcgcagcatcactcaaaactcaccaaaaaattttaaaaaatagtttattttttaaaaccattaaggcaaaactgtaccctgaaattaactctgtacattcatcagtcttacagtaggacatcccaaacacagaagttcccatatattcaggatataaatcaatacatgtggtcagttcagtctcctaataggaaaacgaagacccaagatttttttttaaaattaaggttattttatagccattttctaattgcctggaaccaatcagttcatgtgactagaaaaattactttcgctcttctctgcacatccttgattccggaggtcctggatgcccgctccccccaccaggagagaggtatgaagttggagagaggatgctggggcctgtgtggcagttcctactttggaactgcacctttttagcacaaataagaagctgtaagccccaaaatactgagagtataaggcactcactagtagagcacatgtggagagtctgggcccagtccttgctctgggatctgcctcattctcgcgtgtgtttctgtcaaccctctctcttagggttttagcctaatggcattatgaatcccagagggtgtaaccaatatgcaccaagaagttttgccaagttattggaaacaaggtatggggagactcacggggtctgtggtttctgctttctgctttgggttgggccacctggaggatgccagagaaccggcacgtgcaaagaatttccatcaggacatttccaattgccagcgttctttggtaataacccataggtaacagttccctgaagagcagacagctatttactaaacaagaatagtgaagggtctttagcgaaacactgttgtatgaaatcggtggcctctaatacggagtctaaggcctcgctggtggaagtgactagagatagcctctcttgtgctctgtgcatatacagtgtggtaaagggaacagatttccacattgaaagtaaattctgcatggctcaggataaatgaagagctgtgtgtgtgtgtgtgtgtgtgtgtgtgtgcacgcacacgtgtacgcagtgtattttagatgtttgatttcagcttcctttgtgtttccaatagggtcaagagccaggcttttaagaatatgagtcaattaacactgatttcaaaagaatccaaatgtttcttattaaatgagtgattgtaagttagtaaaatatttgtattaggatatttttcaaaaagtcaaatcacagtatttaggatatagctattaacgtagttctttttaccacacaatgtagaaaaaagtgatatttaacatgaacactgtaactttaccaaaaagagtactacatggtcttcatcttttgtgaggtacatgagaaaaggaactgactgtgccttaaaaaaagtgaagttgccaaaagtgagtgattttattgtgaaatgatcggccagtcactcgtctccggggcctgaaggctgaccctctctgacttgaggcacagccaaggcctgggggtccggggaaggtgcccgactgtgtcccagggctgcggcatgcccccccacgcccggtcaccacttttcctaggagccaggctgcgtggactgggggcctgtttgtgcaccagtttgcacggcactttatcaattcattaaatgaatggattttggatgctggatgtgtgggcagaagaggggcaagagaagaggtggcaggtagactccctcctcctcacatttgacccaactagcaaacttaaaaaaaataaaataaaataaaagctgacccccctc

SEQ ID NO: 465 - DNA, 3804 bp, Homo sapiens
ttcatcccctgccaggagagcatagtagctcacatttattgagttcttagtacacgctgggcactgttctaggctttttacatgaattaactcattaaatactcagaacaaaaccatgaggcaggtactattataatattatctccattttgtggacacttaggaaagattaatttgcccgagtttgcacgactaataattttcagaatcgagatttgaatcctggagcctgtgctcctaaccaaaccaccatctgcctctcctgagcccattgtccttaacttcttgcggtcatgtgtgctgaagagaatgtgatcaaagccctggaccttctccctaggaaaacgcaggtaaacagaattttgcatatttcagggactttggggacacctaagacccatctactgtcgacctcagacttagaagctctatttatctcatacatcctggagagaattgtccagggacaaaaacagaagcgccgccagcgccgcaggacttcgcctctgcaaacgtgtgaggagagctgcgctgcgctgagctgcgtggtgacggagatgcccgttcgctcgggatcaggaacggtgagctcctgggaccgcaatgccctgagaacgcagccgggtgctgagcctccggagtccggtagctgaatgaaatacgcagggatcaccagccggacccaaatcttgcgtccctgccagcatcctggagtcctaagaggcagggattggagcggacaggatctcagaactctggtcccgggcgcacaacggcggagtcgctgttcctggtgctgaaacgctcagtcctggaagaacgtggccgcctgcccgcctggtaccgcgccgcggccgctgcggggaactgtccagtgctgaaaacggatgcggcccggcccgcagagctcagacccaagcctgccgcacccagcggagctcgaaccgagctcctggaagcgctgacgcagagcgcagggagagccggagcggcgagctccaagcctggcatggacctgcagagacccgattcctaccagggaggagctggccctgacttcaacgaccacgtcctgcataagaccatcctggtgggtgacagtggtgtgggaaagacgtctctgctggttcagttcgatcagggcaagttcatccccggctccttctcggccactgtgggcatcggattcacgaacaaggtggtgactgtggatggcgtgagagtgaagctgcagatctgggacaccgctgggcaggaacggttccgaagcgtcacccatgcttattacagagatgctcaggccttgcttctgctgtatgacatcaccaacaaatcttctttcgacaacatcagggcctggctcactgagattcatgagtatgcccagagggacgtggtgatcatgctgctaggcaacaaggcggatatgagcagcgaaagagtgatccgttccgaagacggagagaccttggccagggagtacggtgttcccttcctggagaccagcgccaagactggcatgaatgtggagttagcctttctggccatcgccaagtgagagctgggcagggaagggaagtgtgcggggcagggcggcacactccaggaatccagtagggcccggcccctggcccagcccctggacacacctgcattctgcaggctgaggtccatttgctctgggagcactgggccactgggagaggggagggggcggctcagctcctcaccccagcccagcccagcccagcccagcccattgtctcttcttcaagggaactgaaataccgggccgggcatcaggcggatgagcccagcttccagatccgagactatgtagagtcccagaagaagcgctccagctgctgctccttcatgtgaatcccagggggcagagaggaggctctggaggcacacaggatgcagccttccccctcccaggcctggcttattccaagaggctgagccaatggggagaaagatggaggactcactgcacagccgcttcctagcagggagctatactccaactcctacttgagttcctgcggtctccccgcatccacagggagggtaaaacacttagcttttattttaatagtacataatttaataccaaaaaaggcgcctggatccccaaaaaaccgaggctgggagctagtggcccttttgctttctaggacttggggggccggccctccctcctaagcataacaaaggtggtgttgctccagctcagccccaggggacacagatgcactttgggggtgagggcaggtaatgactccatcgcaccctcagttcagctggacagaggctcaggtgaccccagccttcactgtctcccgctctccaggagcttatcttcgccccatctcccaaataagtgggcccttgtgctgtgaggaagaccaaagcctcagggaagatgagagatatggagatgggagggggaggacaaggggcagagagtagggtctagctggctatctctggccttactaacacccccctggaggcatgccccttttctccagcacacaagcacattggggcacctggaaatattggttccaggctcctgttctctggacttcagatcctgggggagcccctcccccccctgaatccctggcttagctaccttcctgcctgtgcacctaaaaacctcaggtcagaactaggaaaagagttttgtttttatttttttgaaatggagtctcgttctgtcgcccaggctgaggtgcagtagtgcaatctccgctcactacaacctccactccctggggctcaagcgatcctcccacctcagcccccgaagtagctgggactataggtgtgtaccatcacacctggctaatttttgtattttttgtagacacagggtttcgccatgttgcccaggctggtcttgaattcctgagctcaagcaacctgccggcctcggcctcccaaagtactgggattacacgcagaaggcaccatgcccaggctagatgtgtcttatcccaatcctttggcaggcatgcagctccacaggcgatttcttcaagcagctgaagtgtttagccctcctgggttaagagccagataaggagaaatccctttcctaggtttggaatgtgttgtgaaaaaaaagagaaatccctggctcctggagctggtgggagacaagattaagcaaacctcccctgacatgtatccctttgaccccaagctctgcctcctccctgaccacccatgccctttcctttaacttctcaaacagataccagggcctaaactgctttacctcccctcctactgagtcaggttaggtggtgggaggtcacccatttccgagttaaaccaatgcaatatgagtaaaacaaagtcatgtgggtatgtctggggtagagagaggggtagcaagttcatgtgtcctccttggtcacatatctcccaaagctctgatccctgccatgggaagtggacaggaaacatgaggtcatgacctgcaggcatctttactgcagctctgccggcctggagggggagagggggaggaagaagtatgcgctgcacatttctgaggctactgcatttgctttcaaggcagaaatcttgctctgagcagtcagcggctccagtttgggcccgataaggaagttctccgtggcctccctcaggcagagcagggaggaggctgacattgccagtctcttctggggcccaaggcaggttgcaggagatccaatcccatagacagctctgggcctcttgcatttgagtttttcagaattaaactgcagtattttggaaagc

SEQ ID NO: 466 - DNA, 4235 bp, Homo sapiens
tgtatatcaaacaagctcctggctgaggctgatgctaagggcccagggaccacacattgtgtaacaaggcattaggagatcctggttgcaaccgtaatttcttcagtccctattttgagattaagaaaacactttcaaaagagacattttgccacctgatcttcatcttgctggttctgaccatcctgcaagaaactgctttgaatggacaggtgagctggtatttaaaggcaaagaatgatccctgagctaaggctggagagcctccaagagtctgcattatggggtgtcagaattcttctttctgggagctaagaagagcattgtttacagagaaaaagtccagagcccttggtctcaaaggcagctttacttcgtatgggagaaatatgaggctgaggaagagatgtatttttttattccaaaggatgcaattttttttctcagcttatcaaagcattacataccctttggaaatcatttgcaagatacatgaaataacaaaaacactgtttaactcattccagagctcaatgtctagcaataaccactatttatcactgttatgtatttacagtgagtttttaagctagatgaagacacaaactggtagataaaacaatggagattacactgcacttttagatttatgtgctgtgattggtttaacaattctgtcagaagcatcaccctgggttattaaggattctctgtatgcataatttttgatggtgatataattttccattgtttgtctccatcataatttccgtaactattcccatattgctgttccttcaagtttttttctaagttttcactgttatgattaatgttgaaataaatctcagtttacattttttgttattgccttacaataaatcgctaggagtgaacttagtggaacaatggtcttagacatttttaggatgtttgttccatactgtcaagtttatttccagaaatactgttttctagaaaggatttttttttttctctccaagaagtgtccctggatccagagactgagcccattctgagagccttcctcctcagggaagctagcactgtgtctcagctatttgctttgcaattgttttcctagtctttcctccctctcattatcagaaaagtggcagtggaggaccaatttggttcttaatgcactcttactaattgcaccgtatgttacacatttgggtcacggtagttttgaattctttttgtgtgtctttggtaaagaaaatgaaaatgagccaacagagaagtggatcatgctgtgggaagcccactacccatgcctccccctgcaccgtccatccctgtaggccaccaggacatgtccataagaggactgggaaaaagacccactcaatattgcctttctggtccattttgatagtctgacagcttaattgcagttaagcttaactgaaattcaattgcctgtactttaattgtgggtgcttccatatcccaaggttctctcttgttgttgttcaaagtcgcacatctttacatgtgaataccatggcctatccaagatgtggtggcctgtatcacctggcagcctcccgtatcatcctggtgttgccattctggtgcagagtcttgtctgtattgagcatgagtcagggcatatcactgaggaccccagggagcccagggtctgcaatgaaggagaaagcatgtaggagacttgggtacagtgatacagatgccaactctgaggtgagcaaggaggaggcatggggaagatgaaccgcaaatcccgaggacagactccaagtggtgggaggaagatcctgaagcacaaatctgataatccctcagtttgatctcagcctggcttcagacacagccaagatcctagactaagcctggatcttggtcacaacctggactcacctccaggctcattgagccctgacacaagcccatgccaacttagattctggccattggagtaaaacactacctggcaaccatttgagcctgaaccccaactgagaataatccaatttttccattcaaggaatatttattgagtatctacagcacgcctaattctgggtcagtttctgactttgaagcctcaccacctcttttcaacattagtgtgaaatttaatgagaaaatacatgtgcccagttagttctgaagccatcctcataaaattagtaaaatcaattgccaggtgttttgacaaaagtagacgcctggaatacaattacagctcaacgtaacggttaaccagcacaccctttggcccacttgcttatagtcacttactttccgtaagtcacagaccaggtcacaaagcactaactttccttagttgctcctatagataacatctttatcattgagaaatatcaagttttccatttaagttatttttcagaactcatattccagtgaaagtaccaatgttagctaacctgaaggtccccaccaaggagctcactcaactgaagaatgcagttgttgctacatcctgatgatttcaccccctaaccctgaccaaatggtgatcacaatcttccagcccctttctctccacaattccctttaaaaccctagcccaaaacccctcagggaggcagatttgaggttcttcctgtctcttcatttggctgcccaatggattatgaaactctttctctgctgtaactcctgctgtttcagtgtattggtctgttactgcacactgagcaaatgagactggtggtcatgtaacatctccattgctcagcagtcaccattatgtaccctcaccacagcctgagccctcctaaccccagtcatggctggggggacagtagtcttttcagagtgtggagagaggttctgtaggacttcctagcagtcctggtaaagacttgtttccacaggccttgcacacattgttctctgggtctcatagctgacacatcctgctgagtcacccccactagctttggtttctggcccatccccctctttctttgcttttatctcagaggaagcactccggacttctggagaaaacctttccttcttcagcttccctccactcacaaagctacttcctctaaactcagatgttctaagtgtagaaaggatggcccctctggggttaggaagaggatatttgcttgcctcttccataggcaattatattttcctttgacactggacagagctctgtatccctgacctgtggcagaatgtggttggaggttgtcacctattagtgactctaagtgactattcctgattcactcggccagtggtgttaggctcctagtggcacaggagggcatgatgtcatgggcctggcttcctcttcaagaggaaatatgtgggcattctgaacatttctgttctgtatgtctgccaatctggcaccctcctaccagacaccaaccttcagagtgcatgagcattgcctgtaattcaaaagtgattctggattctgaataagcgctcagtcatcagatctcactgtgagtgcatctgcatctctctcagagatacaagggttggcagacatggatatactcgtttttactttgcagagaactggaccagcagaacccaccaggatagggctctttttatgttactgttagggtgcacaaaacaatttcccaaaatatagtgcttgggtatgctgattgcttttgagaattgaaaggactcagaaataaacctcagaactatggtctctctctgatcttttccacacctccctgtctctctcacccttttctctgaagcacttgggagggagtgtctctggaatttccttatacgattaacaaaacttctttccaaaagtaatgcaattgtcttaagacttcctccctaagaatctcatcaaataaccagggaagatcaaccacctgagaagagaagagactgtgagtcgtcaccacacccagacatcatctgcttttctgagagcagctccaagtgataacctggaggactttatctgcaaaataaaacaacctttgtccctgtacagcgccacctctcccattctagtagtgtctgactccctctgcctgggtccattcattctttctaatgattgactgctcctcaaaagaattgtctacattttccatctgttccctcttgtgtgaagaaggatgcataagctcttatactacactggcttttttgggtgattaccctgtgattcccccctgtacatgttaataaatttatatgccttttctcttatt

SEQ ID NO: 467 - DNA, 4245 bp, Homo sapiens
tagtgaaattggtaacgggaagtttgatcgcttgtcatcggcttgcagctgctgtggccgggcctggaggcttaagtggctcgacactagtggatggccggtacacttaccgggagtatttagaggcacatctaaaatttctagcgtttttcttgcaagaagctactctgtatctgggctggaatcgtgccaaggagatctgggagtgtcttgtaactggccaggatgtttgtgaattagatagagagatgtgttttgaatggtttacaaaaggacagcatgatcttgagagtgatgttcagcagcagctcttcaaggagaaaattcttaaattggagtcatatgaaatcactatgaatggttttaacttatttaaaactttttttgaaaatgtgaatctttgtgatcatcgattgaaaagacaaggagctcagttgtatgtagaaaagctggaattgataggaatggatttcatttggaaaatagccatggaatcacctgatgaagaaattgctagtgaagctattcagctaatcataaactatagttacattaatctaaatcctagattaaagaaggattcagtatctttacataagaaattcattgctgattgctacacaagattagaagcagccagttcagcacttggtggccccactctaacacatgctgtgaccagagcaacaaaaatgcttacagcaactgccatgccaactgtagcaacctcagttcagtctccttatagatctactaaacttgtaataattgagagattgctgcttctggcagagcgctatgtgatcactatagaggatttttactctgttccacgaactattctacctcatggtgcctcatttcatggacatcttttaacccttaatgttacctatgagtctaccaaagataccttcactgtcgaggctcacagtaatgaaaccatagggagtgtccggtggaaactagccaagcagttgtgctctcctgtggataatatacagatatttacaaatgatagcctgctgacagtgaataaagatcaaaagctactccaccaactgggcttttctgatgaacaaatccttacagtgaagacttctggcagtgggaccccatctgggagttcagcagattcttcaaccagctccagcagcagcagcagtggggtttttagttcttcatatgccatggagcaggagaaatccctccctggtgtagtgatggctctcgtatgtaacgtatttgacatgctttatcagctcgccaatctggaagagccaaggataactctacgagtacggaagcttctgctcttgatacccactgatccagccattcaggaagcccttgatcaacttgattctttaggaagaaagaaaacattgctgtctgaatcaagttctcagtcctcaaaatctccatccctgtcatcaaagcaacagcaccagccaagtgccagttcaattttagaaagtctgtttcgatcttttgccccgggaatgtctaccttcagagtgctctacaacttagaagttctaagctccaaactcatgccaacagctgatgatgacatggccagaagctgtgccaaatccttctgtgaaaacttcctcaaagctggcggtttgagtttggttgtaaatgtcatgcagagagactccatcccatcagaagtagactatgaaacaaggcagggtgtttattccatctgtctacagcttgcaagatttttacttgtcggacaaacaatgtccacgttattagatgaagacctcaccaaagatggtatagaagcactttcttcccgcccattccgaaatgtcagccggcagacaagcagacagatgtccttatgtggtaccccagaaaagtcatcctaccgacagttgtccgtgtctgataggtcttctattagggttgaggaaatcatccctgctgctcgagttgcaatacaaacaatggaagtaagtgatttcacttctactgtggcttgcttcatgagattgtcatgggctgcggctgcaggacggcttgatcttgttgggagtagccagccaattaaagaaagtaattccctgtgtcctgctggaattcgaaacagactcagcagttcaggaagcaattgcagctctggaagtgaaggagaaccagtagccctgcatgcgggaatctgtgttcgacaacagtctgtatccaccaaagactcgctgattgcgggagaggctttgtctcttcttgttacgtgcctacagcttcggagccagcaactggcatctttctataacttgccctgtgttgctgatttcatcattgatattctgctcggatcaccaagtgctgagattcgccgggttgcctgtgatcagctgtacactcttagtcagacagacacatcagcgcatccagatgtgcagaagccaaatcagtttcttctaggcgtaatcctcacggctcagctgcctctctggtctccaactagtattatgagaggagtcaatcagagactgttatctcagtgtatggagtattttgatttgagatgccagttattagatgatctgacaacttcagaaatggagcagttaaggatcagcccagctacgatgcttgaagatgagattacttggctggataactttgaacctaatcgtacagctgaatgtgagaccagtgaagcggacaacatcttactggcagggcacttacgcctcatcaagacccttctttcactctgtggggcagaaaaggaaatgcttggttcatcactcattaaaccattgttagatgacttccttttccgagcttctagaattattttaaatagtcattctccagctggcagtgccgccatcagtcaacaggactttcatccaaagtgtagtacagcgaatagccgattggcagcctatgaagtccttgtgatgttggctgatagttcaccttcaaatcttcaaattattataaaagaactgctttctatgcatcaccagcctgaccctgctcttaccaaggagtttgattaccttcccccagtggatagcaggtccagttcagggtttgtggggctgagaaatggtggtgcaacttgttatatgaatgcagtcttccagcagctgtatatgcaacctgggctccctgagtcattactttcagtggatgatgacacagacaatccagatgatagcgtgttttaccaagtgcagtctctctttggacatttaatggaaagcaagctgcagtactatgtacctgagaatttttggaagattttcaagatgtggaataaagaactttatgtgagagaacagcaggatgcatatggattctttactagtctcattgatcagatggatgaatacctcaagaaaatggggagagaccaaatttttaagaatacatttcagggcatctactctgatcagaagatctgtaaagactgtcctcacagatatgagcgtgaagaagctttcatggctctcaatctaggagtgacttcttgtcagagtttggaaatttctttggaccaatttgttagaggagaagttctagaaggaagtaatgcgtactactgtgaaaagtgtaaagaaaagagaataacagtgaaaaggacctgtattaaatctttacctagcgtcttggtaattcacctaatgagatttgggtttgactgggaaagcggacgctccattaaatatgatgaacaaataaggtttccctggatgctaaacatggagccttacacagtttcaggaatggctcgccaagattcttcttctgaagttggggaaaatgggcgaagtgtggatcagggcggtggaggatccccacgaaaaaaggttgccctcacagaaaactatgaacttgtcggtgtcatcgtacacagtgggcaggcacacgcaggccactactattccttcattaaggacaggcgagggtgtggaaaaggaaagtggtataaatttaatgacacagttatagaagaatttgacctaaatgacgagaccctggagtatgaatgctttggaggagaatatagaccaaaagtttatgatcaaacaaacccatacactgatgtgcgccgaagatactggaatgcctatatgcttttctaccaaagggtgtctgatcagaactccccagtattaccaaagaaaagtcgagtcagcgttgtacggcaggaagctgaggatctctctctgtcagctccatcttcaccagaaatttcacctcagtcatcccctc

SEQ ID NO: 468 - DNA, 5698 bp, Homo sapiens
agataaacagttacctcatggaggccagatactctctttcccgattccgtctgctgactggctccttagaagctgtgcaagttcaggtggacaatcttcagaatctccaagatgatctggaaaaacaggaaaggagcttacagaaatttggctctatcaccaaccaattattaaaagagtgtcacccacccgtgacagaaactcttaccaatacactgaaagaagtcaacatgagatggaataacttgctggaagagattgctgagcagctacagtccagcaaggccctacttcagctttggcaaagatacaaggactactccaaacagtgtgcttcgacagttcagcagcaggaggatcgaaccaatgagctgttgaaggcagccacaaacaaggacattgccgatgatgaggttgccacatggattcaagattgcaacgacctcctcaaaggactgggcacagttaaagattccctctttgttctccatgagctgggagagcaactgaagcaacaagtggatgcttccgcagcatcagctattcaatcggatcaactctctttgagtcaacacttgtgtgccctggagcaagctctctgcaaacagcagacttcattacaggctggagttcttgattatgaaacctttgccaagagtttagaagctttggaggcctggatagtggaagctgaagaaatactacaagggcaggaccctagccactcatctgacctctccacaatccaggaaaggatggaagaacttaagggacagatgttaaaattcagcagcatggctccagatttataccgtctaaatgagcttggatataggttacccttgaatgataaggaaatcaaaagaatgcagaatctgaaccgccattggtctctgatctcctctcagactacagaaagattcagcaagttgcagtcatttttgctacaacatcagactttcttggaaaaatgtgaaacatggatggaattcctagttcagacagaacaaaagttagcagtagagatttcaggaaattatcagcaccttttggaacagcagagagcacacgagttgtttcaagccgagatgttcagtcgtcagcagattttgcactcaatcattattgatgggcaacgtcttctagaacaaggtcaagttgatgacagggatgaattcaacctgaaattgacactcctcagtaatcaatggcagggagtgattcgcagggcccagcagaggcgggggatcattgacagccagattcgccagtggcagcgctatagggagatggcagaaaagcttcgtaaatggttggttgaagtgtcctacctccccatgagtggtctcggaagtgttcctataccactgcaacaagcaaggaccctctttgatgaagtgcagttcaaagaaaaagtgtttctgcggcaacaaggcagctacatcctgactgtggaggctggcaagcaactccttctctcggcggacagtggcgctgaggccgccttgtaggccgaactcgctgaaatccaagagaaatggaaatcagccagcatgcggctggaagaacagaagaaaaaactagccttcttgttgaaagactgggaagaatgtgagaaaggaatagcagattccctggagaaactacgaactttcaaaaagaagctttcgcagtctctcccggatcaccatgaagagctccatgcagaacaaatgcgttgcaaggaattagaaaatgcagttgggagctggacagatgacttgacccagttgagcctgctgaaggacaccctctctgcctatatcagtgctgatgatatctccattcttaatgaacgcgtagagcttctgcaaaggcagtgggaagaactatgccaccagctctccttaaggcggcagcaaataggtgaaagattgaatgaatgggcagtcttcagtgaaaagaacaaggaactctgtgagtggttgactcaaatggaaagcaaagtttctcagaatggagacattctcattgaagaaatgatagagaagctcaagaaggattatcaagaggaaattgctattgctcaagagaacaaaatacggctccaacaaatgggagaacgacttgctaaagccagccatgaaagcaaagcatctgagattgaatacaagctgggaaaggtcaacgaccggtggcagcatctcctggacctcattgcagccagggtgaagaagctgaaggagaccctggtagccgtgcagcagcttgataagaacatgagcagcctgaggacctggctcgctcacatcgagtcagagctggccaagccaatagtctacgattcctgtaactcggaagaaatacagagaaagcttaatgagcagcaggagcttcagagagacatagagaagcacagtacaggtgttgcatctgtcctcaacctgtgtgaagtcctgctgcacgactgtgacgcctgtgccactgatgccgagtgtgactctatacagcaggctacgagaaacctggaccggcggtggagaaacatttgtgctatgtccatggaaaggaggctgaaaatcgaagagacgtggcgattgtggcagaaatttctggatgactattcacgttttgaagattggctgaagtcttcagaaaggacagctgcttttcccagctcttctggggtgatctatacagttgccaaggaagaactaaagaaatttgaggctttccagcgacaggtccacgagtgcctgacgcagctggaactgatcaacaagcagtaccgccgcctggccagggagaaccgcactgattcagcatgtagcctcaaacagatggttcacgaaggcaaccagagatgggacaacctgcaaaagcgtgtcacctccatcttgcgcagactcaagcattttattggccagcgtgaggagtttgagactgcgcgggacagcattctggtctggctcacagagatggatctgcagctcactaatattgaacatttttctgagtgtgatgttcaagctaaaataaagcaactcaaggccttccagcaggaaatttcactgaaccacaataagattgagcagataattgcccaaggagaacagctgatagaaaagagtgagcccttggatgcagcgatcatcgaggaggaactagatgagctccgacggtactgccaggaggtcttcgggcgtgtggaaagataccataagaaactgatccgcctgcctctcccagacgatgagcacgacctctcagacagggagctggagctggaagactctgcagctctgtcggacctgcactggcacgaccgctctgcagacagcctgctttctccacagccttcctccaatctctccctctcgctcgctcagcccctccggagcgagcggtcaggacgagacaccccggctagtgtggactccatccccctggagtgggatcacgactatgacctcagtcgggacctggagtctgcaatgtccagagctctgccctctgaggatgaagaaggtcaggatgacaaagatttctacctccggggagctgttggcttatcagatgtaatgatccccgaaagccctgaggcctatgtaaaactcacagaaaatgcaatcaaaaatacctccggggaccacagtgccctagagtcacagatccgacaactgggcaaagccctggatgatagccgttttcagatacagcaaaccgaaaatatcattcgcagcaaaactcccacggggccggagctagacaccagctacaaaggctacatgaaactgctgggcgaatgcagtagcagtatagactccgtgaagagactggagcacaaactgaaggaggaagaggagagccttcctggctttgttaacctgcatagtaccgaaacccaaacggctggtgtgattgaccgatgggagcttctccaggcccaggcattgagcaaggagttgaggatgaagcagaacctccagaagtggcagcagtttaactcagacttgaacagcatctgggcctggctgggggacacggaggaggagttggaacagctccagcgtctggaactcagcactgacatccagaccatcgagctccagatcaaaaagctcaaggagctccagaaagctgtggaccaccgcaaagccatcatcctctccatcaatctctgcagccctgagttcacccaggctgacagcaaggagagccgggacctgcaggatcgcttgtcgcagatgaatgggcgctgggaccgagtgtgctctctgctggaggagtggcggggcctgctgcaggatgccctgatgcagtgccagggtttccatgaaatgagccatggtttgcttcttatgctggagaacattgacagaaggaaaaatgaaattgtccctattgattctaaccttgatgcagagatacttcaggaccatcacaaacagcttatgcaaataaagcatgagctgttggaatcccaactcagagtagcctctttgcaagacatgtcttgccaactactggtgaatgctgaaggaacagactgtttagaagccaaagaaaaagtccatgttattggaaatcggctcaaacttctcttgaaggaggtcagtcgtcatatcaaggaactggagaagttattagacgtgtcaagtagtcagcaggatttgtcttcctggtcttctgctgatgaactggacacctcagggtctgtgagtcccacatcaggaaggagcaccccaaacagacagaaaacgccacgaggcaagtgtagtctctcacagcctggaccctctgtcagcagtccacatagcaggtccacaaaaggtggctccgattcctccctttctgagccagggccaggtcggtccggccgcggcttcctgttcagagtcctccgagcagctcttccccttcagcttctcctgctcctcctcatcgggcttgcctgccttgtaccaatgtcagaggaagactacagctgtgccctctccaacaactttgcccggtcattccaccccatgctcagatacacgaatggccctcctccactctgaactaagcagatgccatctgcagaagtgctggtagcataaggaggatcgggtcataagcaatcccaaactaccaacaagaggaccttgatcttggcgaaagccctcggtgtggcagctttagccctcctccagatcacatgtgtgcaaattatggcttcagaggtggaagataaacagtgacgggggaacaaacagacaacaagaaggtttggaagaaatctggtttgagactctgaaccttagcactaaggagattgagtaaggacctccaaagttccccggactcatgaattctgggcccttggcccattctgtgcacagccaaggacttcagtagaccatctgggcagctttcccatggtgctgctccaaccatcagataaatgaccctcccaagcaccatgtcagtgtcgtacaatctaccaaccaaccagtgctgaagagattttagaaccttgtaacatacaatttttaagagcttatatggcagcttcctttttaccttgttttcctttggggcatgatgttttaacctttgctttagaagcacaagctgtaaatctaaaaggcacttttttttagaggtataaagaaaaactagatgtaataaataagatcatggaaggctttatgtgaaaaaagttgaatgttatagt

SEQ ID NO: 469 - DNA, 4196 bp, Homo sapiens
aacacatagaaggtgagccacactaattatgaaaatccacagtgtgaaaggacagcgctgccctgaccatacgccaaagagttcaaagccggcctccagaacatggtccagaagagctggagggagcgtcaacatccgggggactctgctaatactcgggcccagctccacaagctgcgggtccatcacaaaggacagccgcactaggctaatatcgcagacctgggaacactgccactgccattcaggggcgtatatggacaagacaaaactggcttggctcttcgggccaggggtgccttttccaaggatactcagagcattttgtgggaacctttcactcaaagtgaaaaataattcctaaaacgtgcataaaacccgccttgaacaatggctgctcggttcctctcactcccccaaatcatgtctcattttcctacaactgatatcctccgtctagccctttaactttatctccgtgttggctttctgacagaccaagaggctcagattgacagtggtggtgccatttgctgggggctgtaaactagttcaaaaagcttccagtctgtgccaggatgccaccttattgccaaggcaggatttgcactttacagagaaactggcatcttaagtatgtatctgggtccatacagtgattgctggtctacagtattcgtttttttgttgtttttttgtcttttttttttttgagacggagtctcgctctgttgcccaggctggactgcagtggcgatctcggctcactgcaagctccgcctcctgggttcacgccattctcctgcctcagcctcctgagtggctgggactacaggcgcccaccaccacgcccggctaattttttgtatttttagtagagacgtggtttcaccgtgttagccaggatggtctcgatctcctgaccttgtgacacagtattctttaatcacagactaaatagtaagtactatggaagttttgagaacagaaatgtactttcacatttttctaataaaacccagatgagctgacagcatcaggccattttaggggagcactatactcaaagtgcagacgctcctggaggtgaagcagtgatgccatggctttctaagttattctagtctaagaagattcccaacagacagaaagagggaggaacaggattggttccaggtcaggccctcaattcatcactcagtgttggcttttctgctcactctcctaccagtgccaaaatcaagtttgtttaaattaaatcctaactcagcatagacagatttgagcacttccttcttaacaccaaatcatctcccactctacaaatctagaggttcctgtaccaatgaactcagaaataagctcgacataaagaattcttaaggctggctgagctgcacacatgacatcctggaacatggctacccaattaacaccaacttaaatctatcttcacgcaagagttactttaaatttcaggtgagacagtcttgggatgaagaaagtgtaggaatggaaaccttccttcccagatggactgggataacaccactgaactcattctcacttatatattaggtcaaactgatctttgattcccaagggtgagattccaccgtgttagtctgaagaaggccaaggaaccacagtgatgagcagctctggccctgaagtcagccctgagctatctgccagtacccctcctcattgggggataacatcacgacatcaaaagcagaagctgtggccacggttgcatcgtcctggctgagggctagtgcctgtattcttgcatcgtgctcaaaacgatgaacagggtactttccggtccttaaatcccaaatattaagaaaccctatgcagcaagaaacaatgcagcaatggaacatttggttgtaagaaacagacacccactgaaactggcttaaacataaaaaggaaactgactggaaaggaatgaggctacttcatggagcccaagggcaggaagtacagctggaggtgataagggatcagaaccaggaaccaggaagacatgcagaaccaaggaaaaggatgcagacaaaagaagaaactgggtctcttgaaacatccagaagacaagtgaggaccactggcccaataaaggagaaggggcagggcctggcactcccacctgctccctgggctcaggaccctccaccttgacaagcagcagccaggctgaaggaactctgagctcagcctagaccagtaacagccattaacgatgacatgagtaacgatggccagtctttcgaggagacataaagcctgctcagcagctgtggatgggcacccatgccagtttgcagcaggcccctcccacctccctaaggaggccagccagagtgtggtaatgaaactgcacatagtggaaatgggatctaaatgagtttaaactgatttatgttagcttttgtaaagattactcgatatctggaaagtgctaccactgtgaaataatgtcgacaatccttaagacctctgtctaatggtacttgcacagaatatttatattcttcgtcatgggaacaaggaccataatggataccatttttgttttattagggatgcatatttaaattaatctgctatttgcctaaacaattagctgcttctgtttgtgtgcacaaagccaaaattgcaattaagcttccatcaaaaagataagtcccaactaaaactgtcccggtggagtcataagagctcagggcagaactttccaaaattactttttagcataatggtaattatgttaattgcctgaaaggtaaataactgctgaactggttttggaaaaaaaacacaattggtatactcttccctcccctttgatcttttccatgcaccacaaaatttaaaacaggttaacagtttcgaaaggtcatagactagtcccttcttcaactacagagctggtcttgtggtctttagtggtttcttgattagaaattatttcagccgcgagctcccatccccttgagcttccacaataaacacctgaagcttggtgtcaacttcatgatcgttaaatagacaggatcaattaactgcgttcagagatactgaatgaagttgactatttataataaagacagctggcaatctcaatttctaccatgtaaataaacacttgcctatcagaaattaatcaggagtcaaaagaaattctgcaacaaaggaaaaggcattttgacaaaaattttaaatatacccatagcactgacttaacacgtacctctttgttcattaagtccacacatcaccactctgaaatgcaggccagagacataaaactagcataaagttggacaggacaaaagtttttgctcttcatggaagaggtgccggtgggagattagtatcagtgtagacaagggtcataaagaacagctaaaccacggagggtcacgaaaaaggaaaaaggctgaagtttcttgttactgcagctactgtggcatgccatcctgctttcccgctgaccacagcgctacagctctgttgcctaaggcagaaaataaacagaaaacattctggaatctgcattttagattgacaagtaaaagaatctgaataggcttatggaggaggcgactggttagggcataaacaaagcagcgagatcaccaaaatagaaactgagtcaagagaagaggaagtaagattgaatatatttagtagctctcaaattcaaagcagaaagaacacctgaaaaagaagaatgaaaaatgacgagacagcagactgaaaaggaggcaaatagtatattgttaagactatggcaatgtgactagatagaagaatttccagttaacatcttaggaaaaacagattgatggagaaggcaaagaatttggaccagcttctacaagggaaagttccagagggcaggtaacgtgaaagagacatcactgtgcatgcagcctcagactgaggccagtgttctctataaccgatatacacatgatatagactctatcccgaagagatcagcagacactggtagtagcagatgcctctaaggaggggagtggggaatcagtggactgggtggtagtagattaaaaaaaaaagatcactactgaagctgagtgatgggtacacgggggtgcatcatgctattcgttccatttttgtgtattttgaatttttcacaataaaagatttttaagaat

SEQ ID NO: 470 - DNA, 3814 bp, Homo sapiens
atgcccaaaactgaaccgaagggagcagaccctgagtcgcccaggagagaagagatgggctgcaatgctgaccaagagagccagagcggccctggagtaccacaaacccagggtggtgaggtcaagccaaagtcgccagagacagccctggaggcttttaaagccctattcatccggccccccagaaaggggaccacagctgacacctctgagctggaagctctcaagcgcaagatgagacatgagaaggagtcgctaagagctgtgtttgaacggtccaattctaagccagcggatggcccctctgattccaaaagtcctgaccacagcccgactgagcaggatgacaggactcctggcagacttcaagctgtctggccacccccaaagacaaaagacacagaagaaaaagtgggactgaagtacactgaagcagaataccaagctgctattttacacttgaagagggagcacaaagaagaaattgaaaacctgcaggcacagtttgaacttcgggcatttcatatccggggcgagcatgcaatgataacagcgagactagaagaaaccattgaaaatctgaaacacgagctagaacacagatggcgagggggttgtgaagagaggaaagatgtgtgcatttccaccgatgatgactgccctccaaagaccttcagaaatgtgtgcgtccagacagacagagagaccttcctcaagccctgtgaaagtgaaagcaagacaaccagaagtaatcaattagtacccaaaaagctgaatatctcctctttaagccagctctcacccccaaatgaccacaaagacatccatgcagcactccagccaatggagggcatggcatcaaatcagcagaaggcattgcctccgcctcccgcatccatccctccccctccgcccctcccctcaggacttggatctttgtctcctgcacctccaatgccacctgtgagtgctgggccaccgctaccacctccgcctcctccaccgccacctctacctccaccttcaagtgctggacctccaccacccccacccccacccccacttcctaactcccctgccccacccaaccctggagggcctcctcctgctccaccacccccaggacttgcacccccacctccccctggactcttctttggacttggctcttcttccagtcaatgtcctcgaaaaccagccatcgagcccagttgtcccatgaagcctttatattggactaggatacaaataagtgataggagccaaaatgctacaccaaccttatgggactccttagaagaacctgacattcgggaccccagtgaatttgagtatttattctccaaagacacaactcaacagaagaaaaaacctctgtcagagacttatgagaagaaaaacaaggtcaaaaagatcatcaaattgttggatggaaaacgatctcaaactgtgggaatcttgatatctagtttacatttagaaatgaaggatatccaacaggccattttcaatgtggatgactccgtggttgatctggagaccctggcagccttatatgaaaacagagcccaagaggatgagctggttaaaataagaaagtattacgagacatccaaagaagaagaactgaagctgctggataaacctgagcaatttttacatgagttagcccagattcctaattttgctgaacgtgcccagtgcataatcttcagatctgtcttttctgagggtatcacctccttgcacagaaaggtagagatcatcacgcgagcttctaaggacttgctgcacgtgaagagcgtgaaggatattttagctctcatcttggcttttggaaattatatgaatggaggaaataggactcggggacaagccgatggatatagcttagaaattctgcccaaactcaaggatgtcaaaagtcgggataatgggattaatctggtggactacgttgttaagtattacctgcgttactatgatcaggaagctggaacagaaaagagtgttttccccttgccggaaccacaggatttctttctggcctcccaagtcaagtttgaagacctcataaaagatttgagaaaactgaagaggcaactagaagcaagtgagaaacagatggtggtggtgtgcaaggagtccccaaaggagtatctccagcctttcaaggacaaactagaggagttcttccaaaaagccaaaaaagagcataagatggaagaaagtcacttggagaatgcacagaaaagttttgaaacaacagtacgatattttgggatgaagccaaagtctggtgagaaggagatcacacccagctacgtgtttatggtgtggtatgagttctgcagtgacttcaagacaatttggaaacgggagagtaaaaacatatctaaagaaagattgaaaatggctcaggaatcagtcagcaagttgacttcagagaagaaagtggagacaaagaaaatcaatcccactgctagcctgaaagaaagactgcgtcagaaggaagccagtgtgaccactaactaagatgaagacacatggaaatgatggcactggaggtggaggaccttgcacgcatactctttgtgaccacagggttgcaggacgttcttgaaagatgtgtcactaaatgtttgtttttgctcatctctttctgaggtcatctgcagagagtgccccatgccttctttaagaagtccctcattaagccgcaggaacaatggaaaactatttaagggaacattgcagaaatatttgatgactgtttcttgtggaagcccaaagtcctctctaagagcagaagaaataccaaaatgtttccaaaatttttttaaaagctgagatttccagctttataaccaaagcttgatatatgtcacattgtcacagaagagagaaaagatcattgaggacagttgccttgggagagttcaagtctttgtcgttacacactgctgttttgattattggtcttagttttgatcctgttgcagcaaaatcctgcagcatctttctctccaataatgttgcaactcaccaaaactattcttgaagaggtccaagaacatgtattatccagactaaaaaaaatgattttttgttgttatggtttacgtgatgaaaaggagaaaaaacagaatcatacctgggtggagagagggagacaaatagccataaacttcatcctggagaacaagttaccatgcaaggagttgacatcagttgttaagtgaggcccattcttgtttttacatcggtcctttgtggtttttctgggccagcagagattctgcaccccaacattgttggcagtgagcattacgatgttgcccgtggggtgcaaaagatcctgcaggactacaaatccctccaggatatcattgccatcctgggtatggatgaactttctgaggaagacaagttgaccgtgtcccgtgcacggaaaatacagcgtttcttgtctcagccattccaggttgctgaggtcttcacaggtcatatggggaagctggtacccctgaaggagaccatcaaaggattccagcagattttggcaggtgaatatgaccatctcccagaacaggccttctatatggtgggacccattgaagaagctgtggcaaaagctgataagctggctgaagagcattcatcgtgaggggtctttgtcctctgtactgtctctctccttgcccctaacccaaaaagcttcatttttctgtgtaggctgcacaagagccttgattgaagatatattctttctgaacagtatttaaggtttccaataaaatgtacacccctcaac

SEQ ID NO: 471 - DNA, 4607 bp, Homo sapiens
aagagctgcagctcctcctgtgcggagggattgagctctctttgctctgatgagccatcttcagaaattatgacttcttcctttctttcatcttctgaaatacataacactggccttacaatactacatggagaaaaaagccatgtgttagggagccagcctattttagccaaagaaggaaaagaccacttggatcttctagatatgaaaaagatggaaaagcctcaggggaccagcaacaacgtatcagactcttcagtttctcttgcagcaggagttcattgtgaccgtccttctattccagccagtttcccagagcatcctgcttttctctcaaagaaaattggtcaagtggaagagcaaatagataaagagaccaagaacccaaatggggtatcaagtagggaggctaaaactgcattggatgctgatgacagattcactttgctgacagcccagaaaccacctactgagtactctaaggtagaaggcatttatacatattctttgtctccatccaaagtttcaggagatgatgttattgaaaaggattcccctgaatcaccatttgaagtaattattgacaaagcagcatttgacaaagaatttaaagactcatataaggagagcacagatgattttggtagctggtctgtgcacactgataaagaatcatccgaagacatttcagagactaatgacaagctttttccactgagaaataaagaggcaggacgttacccaatgtctgcattgctcagtaggcagttttcacacacaaatgcagcactggaagaggtgtccagatgcgtgaatgatatgcataactttactaacgaaatactgacttaggatctggttccccaagtgaaacaacagaccgataaatcttctgactgcatcacaaaaactacaggacttgacatgagtgaatataattcagaaattccagttgtaaatcttaaaactagcactcatcagaaaactcctgtatgttctattgatgggagcactcccatcactaaatcaacaggtgattgggcagaagcatctctccagcaagaaaatgctattactggaaaacctgtacctgactctttgaattccacaaaagaattcagtatcaaaggtgtgcaaggcaatatgcagaaacaggatgacacacttgcagaattacctggatctccacctgagaaatgtgactctttgggttctggagtggccacagtgaaagtggttttacctgatgaccacctgaaagatgaaatggactggcagagctctgcattgggagaaatcacagaagctgatagttctggtgagtctgatgacacagtaatagaggacatcacagcagatacatcatttgaaaataacaaaattcaggctgaaaaacctgtttccattccaagtgctgttgtaaaaacaggtgaaagagaaatcaaagagattcccagttgtgagagagaagaaaaaacatctaaaaactttgaagaattggtcagtgactctgagctgcatcaagatcagcctgatattcttggaaggagtccagctagtgaggcagcatgttcaaaagtacccgatacgaatgtctccttagaagatgtgagtgaagttgctcctgaaaagcctattactactgagaaccccaaacttccttcaacagtgtctccaaatgtttttaatgagacagaattctcattaaatgtgacaacatctgcctatttggagtcattacatgggaaaaatgttaaacatatagatgattcctccccagaggacctgatagcagcctttacagaaaccagagataaaggaatagtagatagtgaaagaaatgcttttaaagcaatatcagagaagatgacagactttaaaacaactcctcctgtagaagtcttacatgaaaatgagtccggtggttctgaaattaaagacattggaagcaaatacagtgaacaaagcaaagaaacaaatggaagtgagcctctaggtgttttccctacccaaggtactccagtagcatctcttgacttagaacaagaacagctcacaattaaggctcttaaagaattaggtgaaagacaggttgagaagtcaacttctgcacagcgtgacgcagaattgccttctgaagaagtactgaagcaaactttcacatttgctccagaatcttggccacagagatcatatgacatcctagaacgtaatgtcaagaatggatctgatcttgggatttcccagaagcccatcactatcagagaaactactagggtagatgctgtttccagccttagcaagactgaattggtaaaaaagcatgtcctagcaagacttctgacagacttctcagtgcacgatctgattttctggagagatgtgaagaagactgggtttgtctttggcaccacgctgatcatgctgctttccctggcagctttcagtgtcatcagtgtggtttcttacctcatcctggctcttctctctgtcaccatcagcttcaggatctacaagtccgtcatccaagctgtacagaagtcagaagaaggccatccattcaaagcctacctggacgtagacattactctgtcctcagaagctttccataattacatgaatgctgccatggtgcacatcaacagggccctgaaactcattattcgtctctttctggtagaagatctggttgactccttgaagctggctgtcttcatgtggctgatgacctatgttggtgctgtttttaacggaatcacccttctaattcttgctgaactgctcattttcagtgtcccgattgtctatgagaagtacaagacccagattgatcactatgttggcatcgcccgagatcagaccaagtcaattgttgaaaagatccaagcaaaactccctggaatcgccaaaaaaaaggcagaataagtacatggaaaccagaaatgcaacagttactaaaacaccatttaatagttataacgtcgttacttgtactatgaaggaaaatactcagtgtcagcttgagcctgcattccaagctttttttttaatttggtgttttctcccatcctttccctttaaccctcagtatcaagcacaaaaattgatggactgataaaagaactatcttagaactcagaagaagaaagaatcaaattcataggataagtcaataccttaatggtggtagagcctttacctgtagcttgaaaggggaaagattggaggtaagagagaaaatgaaagaacacctctgggtccttctgtccagttttcagcactagtcttactcagctatccattatagttttgcccttaagaagtcatgattaacttatgaaaaaattatttggggacaggagtgtgataccttccttggttttttttgcagccctcaaatcctatcttcctgccccacaatgtgagcagctacccctgatactccttttctttaatgatttaactatcaacttgataaataacttataggtgatagtgataattcctgattccaagaatgccatctgataaaaaagaatagaaatggaaagtgggactgagagggagtcagcaggcatgctgcggtggcggtcactccctctgccactatccccagggaaggaaaggctccgccatttgggaaagtggtttctacgtcactggacaccggttctgagcattagtttgagaactcgttcccgaatgtgctttcctccctctcccctgcccacctcaagtttaataaataaggttgtacttttcttactataaaataaatgtctgtaactgctgtgcactgctgtaaacttgttagagaaaaaaataacctgcatgtgggctcctcagttattgagtttttgtgatcctatctcagtctgggggggaacattctcaagaggtgaaatacagaaagcctttttttcttgatcttttcccgagattcaaatctccaattcccatttgggggcaagtttttttcttcaccttcaatatgagaattcagcgaacttgaaagaaaaatcatctgtgagttccttcaggttctcactcatagtcatgatccttcagagggaatatgcactggcgagtttaaagtaagggctatgatatttgatggtcccaaagtacggcagctgcaaaaagtagtggaaggaaattgtctacgtgtcttggaaaaattagttaggaatttggatgggtaaaaggtacccttgccttactccatcttattttcttagccccctttgagtgttttaactggtttcatgtcctagtaggaagtgcattctccatcctcatcctctgccctcccaggaagtcagtgattgtctttttgggcttcccctccaaaggaccttctgcagtggaagtgccacatccagttcttttcttttgttgctgctgtgtttagataattgaagagatctttgtgccacacaggatttttttttttttttaagaaaaacctatagatgaaaaattactaatgaaactgtgtgtacgtgtctgtgcgtgcaacataaaaatacagtagcacctaaggagcttgaatcttggttcctgtaaaatttcaaattgatgtggtattaataaaaaaaaaaaacccc

SEQ ID NO: 472 - DNA, 3442 bp, Homo sapiens
atgaccgcactaggaagaggccggtaagaactcgctggcggcaaggctacgaactacctaaaaggacgtatggagcagggcctgggcggggttaggaggggatcctgtgacgtctcgttccctcccccggctcacgtgggtgccacccacctgcccggcccacaggctacggagaaggcttcgacgacgtcatcatccagggggatctggaggagctgaagtttgtggctttttacactaaaggcgacgaggtgatcgccgtggccagcatgaactacgatcccattgtgtccaaggtcgctgaggtgctggcctcaggccgtgccatccggaagcgggaggtggagcgcagcaagcacacagtggtggcctataaagatgccatttatgtatttggtggagacaatgggaagaccatgctcaatgacctcctgcggttcgatgtgaaagactgctcctggtgcagggcctttaccactgggaccccaccggccccccgttaccaccactcggccgtcgtctatgggagcagcatgtttgtctttgggggttacactggggacatttattccaattctaacttgaagaataaaaacgacctctttgaatacaagtttgcaactggccagtggacggagtggaaaattgaaggacggttgccagtcgctaggtcagcccatggggccacggtgtacagtgacaagctgtggatctttgctggctatgacggcaacgccaggttgaatgacatgtggacaattggcctccaggaccgagagctcgcctgctgggaggaggtggcccagagtggcgagatccccccatcttgctgcaacttccccgtggctgtgtgccgggacaagatgtttgtattctctgggcaaagcggagccaaaataaccaacaacctcttccagtttgaattcaaggacaagacgtggacacgcatcccaactgaacacctgctccggggctccccaccacccccgcagcggcgctacgggcataccatggtggcctttgaccgccacctctatgtgtttgggggtgcggccgacagcacgctgcccaacgagctgcactgctatgacgtggacttccagacctgggaggtcgtccagcccagctccgacagcgaggttggtggggctgaagtgcccgagcgagcctgtgcttccgaggaggtgcccaccctgacctatgaggagcgggttggcttcaagaagtcccgagatgtgtttggcctggactttggcaccacctcagccaagcagcccacccagcctgcctcggagctgcccagtgggaggctcttccacgcggctgctgtcatctcggacgccatgtacatcttcgggggcacggtggacaacaacatccgcagcggggagatgtacaggttccagttctcctgttaccctaaatgcacgcagcacgaggactacgggcggctgtgggagagccgccagttctgcgacgtggagttcgtgctgggtgagaaggaggagtgcgtgcagggccacgtagccattgtcacagcgcggagccgctggcttcgcaggaagatcacgcaggcgcgggagaggctggcccagaagctggagcaggaggccgccccagttcccagggaggcccccggcgtggctgctggtggggcccggccgcccctgctgcacgtggccatccgggaggccgaggcccggcccttcgaggtgctcatgcagttcctctacaccgacaagatcaaatacccacggaaaggccatgtggaggatgtgctgctcatcatggatgtgtacaaactggcactgagcttccagttgtgccgcctggagcagctgtgccgccagtacatcgaggcctccgtggacctgcagaacgtgctggttgtgtgcgagagtgccgcccggctgcagctgagccaactcaaggagcactgcctgaacttcgtggtaaaggagtcccacttcaaccaggtgatcatgatgaaggagttcgagcgcctctcctctccactgatagtggagattgtgcggcggaagcagcagccgccccctcgcactcccttggaccagccagtggacattggcacatccctgatccaggacatgaaggcatacctggagggagcgggcgcggaattctgtgacatcactctgttgcttgacgggcacccacggccagcccacaaggctatcctggccgcccgctccagctactttgaagccatgttccggtccttcatgcccgaagatgggcaggtgaacatctccatcggggagatggtgcccagcaggcaggccttcgagtccatgctgcgctacatctactacggcgaggtcaacatgccgcccgaggactcgctctacttgtttgcggccccctactactacggcttctacaacaaccggctgcaggcgtactgcaagcagaacctggagatgaacgtgacggtgcagaacgtgctgcagatcctggaggcagctgacaaaacgcaggcactggacatgaagcggcactgcctgcacatcattgtgcaccagttcaccaaggtctccaagttgcccaccctgcggtcgctgagccagcagctgctgctggacatcatagactccctggcctcccacatctcagacaagcagtgcgcagagctgggcgccgacatctgaggccctgtggcgcctgcccattgtgaagaatcgccgtgcctgcctgccctgcctactgagaagactaccggctatgcgcatgcctatggcagtgggtgcacctgccaggccaagggtcagggtgcccagagcctccaaagagagctgaggggatgtggggccccaaactcattaattcactgaagacacaggtcccacagggagcggatgatgaagcagaccccctcctgtcatcaccctctcctggtgtagtgtggatgcgaggccacggctcagtgatgggctcaccacccagaagtggggagagactttgggcctcccacccagtggggcttggcctggcttctgtggcctgggcgtgttgtggactcaggcactggggcctgtcaccaaggctcctccaacatgcgggaggaggcttagcagacttgcgctgcaccagcgaatctgcctgggctgctcctgtcccacccaccctcactgagatccatgtaaggggctcctcttcccacctggaacttgtgagtggggacccatgatgtatgggtctcacctgacttgaggtgaattttggagtgaagggccctgaggtcagctcccaggtcggtcgtgctgggccaggcctggttttcacaggggctgaaggatcccagtccacctgtgtgcatgtcagggctcggccgggaagaagccagcaaagtcccccgtgtcccttgctgagtattctgtcacagacaagcctccattaaagccacagcagtgctacccaccac

SEQ ID NO: 473 - DNA, 4973 bp, Homo sapiens
accttcaccaagcatgtttggtgagctgctgcagaatgccagcaccatgggggatctgcggaactgtccaagcaactgtggagagaggatcaggattcgccgtgtgttgatgaatgctccacagattatcacgattgggctggtatgggactcagaccactcagacttagcagaagatgttatccacagcctgggaacctgccttaagctgggtgatctgtttttcagagtgacggatgaccgggccaagcaatctgaactgtacttagttggaatgatctgttactatggcaaacattattctacattcttttttcaaacaaagattcgcaaatggatgtattttgatgatgctcatgtcaaggagattgggcccaaatggaaggatgtggtgaccaaatgcatcaaggggcattatcagcccctgctgctgctttatgcagatccccagggtaccccagtttccacccaggacctgcctccccaagctgagttccagtcatacagcaggacatgctacgacagtgaagattcagggagggagccctccatctcaagtgacactcgaacagattcctcaacggagagctatccctacaaacattcccaccatgagtctgtggtcagtcacttctcttctgattctcaggggacagtcatctataatgtggaaaatgattccatgtctcagagcagtcgggacacaggacacctgactgatagtgaatgtaatcagaaacacacatccaagaaagggtcactgatagagcgcaagaggagctctggtcgggttaggaggaaaggcgatgagccccaggcctcgggataccacagtgaaggagaaacactgaaagagaagcaggctcctagaaatgcctccaaaccatccagcagcaccaacaggctgagagattttaaagagacagtcagcaatatgatccataacagaccatccctggcttctcagaccaatgtaggctctcactgcaggggcagaggaggagaccagcctgacaaaaaacctcctaggaccctgcctttacactctcgtgactgggaaatagagagtaccagcagtgagtcaaaatccagttcttccagcaagtatcgtcccacatggagacccaaacgagaatctctgaatattgacagtatctttagtaaggacaaaaggaagcactgtggctatacccagcttagccccttttctgaggattcagctaaagaatttataccagatgaaccaagcaatccaccttcttacgacattaaatttggtggaccaagcccccagtacaagcgctggggcccagcacggccaggctctcaccttttagagcagcacccccgactaatccagcgaatggaatctggctatgaaagcagtgagaggaacagcagcagccctgtcagcctggatgcagccctgcctgagagctcaaatgtctacagggatccaagtgctaagagatcagctgggttggttccttcctggcgtcatatcccaaagtcgcacagcagtagcatcctggaggtagactccacagcatccatgggtggctggacaaagagtcagcctttctctggtgaggagatatcttctaaaagtgaactggatgaattgcaggaagaggtggccaggagggcgcaggaacaggaacttcgaagaaaacgggagaaggagttagaggcagcgaaagggtttaaccctcatcctagccgcttcatggacttggatgaactgcagaatcaggggaggagtgacggctttgagaggtccctgcaagaggcagagtcagtgtttgaagagtcactacatctggaacagaaaggagactgtgctgcagctttggctctctgtaatgaagctatcttgaacagcctatcccgctccaagtattgttaagccaagaggcccaactggaatccggcatggatacagagtttggggccagttctttcttccattcacctgcttcctgccatgagtcacactcatcactatctccagagtcatctgccccacagcacagctcccccagtagatctgccttgaagcttctgacttcggttgaagtagacaacattgaaccctctgcattccacaggcaaggtttacctaaagcaccagggtggactgagaagaattctcatcatagttgggagccattggatgccccagagggtaagctgcaaggctctaggtgtgacaacagcagttgcagcaagctccctccacaagaaggaagaggcattgctcaagaacagctgttccaagaaaagaaggatcctgctaacccctccccggtgatgcctggaatagccacctctgagaggggtgatgaacacagcctaggctgtagtccttcaaattcatcagctcagcccagccttcccctgtatagaacctgccaccccataatgcctgttgcttcttcatttgtgcttcactgtcctgatcctgtgcagaaaactaaccaatgcctccaaggccaaagcctcaaaacttcattgactttaaaagtggacagaggcagtgaggagacctataggccagagtttcccagcacaaaggggcttgtccgttctctggctgagcagttccagaggatgcagggtgtctccatgagggatagtacaggtttcaaggatagaagtttgtcaggtagtctaaggaagaactcttccccttctgattctaagcctcctttctcacagggtcaagagaaaggccactggccatgggcaaagcaacaatcctctctggagggtggggatagaccactttcctgggaagagtccactgaacattcttctcttgccttaaactctgggctgcctaatggtgaaacttctagcggaggacagcccaggttggcagagccagacatataccaagagaagctgtcccaagtgagagatgttaggtctaaggatctgggcagcagtactgacttggggacttccttgcctttggattcctgggtgaatatcacaaggttctgtgattctcagcttaagcatggggcacctaggccaggaatgaagtcctcccctcatgattcccatacgtgtgtaacctatccagagagaaatcacatccttttgcatccacattggaaccaagacacagagcaggagacctcagaattggagtctctgtatcaggccagtcttcaggcttctcaagctggctgttctggatgggggcagcaggataccgcctggcacccacttagccaaacaggctctgcagatggcatggggaggaggttgcactcagcccatgatcctggtctctcaaagacttcaacagcagaaatggagcatggtctccatgaagccagaacagtgcgtacttctcaggattcatcaaacgtgaggaagcctttggaaaccgggcaccgttgttccagctcctcttccctccctgtcatccatgacccttctgtgtttctcctcggtccccaactctaccttccccaaccacagttcctgtccccagatgtcctgatgcccaccatggcaggggagcccaatagactcccaggaacttcaaggagtgtccagcagtttctggctatgtgtgacaggggtgaaacttcccaaggggccaagtacacaggaaggactttgaactaccagagcctcccccatcgctccagaacagacaactcctgggcaccctggtcagagaccaaccagcatattgggaccagattcctgactactccagggtgcaatcctcaactaacctacactgccacactaccagaaagaagcaagggccttcaggttcctcacactcagtcctggagtgatcttttccattcaccctcccaccctcccattgttcatcctgtgtacccaccatctagcagtcttcatgtacccctgaggtcagcttggaattcagatcctgttccagggtcccgaacccctggtcctcgaagagtagatatgcccccagatgatgactggaggcaaagcagttatgcctcccactctggacacaggagaacagtgggagaggggtttctgtttgttctatcagatgctctcttttcccactgtagaaactgattccagagaaattctccaagtgcggtgctatgtgggcttgcgggagaggtgttatgatcaaacagaaccatcctctttaccctctgttcatggtttttcttggctctgtggtccagtgagttgtcacagcttcactcccaatttctgggatattcagggcaataatcttgccactgggtatttgctagttgaaattatgtggtagggagagaagccagtaagcttcacttctccgtttggctgatgtcactctcgaattctgtactttcatacggattgtaatagggagggtctaaaaggaagcttcagttttggatttttagagcttcttctaagtacaattgttgaatcaagaggtaaaaatggtatgttataactggaaatacgctgagattaaaaaggagataaattagccccattgggacagtgctattgggaatgtgaattgataccactttcctggagtctagtttagtatttattttatatgtaatgcctgaaaagatgtgtgtctcctttgactcaatacttataggaatttacacaaaggttataatcaaagattatagaactgttatactggaaaaacacgaaatattctaattatgaattaattggggattggttaaataaactatggtttgatatgctctaaaaataatgttacagaaaaaagtgtactgatatggcaaaatgtatgacttatagttaaaaaagcaggttagatgttgatagatacagtatgatagaaaaagatcaggaaggtatatgctgacatttaaatctggatatttatgagtgttttttttatttcaatctttgtacatgcatgtattttctagaaattgtattactatctttgtaataaagtaaattatttttaagggact

SEQ ID NO: 474 - DNA, 3822 bp, Homo sapiens
atagaacctactggggagggacagagacccagagacccagagggagacactgacacagagagagtgatagagagagagaggcaaagtcacagagacagaaagaggaggggagagggatggagagagacaaagtcacagagatagatggagggggaagaagggaggaggcagagagagagaggagaaaaacagagagacggttgacagattaggagaggtgcttctggtgctgctggttgtgctaggaaaagacatgtttctctttggacagatgtgctgccagtgctggaagtaggctgactgtgtctctctccctgctctgagcctggcaccagatttggcaaaaccagacagagcaaaagctgcttccagcccacagcacccaaggctggtctcctctttcatcgcagggctgctatgtacagttgcacaggctgtgccctgcaccaagcacccagaagaggatacaagagcctgcctgtgctccttgaagtatccctgagccctgatgaacacctgtgtctacgtggagagaggggagcctctgctcacatgagcaaaggcaacagggggggactgcagaggcctgttccctcccacagtctctattttgcaataaggacatcaactgggagtggcccagaagcccgaagctgagaggacaaagctcactgggcccactcaacatgaagatgacaaggatgaagacctttatgatgatccattcccacttactgaatagatgaagcttcttggtgatgtaacagtctgtggaaactcccacaggacaaatgcagaaaggaaggacctagatcactggatggtcaacgttgccccttgcacagcagcaaaggcctatacaaattttttgagtagctttatctagtggttcagctactgggaataacttgtaaaatcccctggatagtcaacagcattggggcttgctttgtaaacagagacctgacctacttaattcttcccagaggttggaaaaagaggctggactcacacagacatgaaaccttggcttaattggacactaattactcataagagatctgtttacccgaacttcccctagaccaagctcagtataaaatgagaggatgcataaagaagcaagatatttagaggaaaatgtcacaaatacatttatcagtcccaaaagtccttttttttccccagaagtgatgttgctaattgcacaaaaataaacaatacaggggttgataaattccacatttaagggctgaggatagtgtccctacatttctaagaagctgtatatttggaaatgaatacaattgaaagtaaggataagtggcattctaaagccaattggataacttgaatgaacaagcagaatttaccatattttgatatgtttctttttgattaaagtatctgtaaaggaaacaaattatagtattgctatagattttattactgaacaagaaaaaaaggcttgatgttgtgcatttccttttggcctttggtcttggctgatattgggcatccaatgagcttctttgtcttgaatgaagacttaagagggagtgaaaagtaggaagagcatcaaaacttctttgcaggatgtaatcaaaccacctactacttattgtcttacgatccatttattcaacaaatggaacatctcaattgcttgatgctattacagacactaggtatagtcttagaaaaacaaattgctgtttttatatagcttgtgttatggttgatgtagtacagtcaaaattatttaaataaaggaagatgtgaggaagactttgaacttagaaatctgggttctcatccaagctttgctgctagcttgttgggggaaccttgggtgatgagttggttgactccttccagatctcagcgttcatccatcaagtgagtgaacttgaccagatattcaataatggcccttccagccccatctctatatgaaagggaaaccacagtatgggcccatggggaagatcatggactttggagtaaaacatttctggcttggtcaattatttaatctcttgatcccgatcaattcatgtaactactctgaccctcagtttccttgctgcaaaatgagatactaatatttgctcaaataagataacaggcaaaacaatcatgagggctcctggcacaccactgtgcatggcttttgctcccttggggagcttataaatgaaaaaaagattttacaatgcaaagacagtaagcattttgttagtgaagcaacaaaataattgggcaatttcctctcaattgcaccatcaactgatgcccaacctagaaagcatttggctaagaatggaaaaggaatctttgcccagatccctcaattttgaccatcatggcatatacatgaattggcagactaaatttatgctccttttgaaaactgtgtccattccaagaagtcaggctattttcacccagcctggtctaggcagtgggactccccaaggctacaagcagagccacagtgctctgggctgggctgccacactgtcatgctggggcaaagatggcagcagacagctctcttgggtaacagcaggaagctcttttcacaagagtgatctcatctcttaggggactatggtagaaacacagggcaaaagctataggaatggtccaacataataactgtttttttttttaattttcaaaacatgataaatgattaagaatataaaactggaatttagaacttacagagaacttgtatgaataaattaaaaagacaacctaattttaaaatgggcagaagtcttgggcaggcacattacaatatagcaggggtcaccaaattaaagcctcaccagcaaaatccacctcccatcccagcctgtttttataaataagctgtgttggaacacagccaatcccattcattcacacattgcccatggctgcttttgcttgacaacagcatagttgagtagtagggacaagaccatatgacctccaaagccagagatattaactgtcaggccctttatagagtgattcacggagacccccataatagaggaaaatacaagtggccaatagcacataagaagatgcccagtattacagccaagaggaaaatgcaaattacacccacagtaagataccattatgcatccattagaaaggctaaaattaaaaggactgacaacaacaagtgttgacaatggtgggtaacagcaagagctctcatacactgatggttgaagtgtaaattggttcagttttggaaaagagtttggaggtgtctactacagttaaacatacatatttccatgccccagaaactcctgggcatattctcaaaagaaacgagggctgtggccaccaagagacatgtgtgagaaaggtcctagcacctttatatatcatagtcccaaacagaaaacaacacatacccatccacgttaggatgaactaaataaattggggcatatgcattcaatggaatagtacatagcaatgaaaaaataaactgttgccccatgcaaagatgttttacagacataacgttaagcagaagaaagcagatctcaaggagcccacattgtacaattccgatctatatgaagctcaataacacatggtactagaagttgtaatagcagttacctgtaggactggaggtttgtattgaaagagaaggaacatcaggaagtctgctggagcctggaaatgtctgagatgttgctctgggaggcagttgcatggctgtagacatatgtaagacattattggatggtatacctgagattggagcacctacaatagaaggtacagtgttacatctcagtg

SEQ ID NO: 475 - DNA, 4392 bp, Homo sapiens
atagcccccctttgtatgcaagatcaaacacaagtttccaacaaacccccacatcttgagcttgaagcccaaacctacggaatcgaaatctaaagcttggacttctaaatgtgataatgcctcattcctgggaataaagaaggtgagaagagagaggagggatcattaaaatttttttttttcatgaataattggtcatgtcagacaaggctgtcatagtcaggattttgaatgacctagaagtcagtcagtcattttcctctgagaagccagagttcctgctggaaatgaaacttgataggagctggagaagcagaaggctaagaagagcagctttggggcaaagaacagggaagcagagagggggctggcagatttcttcattctgtcctattaggctgtggtggaagtacttgagatgccaggttctgcatcacagtgctaactgcctggcacatggcagtgggaacacactctcccctctgatgtgtaccaggaagtgtcagggggacccacagcaggtgcttggtgtattcttcaggtctcatgttgaaacttcacagagcacccccgagtgtcctgctcaggccagttttgctgcagaccaagtattgcagtccagtttggcagggtgggatctgagcagatcagccttaggccgactctccagtcaaggaaaggcctaggtgcattggtccacctgtgtcccttccgaaggctggtctcaccagcctagagctggcatgaaaaggtcctgttttgttcacagtactaggtgaggccattcagagtcatcaggacctttttccaagcttgtacttccctgcctctggtcaaggcttaaagggcagttccgtcctcaccttttgtactctcttgcacagagtcttgaaccctggaagcaggaggaggatatactgagttgggaagttcctccttcctccagtggcagatgtgtgggctcccaggtttgaaactctagaggtcattcaggtgtgccagtgaagaggcacatactcatgagagaaccaacaggctggaccttggaggttatttgcactagtgagtttcaaatttgagctagcatcagattcctctagagggcttgttaaacacagattgctgggtcccatccccatagtttctggttcagtaggtctaggatgtggtttaaaaatgtgcatgtctaccaagttccctaaagaagaacttggtagacatgaagcagcagctgctgctggtctgaagaccaaactttgagaaccaccaatttatacttgggctgaaaaaaacctgtctgactcttttcagagcaaattttgctgaggtgaggacagagtgggtggagaaatcttgaacccactagggagacaagtggccctctcagaaataggctactgcaggtgggccaacctaataaaactgagaagaggttaagggaggatgctggcagatgtatctcttctccatgctggtctggtccttgcatactaccctacagcaaggagccagacctggtgagccccggggctggatcattttcatttcctattctgccccctgaggcagcagtgagttctaaaagtctgcattttcggatgcctttcctcagtctgggctctgtggtatgaagaacgggaccctgagccggggtcctgggcatcggccctagcactgcctctaatggacagtaactgaaggcacctcatgttactcaagggtaatgtgagtgtggactagctctctggtgccttttgtgctctgatattctgggttctttaatgatttaccctgacagcttcctcctcagggtcaggaacttctgctggcttgttacttgttttttattttttccgtgtatgagaacttctgttgatcagaatcccatccagagactggctcgccaaaagtgaaactagagacaagtttgggaattggagagaataacttttctttttggagtcattggcacctgcagttgtgctgctgccataacacctgcctacagagagaatgactgcatcactgtcgtgcctgcctatcttaccccactgccagcttcacaggctgtctgatcagctctggtttccagggtgctcaggattgttattcgacattccccactgcctggcacagtgtgtggctcatggtaggcctgtgtgcatgcttactggatggatggaataagcggttgtatccagctacctcttcttttctcgcttcttcttaacttggtacagttgtcttcctttgccctcctcgcttccatccttccttccctgcttcctttgtactcatttttactcctcagcactctggcagagctagcatgtacgtcgagtgctttgggggttaaaagtatacacaagacaatcataaaacaccctatgcaagccatctatgtgaggggttcctccagagctccccactcttcctccttgtctcttctgcccactttgtctagggtagctgggaatgttttcactgtcctaggggaatttgctgttcttcagattgaatttgaccccgttttcagcctttatttcccaccagagcctgatggtgtttgtattggcaagccagaagactcctggcttggagagaattagagttagtacagcctgcctggccctgtcttttcagcctctatctgaaggggcaaaacaaatttttcggccttggttaattgttacttagcccctctgatccagcctgggcaactttcaggtagctcaggcactgactagcctgaagtctctgttgaaacagggaagattaaagttgatttgattcatttgaagtaaaatcagcaggcttttgatgatttcattaatttcctcccttctgaacaccctcctgttagcagtaattggaaaccctgactctgtttctcatttcccccccacccctctgctttaatctgagacaactggaaactgcactcagctttttcatttactggaagaatggtttgaagatggttttaatgactggctttgacactgtttccagaagctgagactgttgccgtgcttaagttcacacctacctgggggcctcagttttgctcaccttgcttctataaaactgcttagttcttggtgtgcaggtggaagagggtccccatgagaattctctttttatcccaggcaatatatatgcaagcttttcattactcattttcatcactcaacatttacagactgcctggggtgtgtgccaggcactgtcctagtaactgagtgtgttcccagcacctcctcctggccctggtggacgtccagaggactaggtaggtgagattccagcaggatggtggctaaactcaaaccttgggaactgtagtctctggggctttctttctctatctgtttttatagttgcaacttcagtttctgtgcttttttttttcttgggcctgaagagtaataaataatatgaaccaccacttgatgtcagagaaatagcaggtagcaatagctgcaacagctaatcactattggcagttgacaagatgtacaaacacttgcttgtatatcatgtcatattgttgtcctcacggtaaaccatcacagccagtaaaggacaaagccagaattcaacctaggccttcccattacaaatcaaatactttttgtttattattgttattatttttagagatgaggtttcactgtgttgtccaggctggtctagaactcctggcctgaagctgttctcccacctgagtggctgggattacaggtgggagtcaccatgcctggctctgctttttgtactatgttgttttgtttgatggtttggttttgtttttaacgctgacttcccatgctattgtctttagtatgacttcaaccacttaagtgttaagaacctattatgtatgcattgggtcttgtacaaggaagtcagggtctcacaatctaatggggggaaaagataagacaattcatcttagttgcccttgagtgattcaggtactgaatgctattagaaagaagagaattaaccctgatgtctgtctagggaggcttccccagaagagccaagacttgaattgggcatggtggaaaggcaatactcacctctatctttctttctctctctctcaaactttccttaaagttctcattgcctttgcactgcttctgtgaacagtctttgtctcctccccacctttggtgggaagtgcggggcagtcctggtcaagacactcatgccctggcaatgtggctgccagagaatgttgttgctaacccaccagtttcttgttgatttggagaggtcaaggccaggcccccacttggcttgaagggacattttcagacttttctttctgtcacttggagtgtctatgcctctcatatttccctaataaactcctcaactttt

SEQ ID NO: 476 - DNA, 4873 bp, Homo sapiens
acaactggattgggaaagggagaggaggaaccgaatcgagaggccatctacgtggtccaggcaggcctggcaaaggcaggaagagtcctagtgggaaaaggaggatgctagaagccacctgtgtctcaggggacccctggggtcaagatcaactttgaagtaggaggatctggctgtgttaggggaaggcgacaggcttcagttcagtttcaaagttttaaaatatgaccttcagctgctcccttccccagcatgcagaaacacactcactggccacccgaagtcccccaggctgtgctgggtcagggcagtcaggccacgcacacgtgttaaatagcgtatgcgtgcgtggccctgcaccctccctgctctcggggagtcaggcaaaccacagcacaggagcgaggaccaagggctatggcaggtcaccaaatctggggccatttcatcaaacaaaaggcccccaggggctgagggcttcccaggggagatggcccctgggctggaccggggaggttgggcaggactaagtgggaggctgccagctccatcctatgggagcaggcctccaaagccactcgggggagctgccccttggcgtgctgtgctgaggccccactgcccagcacacagacatcctcttcctccaaggggcccctcaagacaatagacctggcattccaggtcgcctgcctgtgtcatgagtcagaatccccgtggtgcccatggcttccctgcctttcttttttctcaggctgtgtttatttatagtgccattccggtaccttccgaagctatctgtctgattcttttagggatcaattgcaaagagaccttgctattgggcagctttttagtcatttaatgcaaaatgccacactgctttgcaggtcaggttttaatgatctggaatcgatccaagctaagtggcttttgatcttgctgcagagtgaagatgccccacagaagccaggagccgctgggcaacatgctccttattagagctgatggcttgattcttgctgcattttttagtctgtttcagagtgatttttcctttgtgtttgagcatgtgtggttttttttttctcctaggtaattttgagtgtggaaatccagagaatctaaaaagcaaatgcattcctgttatggaagcccaagaatatatagccaatgtgaccagcagctcctccgccaagtttgaagccgcactgacctggatactgagcagtaacaaggacgtgggcatctggtgagtgtgggcagggtggcgacgcagcatgggtgcctgcaaccactgtcctcgctcgtcagctaacacccgtgctccaacagagctgtctcaggtctgaagctggaggctgggtctcccagcagaatcatgtgggttaggatggaagtggggcaacaaaagcaagaagcatttggaatgcagtgtaaggagcagcttcaagatgagacacaaaatccaggtgttaggatgttagcctggtgttccagctaaatcctgtctcaggtaactcagtctgtgcctttctcattcatcaacaacaccacatggtttgttggggaaggcatttttctgcacttcccctcctcgggagctagtttttatttgtagatgaaattattctttctgtatgttggttttacttactatggaaatcgcataaggaaatactggattttattctgaccaggcagtttctgcctcatttttatcactggtgagcactgttagaaaaggtagcaaaccctttcatgaggctgaaaggctgtatctggcggctcagcccagggggaggggcgtgtcagccaacagccaggcagccttgagagacctgtcccctgctggcagagcagcatcacttccccacttcccactctcggtgtttgtgggggtctctgttcaggttatagctcttgatattaaaacgtctctagagttttgttcttttcctctctaatccacccaaattactaattccatcagcactgcatccagcagaagcccctcgggcagctccacctcaagctggataactggatgcatggcacgattaaaatttgttggcttaaaaaaaaaaaaaagctgccctgagtagctgagcaattttcctgtgttagaaaaggcggaggagaatacggattttatcctcagcagcagcgctcactgaagctgctaacacagaagaatgatgacactcaccttttcatgttggggaaggcagcctggagggtggcagagccgctcaggatgaccatattgaaagtgggtcctgagaaatcaggacacttgggatgccagccattccagcatgcagcctcaagagcatgatattctcgccctgggtcacctagctggaagaaggctctggtgtccccacctctgcaggtcctgacacctcctggccagagaccatggtggaggtgccgtggctggggtctggcctcggagagcctggtggttttcattccccatgagcctcacggattccccatgagcctcatggatgccccatgatctttacacttaaacagcttatgtgcctccttgtcaccgaggaaaagtgcaacctcccagattctgtctttcagttcttgccatgcaattgcaaagctagtgattcagtaaacatttccatttctctatgctgggaggtgggaatccaatttacagtttaatctcctgcatgctgagagaggctgtcaaagacctgacagggggacgttgctttagcggtaggggttcaagcctgctgccgtctttaaagctttattcattctaagtagccaatgtgggaaatttctggaaagaatgcagccaggataccaagcctattctataagcaagtagaggccttgcgtccccactttccttcgcttcctcctgtttgaagtggggcttgcactgcctctccttggagctttccaacatgttcagagccctgtgtcctgtttcaggttgaaaggagaagaccagtctgaattggtgacgactgtggacaaggtggtctgcctggaatctgcccacccccgcatgggtgttggctgccgcctgagccgggccttgctcactgctgtcaccaacgtgctcatcttcttctggtgcttggcttttttgtgggggctcctaattctcctaaaatatcggtggcgaaagttagaagaggaggaacaagccatgtatgagatggtgaagaagattatagacgtggtccaggaccattacgtggactgggagcaggacatggagcgctatccatatgtaggcatcctgcacgtgcgcgacagcttgatccctccacagagccggaggcgcatgaagcgtgtctgggaccgagctgtggagttcctggcctccaacgaatcccggatccagacggagtcccaccgcgttgcaggagaggacatgctggtgtggagatggactaagccctcttccttctctgactcagagcgataagccccgggcggggacttgttcccggtcagcctgtcccaggacagcccactccagaggcacaggagggtcaccaggcctggggtgctgaattcacacttgccttgactttcagtctcgtcctgacacgattccaaaggtctgccatactcttcagaggagttcggctcgcaggaaaatgtgggcttcctttaaagggagggggagaagccagggtgatagcccagactctgccctgttgtgctggcagaaacggggagaagggttgagttttcatgaatagaaaacaagagcagcagctgtcaggcccagctgacaagcgtggggctggtgggctggggcatggccacgccagggagtctgtcacctgggaggtggggcagggatggtgtttcgggtggcgggatggggagcagcttggtccatgtgccttcagggggttgttacctgagagctccagggtgaagggagaaagcctgtgctctggctggctgggcctctatcctgaagagggaaggtgctagaaattagaacaagtgactgtaggggggaccgtctagaaacaccaggcccagacacacggtccctcaggtcaggaggagtgagcagccggcacagcctcctgggaggatcccgaagtagggactggggctgagagcagagaggagggtcgggcagccccagggcgggcgggcccgcctcagtgttgcttctcacagaagctgcgactctagaccaggcctgcagccagaacgccgattccgggagcttgggagccctgcgtcagggcccagagcctcgcacttgctgtgtgcgaagatcgccttgctttactgtgaccacagccccgacgcggggctgtttaacaagaacttcagcgcagccggcgtttctgttaccccggccgcggctcttggcggcgggagaggcgcagtggctgcaggctgccccctgccggccacaagggagcagcgtccgcgccgccgcccaccggccctcccgccagctcctcagcctgctccctgggaggcaggctccagaagcaccccgacggggggccttattaagtgcgagaagcctctccagcgagtcttccccgtgtgtcctcatctgcggcaggcaggagagggggagcaaacaggaaattccacagctgcctccagaaacattaaccacccctctctagtcttactggtatttttttgtttccttaataaagctccagtctccctcatttgagcaatactctcatttcctctgatgtctggatgatcggcagggcaggaatctgagcgctggccccgtggtgaggccatgttctcataatcaggctccagccagaaaaataagaaacaccgcaacaggcttcagtatcagggctgaaactgctggatgaataaactatttatt

SEQ ID NO: 477 - DNA, 4040 bp, Homo sapiens
attttctaagctttacatttccggtgtagtatcttgctctgaccacagccttctttctttccacttggtctagtttatcttcactcccattgctccagcttttttccctcaagagaaacagcctgccttccagcctacctctaggctggtcaattcctcccaccatgtcatcctgtccttggtttctctgccgtccttcttctctatttgactctctctcttgcagtgtggctgaaatgctgactcagcatctttcttgtgtctgtcactcccctgcttctgtgcctcacctttacagcaaaattccgatacttgttattacttcctttaccttcttcttcctatacctatgggatgaacacttcctaaaaaacgatcatacagtgatacaggttggtatcattgctaacacatggtcttcagttgcatctgagccccagtgctgcctttcttttagttttttttttttttttttttttttgagatggagtcttgctctttcacctaggctggagtgcagtggtgcgatctcagctcattgccacctcggcctcccaggttcaagcaattcctacacctcagcctcccaactagctgggattataggcgaccaccaccatggctggctaatttttgtatttttagtagagatgaggtttcaccatgttggccaggctggtcttgaacacctgaactcaagtgatccaccacctcggcctcccaaagtgctgggattacaggcatgagccaccacacctggcctcttttacttcttttttattgttatgtgctcagtcatttcctaggatttttttctaaacccccctactgattgccatccacttccactggatcccttcctgcttagagcagctgtgtagcacagaggttatgagaagacactcaccatccagactgtgttcaagcctttgctctgcaagctattttatgatcctaggtgatttaacttctctttgttattatttcttcatctgtgaaaggaaaataataatggctcctaccttatagaatcattgtgaagactgtatgatttagtatttcttaaaaacagttagaatagcgcttggcacatagtaggaactttgtaagtatcagtcattactgcctattttattattgaacattgaggctgttagacctcatatctctccgttttgatccttcatatctgcagttttgtcaataacccattcaatcttagtgtatttccttcattctcagaaatgatacattaagagggcatttctcttcctgtttctttctgcctctagcctactttcatgtttatctctcttttttatatatatctttaatctattccttgaagtgaaatctatactctgagcccacaagcatactaaaatttcttccattctaaaaattatatcatcattatcattattatcatctacatcattatcagaaacaacaaaagaaggaaaaaagaatattcctctgatatttcctcatatgctttctcaggtcctttcttctttttttctcttatatagattttttttttgaaagattgtgtttcccccaaggtgcactaccttctggctataattgctgatattgatcaaggaacctaatgattagatgactgtgacattcaaggatttgctttctctctttagtccactcggactctcttctggatttcacagttagccagtttcgactgtcataacataagcacttgtggtcaaccattccactctcacccggttctgcacttgtctctgacttagccttgtcttttttcataggtcttcattctatttcctaaatatatgctttcctccaggtcccatttttcaccgtgatcccttgttctacgtatgttcccgtggtaatttaatctattcccgtgatttatcttctatatttactgtatgtgccagtgactcacaaatctctatttctagcccagaactctctcctgagccttcagaccactttccaaatatttcctagatgtgaacacccataggcatcccaaattcagtacatctaaaattaaattcattatgctcccaattgtcatattgcttctgtatttctatcttagtggatgcctgcactatcaacccaaatagcccagggcgaaaaccaggtagttatcttagagttcttcctctccattctattcagcatacaagcccctgttgatatcactatgcttaaaattgtatctcacatctgtttcttccttagtcttaactctcgctacgctaccttaatttagaccttcgttttcctttatatgagctattacaagaatctctgaatgggttttttccttaatgtcacctactacttaatctatactgtacacagttgacaattatcatactagaacattaaactgatcatgcgctgttttgcttaaactttttagatggtttccaactgccttcattttataatccaactcttatgcagtattctttatcaaccagcctcagttcttgtcagaatccctctgtgagcgtatgacacagatccattccgccatgtgatactcttctctttaatgcctacatgcttctattcccgtcctctggaaaacttttatttatttttccagacctggcccaattgctctatcttggggaagcttttcacaatcattcatgaatttcaaacatttatttactctaattttcaaagtgttttttagatggcagttatcacatcggcctggagctatttgaattcccaaatggctctatgcattcctatattcccaacactcaggacgctgcctggaacttagcaggtgcttaatgaatgtttgaatgaaatttgaactaagtattttagaaagttacaggagatagtttgtctcattggagctcagagtcaaggtagggaaaatggggaaaaaaggagggcatcaaaggaagaaggaagactgtagggagcccaaatgttataatatatataagttccccacgaagagaaaaggaagaaaccatgaagaaatataccttgtgtataagagaatattgggaaattgcactataaaaggaaaaaagaatataaataaagctctggcaaccagtgcacccaaggaatgaccagacagcaatgacagtagaaggaaaagggcaaccctgtgagaaagaaaagcctgagcagcgcagattgtcagagagcatctgcaaaagaaaggtgagagctttctgcaaaagaaaggcgagagctttctttgcaactgctttgcacatttctgctaagtaatgatgctacaaagccacacatttttccatttctctctaaaactccttcaaagagcactgagaccaagctgtattctctgtaatttgcccttagctgtatggaaaacatctttgacctacagctagtatcctatgcagaaaccttccagtgctctgctattctccagggcttttcttgcagaaaataaacaaagtgatgttctgtagaatgttgaccattattcctgttcctgaaaggtactggggaagataagtccaggacagtcatgagaatcactcttctcagttttgtaaagtggggtggacacatccaccttgcatagagctgcacagaacttccactgtttgtgccaatgtggcctcatatatataggtcagtttgaaacagtattaaatattcacaaaataaactgtacgtatatgcatgcacatgccttttgtgtgtgaacaactgaaacattctctgtttgttttcgccttagaaatattagctgcccccgtccgggcgcggtggctcacacctgtaatcccagcactttgggaggcccaggcggcatgatcacaaggtcaggagatcgagaccatcctggctaacatggtgaaaccccgtctctactaaaaatacaaaaaattagccgggcgtggtggcgggcgcccgtagtcccagctactccggaggctgagtcaggagaatggtgtgaacccaggaggcggagcttgcagtgagtcgagacggcgccactgcactccagcctgggcgacagagcgggtctc

SEQ ID NO: 478 - DNA, 3681 bp, Homo sapiens
tttccatgcttcatgcctggccctgtgagcccacctgcccgcagccctacttcccaggcccctcatcacccctccactgctcccgtctgtctccatgctccagggctagccgtgggcctggaccccgagggctacgggaaccctgacttctgctggctctccatctatgacacgctcatctggagttttgctggcccggtggcctttgccgtctcgatgagtgtcttcctgtacatcctggcggcccgggcctcctgtgctgcccagcggcagggctttgagaagaaaggtcctgtgtgagtatagggttggggtgcctgggccatgggcaggcaccagcatgggaggtctcatggccggactcatggcctgtccctatccccagctcgggcctgcagccctccttcgccgtcctcctgctgctgagcgccacgtggctgctggcactgctctctgtcaacagcgacaccctcctcttccactacctctttgctacctgcaattgcatccaggtacctggcccagcctgtggagaagggaggcacctgggctgtggatgcctgaatatgcacagaccgttgctgcctcttgcctgccagggccccttcatcttcctctcctatgtggtgcttagcaaggaggtccggaaagcactcaagcttgcctgcagccgcaagcccagccctgaccctgctttgaccaccaagtccaccctgacctcgtcctacaactgccccagcccctacgcagatgggcggctgtaccagccctacggagactcggccggctctctgcacagcaccagtcgctcgggcaagagtcagcccagctacatccccttcttgctgagggaggagtccgcactgaaccctggccaagggccccctggcctgggggatccaggcagcctgttcctggaaggtcaagaccagcagcatggtgaggacagaacgctctggccacccagcagggcagttggctggcttttactgaaggtgggtggaggtggctgggctggctgtgatctctccctggcctcctagatcctgacacggactccgacagtgacctgtccttagaagacgaccagagtggctcctatgcctctacccactcatcagacagtgaggaggaagaagaggaggaggaagaggaggccgccttccctggagagcagggctgggatagcctgctggggcctggagcagagagactgcccctgcacagtactcccaaggatgggggcccagggcctggcaaggccccctggccaggagactttgggaccacagcaaaagagagtagtggcaacggggcccctgaggagcggctgcgggagaatggagatgccctgtctcgagaggggtccctaggcccccttccaggctcttctgcccagcctcacaaaggtgagtggggcacccccagctgccgagctcccctagtcagcagcctcatacctcacattctcctgtggccgcacctcacagccccgccccggcccacaggcatccttaagaagaagtgtctgcccaccatcagcgagaagagcagcctcctgcggctccccctggagcaatgcacagggtcttcccggggctcctccgctagtgagggcagccggggcggcccccctccccgcccaccgccccggcagagcctccaggagcagctgaacggggtcatgcccatcgccatgagcatcaaggcaggcacggtggatgaggactcgtcaggctccgagtgagtgtggccgggtgggcgggacggggtgcagcccctcggaggcctcacctgggcccagagctgcctccgggcctccccaggtgactctggatggcatttggaggacaaatgggcagaactggcccagctcccttactatgccgtgcccacaaaccatggtgccttgcggggagggccacccctcctaggctctacgcggcgcagcccagcctagggcagagtgcgggaggatggggagctgggggtgctttcctgtttccttcgtctggtgaaagctttcactctctcctctgtttcaactaaccctctgtctgccttttctgccactttcctttcctgcctctccagatttctcttctttaacttcctgcattaaccctgggccgtggttcctacgcccgaggctcccttcccttccccagccgcactcatgccctgctcctgtcttgtgctttatcctgccccgctccccatcgcctgcccgcagcagcgacgaaacgtccatctgaggagcctgggccttgccgggaggggtactcaccccacctaaggccatctagtgccaactccccccccaccattcccctcactgcactttggacccctggggccaacatctccaagacaaagtttttcagaaaagaggaaaaaaagaatttaaaaaaggatctccactcttcatgacttcagggattcattttttttatacgctggaaattgactcccctttcccttcccaaagaggataggacctcccaggatgcttcccagcctctcctcagtttcccatctgctgtgcctctgggaggagagggactcctggggggcctgcccctcatacgccatcaccaaaaggaaaggacaaagccacacgcagccagggcttcacacccttcaggctgcacccgggcaggcctcagaacggtgaggggccagggcaaagggtgtgcctcgtcctgcccgcactgcctctcccaggaactggaaaagccctgtccggtgagggggcagaaggactcagcgcccctggacccccaaatgctgcatgaacacattttcaggggagcctgtgcccccaggcgggggtcgggcagccccagcccctctccttttcctggactctggccgtgcgcggcagcccaggtgtttgctcagttgctgacccaaaagtgcttcatttttcctgcccgccccgcgccccgggcaggccagtcatgtgttaagttgcgcttctttgctgtgatgtgggtgggggaggaagagtaaacacagtgctggctcggctgccctgagggtgctcaatcaagcacaggtttcaagtctgggttctggtgtccactcacccaccccaccccccaaaatcagacaaatgctactttgtctaacctgctgtggcctctgagacatgttctatttttaaccccttcttggaattggctctcttcttcaaaggaccaggtcctgttcctctttctccccgactccaccccagctccctgtgaagagagagttaatatatttgttttatttatttgctttttgcgttgggatgggttcgtgtccagtcccgggggtctgatatggccatcacaggctgggtgttcccagcagccctggcttgggggcttgacgcccttccccttgccccaggccatcatctccccacctctcctcccctctcctcagttttgccgactgcttttcatctgagtcaccatttactccaagcatgtattccagacttgtcactgactttccttctggagcaggtggctagaaaaagaggctgtgggcaggaaagaaaggctcctgtttctcatttgtgaggccagcctctggcttttctgccgtggattctccccctgtcttctcccctcagcaattcctgcaaagggttaaaaatttaactggtttttactactgatgacttgattt

SEQ ID NO: 479 - DNA, 4360 bp, Homo sapiens
ctgaaatggacttgctttcagacatttcagaggaagacccctttggggaggctgaccagatcacactagacagcttagagcacctttccacaggtgaaatatcggagcagggggattctgaagttgctatgcctgatttggtcttggattctgccatagccccttctcagcctgactgtccttctcccatccatgggaagactcttaaagcagctgacgacagtgattctgagtttggttacttctccttcagtttctccaaatgttttccctccggcttcccctcccttcttgatgaagatggatatcttgctttccccagcctccccaaggtctgggtctccttcctccccgctggtgtgcagcactatgtcccaatcacctccccttcattcattccttcccttatcctcatctttgggctacttctgtctgcttctcagtcagttcctttttctcttgccttttcccttcctctggctctatccctctgctatctggaggctaaagccgcctcctttaatgtttcttatgactgtgacttgaatgacaagctcgaggaggaggaagtagttgctggcatgcctacgtaagctcagtttgtggagtcaacacaatacactttatcttaaacccttcctaatatagaatgtaaatgtgtgcatacatttcaccactgattaccctcaacatagtagtacctgcacattttcacacacacaatattttagtgcatgagaaataagtgtagacacttctccttcattgataccattgaccagttccacacattctaagttaggagcgaaattgtaggattattttacaaatatctagatcaaagtagatttgtaacagaaggtgtgggggaggagggaaggaggagggaacctgtattgcccgtaacaatccatacagggtctctccattttgcaaacagatattaatgctgttcctttaggatgacatctttttgttttgatatagaatttaggatgcagtggacataactgttcctgatgtatattagtagaattccttagtactgttatttctcttgttggaaacccaagtgtgttctagcatctatgaggatgtatctgtaacctttactcctgacatttgtaagtctaatctcaaaagctccttatctccctattattgtagtatttggagaccagatgaattttagctagtttttttttctaaccttaaattatgtaattatatataagagtcactatagggtattttataaggaaggtactattctgttgtctttaacaaatgtatgtgaaaagtgaaacatggctttttgaaaatttagactatataacactaagattgggcctcatagtgctcctttatttaaaattaggtgtttggtttgaggatttttacccctatataaggcaaatttttttcaagtatcctacctctgtgctactaagtcagcattaacatgtacaatatatttttgattattttgttaaatgtggcctggtgatttagtgcctcatattctgtggatcctaccaatacatacagtaaatcacaaaatttagagcaaacctaaagaaaaatgtaaagataattgcagtgagtatgcattgtaggacaattgttaaaagtttacctgaggaatgtcaaagatcaacattttagggaattaaatgttgaccaaggagttggaagatgtttcttaacagattattgaatgtctgtgtctcatttttcacatctgataaagactctgagctccttgcttacctctgaaaaatactatgaatggttaaaaaggtaagccgtttgaactctcagatttgacactatcatcctaattaagaaggaaaaggatatatattaggaattaacctataaaggttaaatgatttgcctttgataagggagtcaatatttttattctcaccattttttcccttgagtcaaaattcagtcagtatttgttagttttaaacttctacattcattcttttgaatcatcagatattgagaaatgtccaactatgaaaaactgttcttatttaaagaattttatgtaagtggttatatttcaaagattatttttaaatacccaccattttaatatgaaactagttaaataagccaatccccctcccccagccagaaaagaaatccatatttaacaaactgaatcataggttgaacatttgttccccaatataaagctaaaaacgaattttacatcattatactttaccccatcactagttgctttagacatttcaaattagaacagattgaattatgccatttttgcactctcatattcttgttcctgagtacaaaatattcaaaagcagagcataatctagggactgagaaagagtgaagcttccatcctccattccacctttgcaaaggatcatttccatcattcgtacaacactgtaggtgaagaaagaccaaagaggcttaatattctgcatcttctgagggcctcacagtaaaggcgaagatggaagaagaggaaacgcagctggaagagaaaaattccttgagagtagaaggggataatatttatgtcagacatagcaatttaatgttggaggaactggataaggcccaggaggacatactgaaacatcaggctagcattagtgaactcaagcgcaattttatggaatccacacctgagccgcgccctaatgaatgggaaaaacgacgtatcacacctctgtccctacagacacaagggacacgtgctcccgagtcagaagggccttgcactggagccagggatgctgttaagccaccagtggtaaaaacagagatggtaacaatttctgatgcctcacaaaggacagaaatctccaccaaggaagtccccattgtccaaactgagaccaaaaccatcacatatgagtctccacagactgtaaaaggtggaatttctgaaacaagaattgagaaacgcattgtgatcacaggagatggagatattgatcatgaccaggcactggctcaggcgatcagggaagccagagagcagcaccctgacatgtcggtcacaagagtggtggtacacaaagaaacagagttggctgaggaaggggaagattaagtaagaaagtcattttttaaacaacactcaactttgtgaacccctgaagattttttgaccgttccaagtcttaatgccacaccactattccagcgaatttatgctacaactggtaacaatgaccagaagcctgaagaattaaaatgccaacaccaaacctttccttaccagctctggtctatattgctcccatgcatttaatatattattttgttttataaccacttctaaatattctcagttctttctttttgttgttgttaattaaggggttttggttttgttttctgtttactttgtgtgcaactacctgcttttaatgactcactttgatcaaatgacagtgaacaaagccagcccaagctggtaaggtgctgttcacttgaacaggtgctgttgcgcagaaaggaaactctgtgactaatttagatagtggctttccttcttctggattcttttcattgaattctcacagtaaatatttacggagttttcaaattgcagcaaatatactgtatgagaaaatattaatacagattaaaagcctttcttacatcttgaaaattttctaatatttgagaatttcacagggatgttttttatattggacccttttgactttccagtcctgtgactttctacttttagtagagagtcagaatctctggactggagaataatgaagaagttcactgactgtgcactgtgcttagagaccctgccgcaccacagtgccaatgcttgtcagacacatgcccttcggcagcattccagaacaggagggaagagaaagagaaaactttcttcccttctactaaaagattcaggcagcttaaaaccttagtgctttctttcttaacatacccacatttcaattctttccattatttgaacacttgggtagaactcttgctttgtattaaacctctttgtctacacatgtaaaacttaccttttgttattgagcaggcctatctctttcagatagttttatgattcacacaggtttgaggatgctggggagagggggagggggctgtggtggtgttctgttggttacaagaaagttataccatttaaagctggcaccagagacccgatagggacttattaactatattgaacattttttcctttgcctttgaccctatgtatagttacgatgccagattagatttatagcagcctcaagttgtattaaatgatattttgcttcctgtaatactattataaaataaagtttgtttattctct

SEQ ID NO: 480 - DNA, 3951 bp, Homo sapiens
ctcgttatgttgcccaggctggtctcaaactcctggtctcaagcagtcctaccgccttggcctctcaaagtgctgggactgcaggtgcatgccaccatgccaggccttctaccacttttacctaggcctgctcaccccaggctggcacctccctcagaggtgggaggtgaaggtggctgctgctgggcatttaggaggtacaggtgcagactatgttgtggattctcagaggactgagaagctctctgtctctctctctaggaggctttgatagtgttatcaaagtgggtctccagtgtttctggaactttcctccccttccttccttacctaattccttctttaaattccaggacctggaatttatcctgtctcgacacttcttgtccaacagtgagccccctgtcttcacccccctaatcccctgtcttcacatccctcttcccactttatttgctttccccatggacccatactcagggttttgggaggatggcagcggagtatggtggaggagagcgattatttaaagtagaaacccaaagcttttattatagtaaacttggaaaatacaagagaaaaattcacccctagaaaattattgtaaacatctagtttgtttccctctgcatattttaaaaactggattgcctcattttaccttgtgttagtgtcttgatttcattgttacgccgcctaccccctccacagtgtacacttggagtgcgtccttctgtggtctagttattttcacttggaggaaggaactttcacagaaaatgtgttgtgtcagtcctttctactcattaaccaagaaatcacaatgttgttttctttctcaatgtagagaagtcattcagaattcaaaagaagttctaagtttattgcaagaaaaaaaccctgccttcaagccggttcttgcaattatccaggcaggtgacgacaacttgatgcaggaaatcaaccagaatttggctgaggaggctggtctgaacatcactcacatttgcctccctccagatagcagtgaagccgagattatagatgaaatcttaaagatcaatgaagataccagagtacatggccttgcccttcagatctctgagaacttgtttagcaacaaagtcctcaatgccttgaaaccagaaaaagatgtggatggagtaacagacataaacctggggaagctggtgcgaggggatgcccatgaatgttttgtttcacctgttgccaaagctgtaattgaacttcttgaaaaatcagtaggtgtcaacctagatggaaagaagattttggtagtgggggcccatgggtctttggaagctgctctacaatgcctgttccagagaaaagggtccatgacaatgagcatccagtggaaaacacgccagcttcaaagcaagcttcacgaggctgacattgtggtcctaggctcacctaagccagaagagattccccttacttggatacaaccaggaactactgttctcaactgctcccatgacttcctgtcagggaaggttgggtgtggctctccaagaatacattttggtggactcattgaggaagatgatgtgattctccttgctgcagctctgcgaattcagaacatggtcagtagtggaaggagatggcttcgtgaacagcagcacaggcggtggagacttcactgcttgaaacttcagcctctctcccctgtgccaagtgacattgagatttcaagaggacaaactccaaaagctgtggatgtccttgccaaggagattggattgcttgcagatgaaattgaaatctatggcaaaagcaaagccaaagtgcgtttgtccgtgctagaaaggttaaaggatcaagcagatggaaaatacgtcttagttgctgggatcacacccacccctcttggagaagggaagagcacagtcaccatcgggcttgtgcaggctctgaccgcacacctgaatgtcaactcctttgcctgcttgaggcagccttcccaaggaccgacgtttggagtgaaaggaggagccgcgggtggtggatatgcccaggtcatccccatggaggagttcaaccttcacttgactggagacatccacgccatcaccgctgccaataacttgctggctgccgccatcgacacgaggattcttcatgaaaacacgcaaacagataaggctctgtataatcggctggttcctttagtgaatggtgtcagagaattttcagaaattcagcttgctcggctaaaaaaactgggaataaataagactgatccgagcacactgacagaagaggaagtgagtaaatttgcccgtctcgacatcgacccatctaccatcacttggcagagagtattggatacaaatgaccgatttctacgaaaaataaccatcgggcagggaaacacagagaagggccattaccggcaggcgcagtttgacatcgcagtggccagcgagatcatggcggtgctggccctgacggacagcctcgcagacatgaaggcacggctgggaaggatggtggtggccagtgacaaaagcgggcagcctgtgacagcagatgatttgggggtgacaggtgctttgacagttttgatgaaagatgcaataaaaccaaacctgatgcagaccctggaagggacacctgtgttcgtgcatgcgggcccttttgctaacattgctcacggcaactcttcagtgttggctgataaaattgccctgaaactggttggtgaagaaggatttgtagtgaccgaagctggctttggtgctgacatcggaatggagaaattcttcaacatcaagtgccgagcttccggcttggtgcccaacgtggttgtgttagtggcaacggtgcgagctctgaagatgcatggaggcgggccaagtgtaacggctggtgttcctcttaagaaagaatatacagaggagaacatccagctggtggcagacggctgctgtaacctccagaagcaaattcagatcactcagctctttggggttcccgttgtggcggctctgaatgtcttcaagaccgacacccgcgctgagattgacttggtgtgtgagcttgcaaagcgggctggtgcctttgatgcagtcccctgctatcactggtcggttggtggaaaaggatcggtggacttggctcgggctgtgagagaggctgcgagtaaaagaagccgattccagttcctgtatgatgttcaggttccaattgtggacaagataaggaccattgctcaggctgtctatggagccaaagatattgaactctctcctgaggcacaagccaaaatagatcgttacactcaacagggttttggaaatttgcccatctgcatggcaaagacccacctttctctatctcaccaacctgacaaaaaaggtgtgccaagggacttcatcttacctatcagtgacgtccgggccagcataggcgctgggttcatttaccctttggtcggaacgatgagcaccatgccaggactgcccacccggccctgcttttatgacatagatcttgataccgaaacagaacaagttaaaggcttgttctaagtggacaaggctctcacaggacccgatgcagactcctgaaacagactactctttgcctttttgctgcagttggagaagaaactgaatttgaaaaatgtctgttatgcaatgctggagacatggtgaaataggccaaagatttcttcttcgttcaagatgaattctgttcacagtggagtatggtgttcggcaaaaggacctccaccaagactgaaagaaactaatttatttctgtttctgtggagtttccattatttctactgcttacactttagaatgtttattttatggggactaagggattaagagtgtgaactaaaaggtaacattttccactctcaagttttctactttgtctttgaactgaaaataaacatggatctagaaaacc

SEQ ID NO: 481 - DNA, 1669 bp, Homo sapiens
gtttgctgaattaatggtccctatcgtagctaatgtctgaatgcttaccatgaccaggcacggtataggcaatctccatgcatgatctcattgaattcaacgatttcctgtagtcttagagacctgtcaatatctcctgctacatgagctcagctgccatcaagcactgtgttcgctgcttccttcacatctgctgtcttaagggagctcccacttccatgcggcccccgtggagctgtaatttggcctcaatgggaccagatgccaggtttctcacctggcttcttcctaaggcttccagccttagagaaagttacttaggccttattggaactatgggcagccagggcccctgtcaccaacctgtctccagacctatggcaaggccttcagcaggattctgccctccagagccacttcctctgctcccccagcctccagtgcagtatctcactgaatggtgaaagcacagctgtctctttcccagctgtatcttgccccccagcacacttcctggctgagataaacattcagcattttttttttttgagatggagtctcactctgttgcccaggcaggagggcagtggcgcgatctgggcttactgcaacctccgcctccctcccggattcaagcaattctgcctcagccttctgagtagctgggattacaggtgcccaccaccaagcccggctaatttttgtatttttagtagagacagggttttaccatgttggccaggctggtctcgaactcctggcctcaagtggtctgcccacctcggcctcccaaagtgcagggattgcaggtgtgggccacgacatccggccaacactcagtatttgactaataaatgaataaatagtccgtaggttctggaaacttcagaaaaccttagccaaacatccttctgtcatgaaaattgtatcaaagttttcaaaaataatacatttaattctacagaacaatttgcccgaacaagaaaggcagtattttttgggggaagatatcaacgattcaatttttgtaaagtcaactactttgcaaatatctaggaaaatacctgagggaaggagttaattgttgtgcctttggaggagtggagaactttcagtatatactgaactttcaaaaatcttaacaaacgtgtcattttgtaattaaaaatcacaaaagagtgggctgggtatggtggctcacgcctgtaatcctaccactttgggaggccaaggcgagtgtatcgcttgagctcaggagtttgaaaccagcctgggcaatatggtgaaatcccatctctacaaaaaaattggcccagcatgatggtgtgtgcctgtagtctcagcctccccagtagctgggtctacaggtgcccgccaccacgcctggctaattttttgtatttttagtagaggcgggatttcaccgtgttagccaggatggtctcaatctcctgacctcgtgatccgcccgcctcggcctcccaaagtgctgggattgcaggcatgagccactgcgcccggccaatttttgtgtttttagtagagatggggtttcaccatcttggccaggttggtcttaaacttctgacattgtgatccgcccgcctcggcctcccaaagtgctgggattacaggtgtgagccactgcgccaggccaagactcagtctc

SEQ ID NO: 482 - DNA, 4441 bp, Homo sapiens
aaggtttaaataggtgactgactcaactgcaaacagaccatgtaaaacagaagttgaaggagacctgatgccgccctcttcttattcctgatcctccctctgcctcctcactccctcccatttattcccagcttacagtgaaggctgatcaaagcagctatggtgccctttgcttgtctcggagctccacttcacaggaagtgttgtggtctttcatgtgaagttgcatttgagaagacaaaatttccaagccccgttcccacatcagtcatgtgcactgagcctgacctacaacagcactgctccctcactggatgggacacaagtgattccacagcctgcccttgctttcccttcatttctgtgtctgtaagtggttatgtgttgagccagggtaaattcagagagatgtgtacagagttcaacaatgggtctttaaaccattcaaatcattggcataattataagaactttccacaccgtggtttccaaaacaggtcatctctaactcgtttcctgcatgcctgtgtatatacatatataaatatatacatatatatatatatacatatatatatatatatatatatctttataccagatctatatgtacacatataatatgacttacatcatcaccctctgaccctatcacattcaggattctaaagcagggagcatcaagtttgccaaagtcaaggaaaaggaaagtcatgcacacaaaccaaagggaacatttcttcctgatttcataaggttgtttgttccatgcacatatatttacaaatatacacatatgtacccatattttcccaccctaagaatatcaatttatagccttaaggaaatcggtcagccatatccctaatgctgatatagaggcaaagaatacacaacagaaaatacaaagcaaaaatttagactgcagatactctctttgcttctctggagcagggtataaaagatatcaacaattcaagagccaacattgtactaatcaatctaaaataaatgagttgcacgcaaatgatttcatttattcacagcaaaccgagcaggtcttgcttgctgtcaccgcctaccctcccccatacttccaaggcagcagagcagcttggctcaaactgacaattcccaaatagaaactcctaaattgcatctgagaatgcccatgccaactccagctgccctctgcacctgaccagatcctgatgaactgaagctgaagatcagatggtgtttatgcagcttcccaggacctaaactgagtcaggcagtgacagagcaatgatatatgcagggactaagggatagggttgtttataccctcggcagatgcagcagaatgtcctaaagccttgcccagaagattataaaaagaggcggagactgttttatattcaggaaaaatgctttgtaaggcttctaacaggtgtcacctgacaagggccatcataatttattttatagggaagacatgaatcaggtggtttggagccctttcagcaaaacgcagctgcctcgctgattagacatttgacaatgttaatgtacatccattcctgggcagggagagagttggcaaactccccaccactgcacatagcttttaaaggcctctggaacagtgagagaagagatgagctacaaagggagcccacccccagaccactttaacaaaaagttgaccaaagaaaagacacctggtagagtggctggccagatagagctgaagaagatggaagttgcattaaatgctctgcagaaattactgcgttggactatctaacatgggtctgatggcaggcatttcagaacatggcagtgtgctttcctccccacatctaccaaacacacacccacacccccacacacacgcgagattatgtggatgctatgcctccttgcacctggacagattgtttttctggtaagtaggtggccctattataggtggcagctgtgttccagaagaaacaaagtgaagctgttctcagggtgatttctggagaaaactactgtctcctgaaagcatgcatagaagtcagtgctcactcttgctaagccacatattccttaacgatccggcttaatatttttaaaagatacctcctcaacccctatacctgtctcaacaatactgtcttcaattattaggtaaggccttgtcattaagagaggggtaggagaaaaaatagaataataaggaaagggaagaaaggagatattaatttcctaggattccaagaaaacaagtgtcacgtggaaatatatccctatgtagtttaaaacagtaacaaatatcaggctatgtttagccaattacaagagcccatatacagttttagatttttttaaaaaataatctcaggaagaccttgggtaagaaaagtaaccctgccctattccaccttctatttactgttagctccctgactctgcctctgcctctgtctttgcgtttcatttttaatctcagagcttcatattttttaaatatatagcaaacaagaaaagcaataagggaactactcacagccagctcaactctattacttatgattacaccatggcaatattcctttttcaccaggagctttggacctgcgcaggttgtggcatgtaatcacccggagcatgtagtcgtctgtagaaatcacaggcacactcatgtttgctctggaaggaatctgttttccacaatgactccccccagctaatgtacacactggcattttgcatgccttcctcacacatggggcaccagccttgctcagaaccacccaaactccacagaggcccttaatatggctagggacagatttcttaagaaagagtaagaagcagctacaaaggacaagcaaatccacaagtcaggcagcattcgagaggcaaaaatgaccctgcaattacgacaggctaggcaactgttttcaaattagcgtacgaacagtgagggactgtgtagagcaccatattatctaagccaaagcacttctaccagatcattcattgacagactggaaaacctaataaaatctttaaaaacagacaaatatctaagtctgaaagaatgccatggagtttgcctaggcttccaccaaagatttaattccattaagagggtttgtctagcctatcacgctaatccaaaggacagtcctcttacgggggagatcccagcatagatgctggtgtgacccagctcaatgattaacaaccatcagcatcaagaaaagcctccctccaagttaacccaaacccatccacttaatgacttaactttttttttttttttttggcaaaaagtaactgcatctgggcactcttcactctttgccccatagttggaagttaccgctatgtgactctttacctattttcaattaaaattatctttagatttttatttgagtctttaaccctcttaataatttttatagttcctccctactaagcctttttaagttctttatattgttcttaaatgatggaaccttatgactaatgataatcactgtctgaacagtgttgaactatactgggtgcagcatgaccatgaagctctggtgaagtcaaggtcacaaactgcttttaaggtcattaggtcataatctcagactcacaaagaactcaaaattggggagacaccactttagattactccaaaactctgggcctgtacttacccactaatttatcaagaggaatcaatatttttattttaaatatgaaactgggataaatgattggatctccacttattaaccagtactgcagtgtgtttatatccttttgtgtggtaggttggataggatttgtaaagctactgattgatctcatgggccagggttcaccaaaaggatgggaatttgtttctgcattcttacatattgggttgcatattccttcataatggatccataagtaactaaggccttggagactaacagttctccaaaatactcagctaaccaaaagaaaatactaatttttaaaatcatgtcataaaaaacagaaaagtaaaaaaagtctgaaatcctgaataaaattattttaaggatgaaattacatgcataaattaagggtagataacttcttgccatttaattaaacaaatccccaattcttatcagaataaaactgaaggacaatggatgccttttgggttttttaattttttaatattgcactttatagtacttcataagagacaactgtcttaattaaagccataaaataccaataatacatatattcagggcttctgaatatagtcaatcaataagcagtccatgagtcattcctgttttgtattgtttattgtaaattggagtttatctgttctattttttattaactacaattattgttctaggcaatcctaatctacttatacattttagatgtgtgctttaataaaactgtttgaaaatcaaag

SEQ ID NO: 483 - DNA, 4355 bp, Homo sapiens
gtgcattcccatgtaggcggcctaggatgtccttgggatatggattatgtattgtctcccctgacacattcactgagggtagagtccatgcctgttttcctttcctttttgtctctctctcagtcccatcccaggctctaggcttctcacccaaaagctctctccctgtctctttgtttcccccatattctggtatgaattctttgggtatctctcacaaactgaccctggcccccctaaaacaccccacagtcaccttcaagctgtacgacacggacagaaatgggatcctggacagctcagtgagttggggaccctgtatgctgggcaagggaatatgtgttaatttgtctgcaccctcctgccccaactcttccagggtcttaagaaacagaagaggatggggggagaggttgagtcctctaggactaaatttgaaagtaagtcccaagctcttgacccctcaaagagaatgctggatacatgaattgggtctgccttacaaacatacaaacacatttatttacttggcagacatacctgagaatgagaggtgtgaatctggggtggaacccaggaacactgatttctggaaaagagtttggatggtggtagtaaaggggatatggctgtggctcttgccctttttgctccaggaagtggacaaaattatcctacagatgatgcgagtggctgaatacctggattgggatgtgtctgagctgaggccgattcttcaggagatgatgaaagagattgactatgatggcagtggctctgtctctcaagctgagtgggtccgggctggggccaccaccgtgccactgctagtgctgctgggtctggagatgactctgaaggacgacggacagcacatgtggaggcccaagaggttccccagaccagtctactgcaatctgtgcgagtcaagcattggtcttggcaaacagggactgagctgtaaccgtgagtaatgggagctgggaggtaggggaagagggtcagcccagctatctgtgggagcttgatgctgtaaacttagaaaagacctaggtttgaatcctgggctctgccactgactagttatgtgaccttgggaaagccacatcacttctttaagccttagtttcctcaactgaaaatgaggtaattgtgagcattaaaaaagttggtgcaagaaaagtgcttcagatggtgcatgcacatactataaaatgcaataaaaaatatctattatgattactgttgctgttagacctgggcctcccaagcattatccagctcagttcctgcctggcacatggatggtgtggggcaggcatgcagtagcagctgatcttttaggaggaagagtaaggaaaaggcgtgggttttggaggtgggcacttcaccccgaacttttattctgctacaccctcaagcaagggatcacatatctgatcctgcctcaccctcaggtaagaaggaaatagggggagaggctcagctaagcctcccaacttcttccttctccctcagtctgtaagtacactgttcacgaccagtgtgccatgaaagccctgccttgtgaagtcagcacctatgccaagtctcggaaggacattggtgtgagtgatctcatgcctccacccccaacatcacctacatcctggccctggccctggcccttggcccattgctgccctcagcccctccctcccctaggtcctgctcagaccctgccagacaaggaactgcctttctccccaaggtccaatcacatgtgtgggtgcgaggaggctgtgagtccgggcgctgcgaccgctgtcagaaaaagatccggatctaccacagtctgaccgggctgcattgtgtatggtgccacctagagatccacgatgactgcctgcaagcggtgggccatgagtgtgactgtgggctgctccgggatcacatcctgcctccatcttccatctatcccagtgtcctggcctctggaccggatcgtaaaaatagcaaaacaagccagaagaccatggatgatttaaatttgagcacctctgaggctctgcggattgaccctgttcctaacacccacccacttctcgtctttgtcaatcctaagagtggcgggaagcaggggcagagggtgctctggaagttccagtatatattaaaccctcgacaggtgttcaacctcctaaaggatggtcctgagatagggctccgattattcaaggatgttcctgatagccggattttggtgtgtggtggagacggcacagtaggctggattctagagaccattgacaaagctaacttgccagttttgcctcctgttgctgtgttgcccctgggtactggaaatgatctggctcgatgcctaagatggggaggagatggaatctcgctctgttgcccatgctggagtgcagtggtgccatctcagctcactgcagcctctgcctcccaggttcaagtgattctcctgtctcagcctcctgaatagctggaaatacaggttatgaaggacagaatctggcaaagatcctcaaggatttagagatgagtaaagtggtacatatggatcgatggtctgtggaggtgatacctcaacaaactgaagaaaaaagtgacccagtcccctttcaaatcatcaataactacttctctattggcgtggtcagtggaatggggcctggggagaagggagaaagggggggccaagcagtcagaggctggaggagagcagaaaaggagggggaggttaagtgacctgtgacacagggaaattgggagtgcagtacagtgctgagttgcaagggaagatcttgggacatgctgtggggagcagcatggggacttgggaaagaggggagaccgggagggagagattgagctctgtactgaccttcatgtcccgaactctccaggatgcctctattgctcatcgattccacatcatgcgagagaaatatccggagaagttcaacagcagaatgaagaacaagctatggtacttcgaatttgccacatctgaatccatcttctcaacatgcaaaaagctggaggagtctttgacagttgaggtgtgtgtaataagacttaaccctacatccttttcagcttcttaatagccaagtttctccctccatggcacccttaggaacttcccatattcttgaacctatgcttctttaacctcccagctctcctaccccaattctccaagtcctcaagatacactagtccctatttccattccttgcacacctccaaatcctgccttctccagtttgtcatctggtggagggagcgatcacatctatgatcatgccatgaggtgaggatctgtaccctccctaactgggactgtgccccctcctctcagatctgtgggaaaccgctggatctgagcaacctgtccctagaaggcatcgcagtgctaaacatccctagcatgcatggtggctccaacctctggggtgataccaggagaccccatggggatatctatgggatcaaccaggccttaggtgctacagctaaagtcatcaccgaccctgatatcctgaaaacctgtgtaccagacctaagtgacaagagactggaagtggttgggctggagggtgcaattgagatgggccaaatctataccaagctcaagaatgctggacgtcggctggccaagtgctctgagatcaccttccacaccacaaagacccttcccatgcaaattgacggagaaccctggatgcagacgccctgtacagtgagtattgacgatcccagccaaaaattaaacccttgggctccatggatcctaaatccccattccacagcttctttacacccttctgatgcctgaacttcccctgcacatcattcatcctaaaccctgatttctcagcccctggtttccctatcgtggcctctctaggaacctagcaacccaccccaaaccccacagatttccctctaaatctctgaagccacagccccaaagtatcaggtcctgcctctgaatgtgctcccttcccttccagatcaagatcacccacaagaaccagatgcccatgctcatgggcccacccccccgctccaccaatttctttggcttcttgagctaagggggacacccttggcctccaagccagccttgaacccacctccctgtccctggactctactcccgaggctctgtacattgctgccacatactcctgccagcttgggggagtgttccttcaccctcacagtatttattatcctgcaccacctcactgttccccatgcgcacacacatacacacaccccaaaacacatacattgaaagtgcctcatctgaataaaatgacttgtgtttcccctttggg

SEQ ID NO: 484 - DNA, 5675 bp, Homo sapiens
ccggtttaatccacaccgctgcgtctgtcctccgtcctggggctggtcttctccctcatctctgccggaggcttttaatctcttctgccactcttctggaaagtcaccagcaatgcacgctgctggctctgcaggagggtcagggggacggccctcggcctgtgcgtggtgccagccaccctccctgcctccctctgcgtgcgtcccgtgtccctgcctggggtgtgtgtgtcgagtgactaacgtctctctcctgcctctccctcctgtctgtccgtgtctagctctacctggtgcgcaccatggccgagtccttgggctctgccgagctgctcaggcagctcaagtctctgggcatggagaggctcttgcatgcggttaacacgtttctgaggcagtcgtgcacctacctaccccttttaacctttggtggtaagacatcatttgtttctcttgacgtttatggcacggaggcgaactgctccgctacaagttgttctttccccaaagcagcagcaacgtggccgcgtagacaggcacccggacccctcggggagctggtgcggggccctcccgaccagggcgtagcggagcagtccttctctcatgggctttttgagtttggcataactaatgtaccatgtatattttctcccccacaaatgtttccttggataatccagctttacatggtgagaaccatgctagagtccctcattgcagacaaaagtggttccaagaaaaccttgagaagtaaccttgaggggcccaccatattggacatagaaaaatttcatcgagagtcattcttctacactcacttgataaatttcagtgaaacgctgcagcagtgctgtgacctttcgcagctgtggttccgagagttcttcctggagctgaccatgggcaggaggatccagttccccattgagatgtcgatgccctggatcctgacggaccacatcctggagaccaaggaggcatcgatgatggagtacgtgctctactccctggacctgtacaatgacagcgcccactacgcgctcaccaggttcaacaagcagttcctgtacgacgaaattgaggccgaggtgaatctatgttttgaccaatttgtttacaagctagcagaccagatatttgcctattataaggttatggcaggaagtttgcttcttgataaacggttacgatcagaatgcaagaatcagggagccacgatccacctcccgccgtctaaccgctacgagacgctgctgaagcagaggcatgtgcagctcctcggcagatcaatagacctcaatcgtctgatcacccagcgcgtctcagcagccatgtataagtccctagaactggcgattggacgatttgaaagtgaagatttgacctccatagttgagctggatggcctgttggaaatcaaccgcatgacccacaagctgctgagccggtacctgacgctggacagcttcgacgccatgttccgggaggccaaccacaacgtgtcagcgccctacgggaggatcaccctgcacgtcttctgggagctcaactatgacttcctgcccaactactgctacaacggctctaccaaccggtttgttcggacagtgttaccattttctcaggaatttcaaagagataagcagcctaatgcacagcctcagtatctgcatggatccaaggctttgaacttggcccactccagcatttacggcagctaccggaacttcgtgggacctccacactttcaagtcatctgccggcttctcggctaccagggtatcgccgtggtcagggaggagctgctgaaggtcgtcaagagcctgctgcaaggcacaatcctgcagtacgtgaagacgctgatggaggtgatgcccaagatctgccgcctgccccggcacgagtacggctctcctggtatcctggagttcttccaccaccagctgaaggacatcgtggagtacgcagagctgaagacggtgtgcttccagaacctgcgggaggtggggaacgccatcctcttctgcctgctcatcgagcagagcctgtctttagaagaagtgtgtgacctgctgcacgcggctcctttccagaacatcttgccacgagtccatgtgaaagagggggagagacttgatgccaaaatgaaaagactagaatcaaagtacgccccgctgcatcttgtcccactgattgaaagactggggacccctcagcaaattgccatcgcaagagagggggacctgctgacaaaggagcgcctctgctgcggcctgtccatgtttgaggtcatcctgacacggatccggagctttctggatgaccccatctggcgcgggcctctgcccagcaatggggtcatgcatgtggacgagtgtgtggagtttcacagactgtggagtgccatgcagtttgtctactgcattcccgtggggacacacgagttcacagtcgagcagtgctttggtgatgggctacactgggctggctgtatgatcatcgtacttcttgggcagcagcggcgttttgctgtgctggatttctgctaccatctacttaaagtccagaaacatgatggcaaagatgagattattaaaaatgtgcctttgaagaagatggtggagagaattcgcaagttccagattctcaatgatgagatcatcaccatcctggataagtacctgaagtcaggcgacggggagggcacgccagtggagcatgtgcgctgcttccagccgcccatccaccagtccctcgccagcagctgagggcacgcgctgcactccgtaactcaacatggcatgcctttctctccgtaaactatttagtgagatttttagggactatttttcagtatctctgtacctgttaaagggggtgcttttcgatctaaaaacttaattttataaaattgacttatttttctagactaaaattgtatatgcttttggtaattaggaactcttgagaatattggctgctgattgttgccatcacgttcctacaaaattgtttttctatgggatgttctggcagctgtgtcataaaatgctgctgggttcattcattcattccataagaaacttaataccagcaaatgcattaaatcccttgccagttaccattaactgtaactatttagcttttgtttagggatctttctgatggtcttttatgagcaatcttagttctaagtcattgttcccatcccttttttgtgtgtttcagaaaatagtgaacttgattcccctgcttccactaaatccagttgtgacaaaatctaacgtgacatcagatcgaaaggttatagaaataaaactaatgagatctatttgtgttcatttatttactctaaccctgtgctgcctggcttggcaaggaactctaacctgaactcacataccaggccagctgggatggaggtcacctctaaggctgaggtgggatgggaccgtgacaccatcccatataccgctcacctcagcacaggtttagctttatatttagggttccgcaggcaaatgaggtgtaaaacggccgtgttggctgctccaatctggatatgaagaggctactcagtgcctctctgttacctgtgcccatgacctggaggaagccagcaatgtgggaggagatcagtcaggcccagtgggtgctgcacaaagggaccgggagcaccgagtccagccttcagctgtccccgatccacagggctcacatggctggagctggttcacatgatctgtcagaatgaaaaacaatcggtctagactaccagtagagtcacgaacatgtttgagaaactaaagccatattttaaaaagtactaaggcaatgaggttctgaaaatcctaactgaatggaaaaagatgctatgcctgtttattgtagatgaatactacagataaacacaagtccagcatgattaactgaactcactttatattgtagcctggcagtcattttacattatttggagtattgcaaccttcaccaattttaaaattttctatggatgccaagttgccataaaaagcaggcctcgcctacttttccggaggcctttggaaactgtccagaagcatatgatgcacggcacagaaaagtagtaagtgtacgaaccatcctgttacactgccaaactcactcaagtgacatgaagcctaacaaacaattattctttctttataaaaagttccctaaaaatgcttttggtaatgtgaattaataaccctggggccagcattctgctgcagatttagaggtggtagctgtgcttatcttagaaactacagaataggatgaaaaattatggtaaaacttaatcaattaccaagttttataaggcttaattatataccaaatatgtaataccttaggtataagacaatctcaagtgctacaaaatgttaaataagaatttattatttattaacctatgcatgttcaaatgagtctctgtcctcaagggggagaaaactggttcttttatgtacaaagcacagatgtaggtacagtatataaacagatacgtagtacatctgtagtattaaaatggcatgggaggaggcagttagaaaaaacatctaaaacagctccttagaaggccaataatacagttggaaaaaagggagtttccacgcagccagtggtgagctgcatgggataccagcaccattggcaggggaggccctcggggagtgatggcttggcgctggcgcaccactgggtaacctccaggcaggagccacaggctggaacaggcgaacactttcttcccatcacctaggtggaaattaattctgccaatacttttttttaaaggccagtcaatggttatgagtggataggttcaaagctgaatggagttcattagaccttttttattattctaccttttctgcatatgtttgcagttttccatcaacttcttcataaacaaacaaacattttctagaaaccaaaatatgtagtggcccaaaggagctcttaagcaaagtacttggtacaaagagaccatattctataaacatgttaagtttgttctaagcattcagacttttagaataagaacttcatttcaactttttattataacatgagctaaactttaagaaacaaccctagtcttctatttcccagagctgttcaaagtctaaatgacaatataactcattatgaaaatatactgaaaagtacaagagctgatgtaaaacggtaatcaaggttccaggcatcatgggattagggtaactgaagaataaacccagccaggctgcaacagcaggcaggatgtgctggcttgatgaggtgctaaggccatcgaatgctcagaggaagccggattcacggtgatcatctcaacctgagaaatcgttccttggggtgatttctgcccttttttttgttttgtaagaaagaggttccttcattcagtaacttagttttcccttaataaatatttcaaaaataaaaccaatcatcatcaaacaaacaggagccacttttgtaggtaaggtaaatcacaggataatgtattgggataactctgtttttttaaaataaaaaagccttacatggtcagggattgatggagtggggatgacaaatgcacatttcagactttcatcaccaatgaaaaaataaagcattttcatagacttaaaactgtc

SEQ ID NO: 485 - DNA, 4493 bp, Homo sapiens
accagactggccgcctctcggcgagcgcgccactctcccgtcgccgctgacccgcgcgcggccgccgaagcctccccgcggggacattcattcttgccccttgcctgtcgccgggccgggcgtacgggccgcgttgtcgggggttttgtcccctttttcctcttttttttttccttctcccccccccccttttttttcttttgctttttttttcctttctgtttttgttgttgttcttgcctatgttcgggaaaccagacaaaatggacgttcgatgccactcggacgccgaggctgcccgggtctcgaagaacgcgcacaaggagagtcgggagagcaagggcgcggaggggaacctcccagccgccttcctcaaggagccgcagggcgccttctcagcgtcgggcgctgctgaggattgtaacaaaagtaaatccaattccgcagcggacccggattactgccgccggatcctggtccgagatgccaaggggtccatccgagagatcatcctgcccaagggcctggacttggaccggcctaagaggacgcgcacgtccttcaccgcggagcagctctatcggctggagatggagttccagcgctgccagtacgtggtgggccgcgagaggaccgagctcgcccggcagcttaacctctccgagacccaggcaaatagtgaagaaaataatgaacgattcaaacgcgggataaaaaaacaaaagaagaaaaggaagaaagagccagcaaatgatgagtctcggcgtggggactccgggggcagagggtggcagcccctatagtgcggggccctgcgactggtaccgtgagcgcctgggatgaggtttgggcggatttcgggtttccggagaggcagagacgcctggctacgacgatttgttccacttccttgagtgtttcgctctcgatttctctatctgtccctctgaggtcggcccctcagaccctcctccttaatttcccactgcgtaattcttagtttatttaggaactcatctctgggcactataaagtctctgcctcctaatgctaggtttctagagtcttccagctgcatcttcatgccggcagcattttggattttgtgcaatcatgggcccagaataggcaaggttttattttcttctgacttagaatataagtctcgccatcgtcaaagagagactttgaaggagcaggagactgaaatcgatattaattcctgcaaagagacctcctcaccctggtgcttatgcggtggtgacgggtgtagacgttgcaaacaaatcttgggaagcgaggagggccggggaggacacttccggacacgctcttctaaagcgtgtgcagcacggggcgaagtccgcgctgcgggggcagcggccccggctccttcttgtagcgcctgcacacctgggtgttgcagggacccgcagctcccgtgcggcaccggccctagccaggccttactgcccctactcgtgtactgtgcctgaagctgaagttggaggcatccaaaataaggcggggcacagtgtgggcggcggagtccctgagccttgagctccgctttttgctgagatcacagcagccgcccacagacagttcacttttatttctcaaagttgctgcagatccctcagcttggcttctcttggctcttcccctccctgtccgcctctccttactttctcttgcttgaaactgcttttccttttctactcttttcttccgcgctcctgtcccgtaaacgcctgcgcttcctttaaggagttctctctctgtggtgtgggctcccctctcgttccccctgtctccctcctccattatttcttccttccaggtctctctctctcttttggttttctggtttttttctcctgctcaaggggtcccaaaggccaaggcagtgggtggctctcgctgcagcttcaaggctggtggctggggccctccaggggtgagaaggaagggagaaggtggcataactttttggaacaaaagaaaacacaaaatcctagcttgggattcccaacaaattcagcctcctctcccaggggcctcagcctgggaagtcaccaagcagatccctccttccagcttcctgctctttctcctttttgctttcttacccctgaaagagggaaggacaagtcacctcataacttctgctctcacctcccttccctccctggctttgggaagagctgctgagctctttgcctgccactcagggagtgcaattgttcttgaagagcctcttctgcatagaaaaagaattgcaattttaatttaaaaacatttatagaaaattcatttaattttagtgactatcttcttttccctccttccccaagggcctccagtaagctgccttggtccctggaggcttctggcttccaactggagactcacaggccttggaggaggaggcaggtaccctctatgccaatagctgggcctgcctggggaaaggtggaaggagaaacagctgcaggaggggggagctgaaaggaatctgatgctcaggcctgcacaaagcaaccgccaaattgtttcagagcagaaaagaaaaagggagaaaacctcttagcaaagccctgtgagtttgggggtcaggttcaagaaagatgtgggaagtcacttggagagctaaacgggacacatgctcctatccacacttgcagttggtctaaccttcagccagaatgtattcataagtagcatttggcaaccctttatagtttacaaatagcattttacatacaccattctactattcctcatggtggctttgggaggtccagctccgttttaaagactcacacaggactgaagcaaataacttgctcaaagccacatagctgctcagaacccaagattgtaagctccccctagggccagaggcctctttctttcagtttttttctttcgtccccctttgacccctctttccttcttccctttctcccctccttcctcctttccttctttttgtgcccacagtgtctggatcatggtacctgaattctttagcctatttgcacccacatctgctaatgtccatatctagccatctattacaccagctgctgaggatttacttggtgccctcatcaagaagtttgaatttctccctccttcctttttttttcctgccactgtcccaactctttccctctacgtctctctagaatgacatctttaaaccccttacactctttggtcttacacatccttaaaaatgattatttataaattgaattataatatccatgaggtaaacactcatagggtaaagtacacaaagcttaactatacaagttgatgatttacacacacacacacacacacacacacacacaccccttcttgaatggctccaaggatacccttttaacttcttcccttcagccacataagccatatgatgacacacagtgtctttctcctgtttgaaaagaaattgtgtcatattggtgtgctgttcttgcatagaaagccttttttaagaagtctttttaagatttcttgaaggattttagaaatcatatatctcttctaaccccctgaaatcctgagtttaagtggcttgattaaatggctgatcaaaacttaaaaacacactaggtcaatgtttttcaagatacaactgaggaccagctgcttcagaatcatctggggactggctaaaattccaggttcctaagccctagtcccatctgatgaatcagaaactaggttggggcttaggaacgtgcattttaaacacttttccaaagtgattcttatccagactaatatttgagaagtactgtattaaatggcaaactcccaaaacactgcagcctcctgcatctggcccagggcctggcatttggtaggaatacaatgaatgtttgttaaacaaattaatccacagtttctgacacagtttagaatttcttggaccacattatgctattgtaatttaacaccatttctacgtcgggaaatctttacatttcagtctttttcattttcatggaggtttcattttaatggagcaggagagaaaagagagatctactttggtggtttctcaggtctcagggaaggtcttttataaactcaatggggaccaccttcctggagaggctgctcccttacagacctggtagtttggggaaaggaggaggagagcccttcaggtttgctgaaaagcattcagatgcacacccttcttggttggaactgaaagcttctgtttgaagagacatgagttctggaaggagcaaggccaccaggtccagagaacctggcatgcaatggacatggaagctgaaaattacttgggtattctctgatttctagctaatatgaaaataattttctttctagaaacacatttgcctatcttcttaccctgaaacagaaaataaatattgtgctttatgtggtagtgttgtacccattcttaaaaataaatcacatcatatatatgtgtaaaatat

SEQ ID NO: 486 - DNA, 3449 bp, Homo sapiens
ccaccagacacacagacacgcacacacagctctccatgggctgccctgcgtgtgcctgagaagggtctgggatagagacctaaaattcagtcagcagatctctgtcaagggcctgccatgggccagccactctgatgagggctttcatcaacatgattgcatttaaacctcacagccaccccatgaggtaggtagcattacccctagtttaccattaatgcagtcaatcccaacaggtgacttgcccaagtcacatatctatttaagtaacagggccagcttccgaatccacatgtgtggcaccaagtctggtattctttcccccaggctgcattgtttatctctcttgcaaaatgctgttttcttccaggggctgggaaagggctactggggaggtgagacatggagatgggggtataggaggccaggagcagggccctaggctgaggtgctctgcttacccctcagaatggcctttgtgctgcaccaggctgggcccccccacagccacgggtctaggggagcagagtatgcaccgctggaggaggggcctgaagagcccctgcccctggggaacaccagcgtccgggcggcatttgtgcacgtgctgggggacctcctgcagagctttggggtactggctgcctccatcctcatctacttcaagcctcaatacaaggcagccgaccccatcagcaccttcctcttctccatctgtgcccttggatccaccgctcccaccctccgagacgttcttcgaatcctcatggaaggtaccccccgcaatgtggggttcgaacctgtgcgggatacgctgttgtcggtgccaggagtccgggcaacccatgagctgcacctgtgggcccttacgctcacttaccatgttgcctctgcacacctggccatcggtgagtcacactggccccagctagttactacctggaacataccccaccccaaacatgggaccatagcttgagttactggaattgtttcagtcttttttgatctgtctctgtttctctgtgtctctctctctcacatagacacatacacacacacacacatgcacgtgcgctcgtgcatgttggagacaaggagtctccatccactggatgcagtgttctgggggcagtttcaccctctttgaagtagcacagggaaccaacaaccctttaaaagatcattagtacctacaggtctagtgatggggcacagttaggtaaattacagcacctccaccctgaggtatcacataactgttaaaaatgatgcttgtgaagactgtacagcaactatgaaaaatgtttatggtataatgctgagaaaaaagctgaatataaaattgcatctacattatgattcaactattaaaaatatatatggtgagtcatgagctgacaaaggatttttgagtttcttccagatgcaagaagcaatcagagtcatgcaatttgtatgccaaaaatattataatttgtgggatatttgatggaaactctagagggacaatgagacagatatttaacaactggattgtcctgggaaatcgggtggtatggctgctgaaatgttgagctgtatgttgacacttaatgacaggagagaataggagactggaaagagtttagtgtgttagcatggttgattggggtgagtctctccaacatttgatttgacacttttatgctgttcatacaatacagaaagaaaagcaggcttccattcacgcctggctttaatgctgtgcagcccctttccctgtccttatctcagtccctgcctgttctttctcccccgggatggatgccgcctcttatcactctcccacagactccaccgctgaccctgaagccgtcctggctgaagcctcatcccggctctactcccggtttggattctccagctgcaccctgcaggtcgagcagtatcagccggagatggcccagtgcctgcgctgccaggaacccccccaagcctgagccatggccctgccctcaccccactgccaggccgaggctcagccccagactctcagcatctgctgccctgatcacagagacgggaccgagccaggtccataccccttcctctctccctcctaccacctgccagtttccccagcctcagccccagccccagccccagtgggcaagaccaaagtgtggcggggagtggggtgggagtcaggggaatagatgtgactagttcaggggcggggactcccaggcctcagtgtggcagggtgtgttgaaggcctgtggtgccatctccccatggttcatgtggagccacgaacatcctttccctgcagtccatttgtctgtgtggcaggctggctggctgggggcatctgcctgtctatgtgctgttggtgtgcctatgcctgggggaggtcagtaggggccccctccccacatggccctcgctctgtctatgcaggggccccaaagcccgcactttgtccgtgtgtcttagccctgtggttttgtctgtgtgtgtgtgtgtgtgtgtgtgtgtgtgtgtgtgtgtgtgttcttggtgctgtggcctgtgtgtctctgtgcctatgtggctgtgctatggtttctatgagtctgctccatccatgtgtctgtttgggggtctatctctccatccctctgttggtgctgtgcccttggctatccctgaaagagggaggactccgctgcagctccaccaataaacttgtgtctcactgcatctttcagcctgtgtgctgactcctcaggagggggaagtcaaataggtcacttgagaacaacagaatccctcctgtcccttcccagcctctggagtgacctcccacagacctcctgtcccttcccagcccctccaccctcagatggagggtaaaagccaccagtctctttactccccttcccctggctcacagcatgcctgggtccttggctcagggacagtcccatgtgccctgggcttggttgcaggagaatgctggaaggtaaggagccaaggaatccctgggagtcagtcgttctcagaggtccctgcatgccagtgggcctcaggctggctggagggaggctgggtccctttgagggagaatggctagaccatagcactgatgtgggcttggttctcaggccatctaaggtgtccagcggtagggacccctcaaccctgatagcagccaaccctgagtccaggtttaggctgtgaacaccaaggacctcttttacacctattccccctttgtcttaagaactgcatattttgacacattaagtcttaaaatcaggctcattaagggattgttgattttctctttaaaaaaaatcaaactcaagctggacatagtggcctgtgcctgtaatctcagccctttggaggctgaggcaggaggattgtttgagcccaggagttcaagaccagcctgggcaacctagggaaacccctgtctctac

SEQ ID NO: 487 - DNA, 4200 bp, Homo sapiens
gttttgaaagacaagtttattactcagacagcccctgatatcagaaggaagctagagaaacaggccatgggattagatagcaccttacaaaacctcctgaaggtagccacctcggtcttttataatagggaccaggaggaggcccaggggaaggagaggaaacacaagaaaaaggcagagactctggtggccactttgtataaaacccagtatccccaaggtacacctgctagttgctaccaatgtggcaaactagggcacttcaaaagggactgcccaggcagcaagaagaagccacctcaaccctgtccagtatacaatggggaccactggaaggcagactgtcctgggaagcataggtcactgagtccagagccagtctcacaaatggtccagcaggactgatgggtcctggggctcaactccctggctccagtggctcagactgctgttactacccgggagcaccaggtgattctggagttcgaagggaggaaggtagacttctttctggacactggagccaggcttctgttttcctctccaattcaggccttcgttcctcccatagcacaaccatgatgggcatctcaggaaagactttaacttgatatttttctcaacctattagttgcagtcagagggacctactgtttacacaggcctttttagtcatgcctgaaagtcccactcctttattagatagagatattccagcacgtatgggggccaccatccttatggctccaggacaaactccacctccccttagtggaaaccagtattaacccagaggtttgggcaactcagggaagaagtggccggactataaccactataccagtctggatccacctcaaggatcccactttttttcctaaccagagacaataccccctgaagccagaaagtagaaaagggctagacgccagcattgataacctaaaggcacaaggcctccttaggccttgcagtagcccttgaaacaccccaatattaggggtgcaaaaatccaatggggaagggagactagttcaggacctctgccttattcatgaggctgtgattacgattcatccagtagatcccagtccctatactttgctaactcaaatacccaagggaactaaatggttcacagttctgggcctaaaggatgcctttttctgtatacctttataccctgactcccaatacttgtttacctttgaagacccctccaatcaaaccacccagttaacctggactgtactgcctcagggatttagagatagcccccacctatttgggcaagtattgtcaagagatctcttcgaattcttccattctcaggttaaagttttacaatatgtagatgacattctcctctgtgccccaactgaggaagtttcttgagacggcactgaggctctccttaatttcctagctggaaagggatataaggcttcaaaatctaaggctcagctctatcgtcttgtcagaagggaacaagagcactaggcgaggagaggattaatcccatttcctcccttcctctccccagaaccctcaagcagctgagggatgcttgggcattacaggtttttgtaggttatagatacccaggtatgataaaataggttgccctttatatcaccttataaaagaaattcaagtggctaaaactcacttcctgacctgggaacctgaaggtcaaaaggccattaatcagttaaaacaagccttgcttaaagcaccagcccccagtctttctgtagggaagtcctttaatctttatgtatcataaaggaaaggaatgaccctgggagttttaattcaagttcaaggcccagctcaacagccagtagattacttaagtagagagcttgacttggaggctaaaggatggccagcttgcctctgagcagttacagtagtggccctgctagtcccagaggccaccaagttaaccctggggaataacctgtttatgcctcacataaataatgtggcaggcttgttgtcctctaaagcgagtctctggctaacagacagctgcctcctcaagtatcagactttgctgctagaggaatctgcagtccagttaaaaacctgaccttgcctgatcccagacactttcctcccagaggaaactggagaaactgaacataattgtgaacagactgtagtacaacctatgccgctagggaggatctcaaagaaattcccctagaaaatccagactggacccactttatgggtgggagctcttttgtaggacagggagtctgaaaagtgggatatgcagtagtcaccctaaataacattgaaaatgtgcctctctcaccaggcacacacactcaatcagttgagctgatccctctcacaagagcacttgaactaagcaaaggaaagacagctaacatttatactgactccaagtgtacctttctagttctccttgcccatgctgccatctgaaaggaaaggcacttcctcaccgctaatgggtcttgcattaaataccatcaagacatcaacaggctattatcctcagtgttcctcccatgagaattagtggtcagacattgcagagggcatcagaagcgggtagatgaaatagccaaaggaaacaggctagcagaccaaagagctaagtcagcagtaagaaggccccaaggtcccaaaacacttgaggcccctctgatttgggagggctacataagggaaataaagcctcagtattcccctacagagatagaatgggccacctctcgaggtatacttttcaaccctcaggatggttacaatcagaagattgcaaagtacgcttgccagcctccagccaatggaagattcttaaaatcctccactgagcctttcacttaggaaagcataagacatcagtgcatccaaagattgttctcaggagaaaatctactaaaaatggtcaaataggttgttaatactcgtgaaaccctcttaaaaataatccctttaacagatgacttcttccccaccacaatcaaaggatgggaagttactcaggggaggactggcagatagacttcacccatatgcccaaaataaatggcattcaatgtcttttggtgtgggtgcataccttcattaactgggtataggcattcccatgcccaacagaaaaggcctctgaggtggtgagaatactaattagttaaataattcctcactttgggctccctaagtacttccaaaacaacaatggtccctcatttaaagaagcctctacccagtagggccgagtctgctaggactttttattgggtttggtaatacgtcacaccctttagcctctactgtgtcagccatgtcccatttatacaagacaaattgctgggtctgtcctgagcggtttggtcagttcagtaacactaaggaacctcttgatgacttggtatttactgtcttagcattccctttgttagctttacctttagccattaaagacttgtcaggcataaatggaacatggtatgggaacactttcaactgagtaactaactcctcccaggaaagcatttcctccctggtgccagaaaacactttccccaaagataagcctcacaccctcaggctaggaaaagttggccgggtaatagcaaatgcctcctcctgttttaaaagcagaggaaaaggaccatacctgggagatctcaaatattataacaccatacttgtaattgctgaaagctcggaagtttggagaaaaagacataagaaggatgatctaagaaaattggaagccatatggaggggaggctttcagaattcagcgtctcctcctggttgaaagtcctgctgggaatggcaggctctgggtaaccaccctgacacatggcactataatgtaaaaaacaacacataggccttcccagacatgcaccctcatgggattccagaccccctgtatgatgcttagtagtagtggcctacaaatctgtgggtgaacagaacaggagacttctggactgacagcccctgtcacaagggggcattatctgagatattggccagggcatatcgtgtccctggtcttttgaaactccatttgtcggccaggtgtggtggcttacgactgtaatcccagcactttgggaggctgaggcaggtagatgatgaggtcaggagttcaagactagcctggacaatatggtgaaaccccgtctgtactaataatac

SEQ ID NO: 488 - DNA, 4648 bp, Homo sapiens
tttccctaatgcttaatttctacacaaggctctggtaaaaagtaaaaatgtctaatattttaacatcacagtttacagagtttatatgcttcatttcgttcaccctcatctcagtatgtgaatgtctctaaaatctacaactctagttccaggaaatcttgctgttctttttatttttattttttattttttgtacagacggggtctcactatgttgcccaggctggtcttgaactactgagctcaaaatatcctcctgccttggcttcccaaagtgctgggattacaggcatgagccactgtgcctggacaaatcttgctgttcttaatagtcactctttttttatttttatttttttgagacagggtctcactctgtcacccagactggaatgcagtggtgtgatcatggctcaatgcagcttcaacttcctgagctcaaacgatcctcctgcctcagcctcctaagtagctgggactataggtgcacactatcacactcagctaatttttatttttattttttgtagagatggagtctcactgtgtggctcaggttgagtagtcacttctaatgcctctgcagattgtatttcattctgttcctttctctggactcccactgcacttgcccagacttctatcagataacctataacaatatcatgcctttgcattcacatgactgtctctcccctaccacaccataagctctatgttgtgtaggtttttctatccaaacactcagcatctgtcctggtcataatgtgtgcttaatagccaatgaaagtttgaagaattttcccaatttcccgatcttgaattccaaaatcactgtgaatcctcctctaaatctttctagtcaccaagtcttgtagatttcttatgtcacatgtttcttgatgctgtctcttctcttctgttactgtcgctacgctcacccaagatcctacactttgtacaactgcagcgtcctcatcttggccttcctgctcttagtctttctcttgtcaaatcagtcctatgtttcttctgcaagaataaactaaaggtgctatttgtatgaaggctaaatttaaattccttactctgatattcaggaccctgccatatctcctgcaatttctccattcaaaacctgagttttctttcaccattttttttcttattgtcactcggatactgaagagacacatcttttcctctttcttctctcccattctccatttgtttatattctactcttcgtttaaggcctaacccaaatttcactttccccaggaagtttttgattcttttggtcccggctgatgtctgtcttctttgacttatttatttacttatttattcatttattgagacagagtcttgctctgtcgcccaggctgaagtgcagtggcatgatcttggctcactgcaacctccatctcctgggttcaagcgattctcatgcctcagtcaaccgagtggctaggactacaggcatacgccaccatgcctggccaatttttgtattttcagtagaggcagggtttcatcatgttggccaggctggtcttgaacttctgacctcaagtgatctgcccgccctggccttccaaagtgctgggattacaggagtgaaccactgcaccccacctgtcttctttgacttattacattttttttggagacagagtctctctctatcccctaggctggagtgtggtggcacgatctcggctcactgcaacctctgcctcccggattcaagcgattcccatgcctcagcctcctgagtggctgggattacaggcacccaccaccacccagctaatttttgtatttttaatagagatggtgtttcaccatgttggctgggctggtcttgaacttctgacctcaggtgatccacctgccttggcctcccaaagtgctgggattacaggtgtgagccaccacgcccagactgacttattactatttattattatacaattaactgttggagcatacttgggcatttagtcgcctgaggcagatattgacaatttatgacctacgagcccaatctggcctgctgcctgtgagctaagaatggttttacattaatattaaacattttttaaagaagaatattttgtaacgcataaaaattacgtgaaatttagactttagtgtagatggagtctcactctgttgccaggctggagtgcagtggcaggatctcagctcactgtaacctctgcctccctggttcaagcgattctcctgcctcagcctcccaactagctgggactataggcccgtgccaccacacccagctaatttttgtatttttagtagagacagggtttcatcaggatggtctcgatctcctgacctcgtggtccaccccccttggcctcccaaagtgttgggattacaggcgtgagccaccatgcctggccgtctatgtcctccttcaagctataatgggagacttaagtagtcttgacagataacatacgtggcctgcaaagcctaaaatatttatcatctggttgatacagaaaaagcttactgatccctgatctcagatcttgaattctctttataatcttttcatagctgtttaagaactttggaaaggtctgcttcactaaagataatcttttgaagctaattagtggttcattagaacagtgggggaagctggaggagtaggctttatagagtgtgtaggagctatcctagttagaaacttagtaacttaggcaactggattgccattggaaagtgagagtcagaggatctcaggtggatgagggaaaagacgtgatcttttttccatcttctctttttcttttttctttttttttgagacggagtctcactctgtcgcccagggtggagtgcagtggcgtgatctctgctcactgcaacctccgcctcccgggttcaagcaattcttctgcctcagcctcctgagtagctgggactacaggcgcacgccaccgtgcccagctaatttttgtattttttagtagggacggggtttcaccatgttgttcaagctggtcttgaagtcctgacctcatgatccgcccacctcggcctcccagggtgctgggattacaggcatgagccaccacgctaggcctccatcttctctttttctgacttagcagaggaaatgtaaaagcaaatgggatctagctacagaaaggagtatctgaggtcttacctgaatctggttgttgagaagagatcaatggttgctggctgacagcagctcaactatcaatgatacagttataacaggcaatgaaagaaatcatcaaaagggtataactgctaaagctgaaagtagcctcagctgactgaagctctaagtggctaagaggttttacgatgcctaggaatattataggcttgataatttcaaggatttctttaaagaagaaaagaaagctaaatatttagataaacaagaatagcaactgaagttatcagaaagttcatgccttttaccaggtgttctatttcttctcatcttcccctaatcatattttttccttaaaattattcagcgtagtaacttttttttttttttttgatatggagcttcactcttgttgcccaggctagagtgcagtggcatgatctcggctcaccacaacctctgcctcccgggttcaagcaattctcctgcctcagcctcccgagtagctgggattacaggcatgcaccaccacgcttggctagttttgtatttttggtagagatggggtttctccgtgttggcttggctggtctcaaactcctgacctcaggtgatccgcctgccttggcctcccaaactgctgggatcataggcatgagctaccaggcctggcccacagcatagtaactatttagtaataaattatatagattggattgtggggcccatctttcacgtctgccccgtataccctgacagaatccacttggctagtttgggtactcaaatatggtaccagcaaccagatggtgagttgctgcctgaaatgtgtgaagaaacaagctagactctaggagacaggacttgcatattttaatggaaacaataggtgcaaggtcataggaagtgtctttttataaatagcttcacagccttggcacagtggagagcacattgtcagactgagattgaatgaataaacagttggaaattaacttttgtggggcatcatttacctattcaagtggacactggagaccatcattttgttggagtgagttttttgtttttttgcattgtgtgggaggtagtgagaagtgaagccagctggacttctgggtcgggtggggacttggagaacttttctgtctcacaaaaggattgtaaaatgcgcgaatcagcactctgtaactaggattgtaaaatgcaccaatcagtggtctgtagctagctagaggtttgtaaaatggaccaatcagcattctgtaaaatggaccaatcagcactctgtaaaatggaccaatcagcattctgtaaaatgaaccaatcagcaggacatgggcagggacaaataagggaataaaagctggccaccccagccagcagcagcaacccgcttgggtccccttccatgctgtggaagctttgttctttcgcttttcacaataaatcttgctgctgctc

SEQ ID NO: 489 - DNA, 3307 bp, Homo sapiens
ttgtacccattagcagtcactccctattcttccctcaacctggctcctggcaaccactaatctactttctgtctctgtggatttaccttttctggacatctcatacaaatggaatcacacaatatatggccttttgtgccccaggttctctcatttagcataatgttttcatctatgtgtgtcatgtatcagtattttattccattttattgctggataactccattacatatactgtgtgtgtgtgtgtgtgtgtgtgtgtgtattttttgtttgtttatccattcacattttgtttgtccattcattgattgatgcatatttgggttgtttgcacttttggccatcatgaataatgctgttacgaaaatttgtgtagaagtttttatgtggacataccttgtcagttctcttaggtatatacccaggagtggaactgatgggacatatgatgactctaaacttttttgggaactgccacacttttcctcagaggttgtaccactttacattcctgccggcagtgtatgggggtttcaccttcacattccatctacatctgacattagtatcttcctcactggagttatattttgttatttaatagttttgcaaaatgcattaaattcacttccatttaaattgtttaagatacagcagtttgaatgtgtcaatgatgctatctttagaaattttattctaaaacacaaatatcttttgtgtaatattaggacagttttttaaaagtaattcagtatgtttcttttttgaaaaggttctttataacagtatcccgttcttttaataagttcataccctcaaattttctctgcctttgcccttctcctttttaattccaataagtgcctttttgcacatctttaccttcctatctaaagtagcatttctgttacaccatcaccaaactctgcttaattttctttgcagcagttgcctactgcttaacattagttatctgtttctttgtttctaatgagaaagaccaacaataaaatcaagttccatgaatttctgttcacagtggtgtccccaaagtctacaacagtgcatggagtgtagaaaatattgaataaatatttattgaaaagaatgaataaatgagataattttacattagtttcagttcttgagctaggccaaatcacaaaagtttggcttggtttgaagagtggttaagaatgatgactccaacttggtctgttactgaaccataaggttcttcctcatccttccagcctctaaaaaatggtgcacccaaaacccctgtccttagtcatcttagcctctccatttatacttgctcctgcatttggctttaatgccattcacacactgatgtctcccacatttatgtttatatctctaggctccatcttcttgatctctagtctggtttaactagcactttacttggcatctttgtttggatatgtgataggttttcaaacataatgtgtctaaaatggaaactttaatttcttgttccttgtccgttgagctgtctctgcatggcacgagaagaatagatttttcttacaatgctcttcatcaataaatagaaaatccttgcttccggttgctgacacaaaaagcttgacttctctttttctatcctatttaattaatccactcaaatcctatgggcagtattttcaaagtatatccagaatcagtaacatcccaccacttctatctctactaccttttcattgctatattgtctcttgctggggttaatgacgctttctaattggtcttcttttgccccttacccccagtagccttgactgttctctacccaacagccaaaatgattcttttttttgtttttttggttttttttttgagactgagtctcacactgtcacctgggctggatgtgcaatggcgtgatctcggctcactgcaacctctgcctcccaggttcacgttattctcctgtcttagcctcccgagtagctgggactacaggcacacacccccatgccctgctaattttttgtatttttagtagagatggggtttcactatgttggccaggctggtctcgaactcctgacctcgtgatctgcctgccttggcctcccagaatgctgggattacaggcgtgagccaccacacccggccaaaatgattctttagagtaagtcatctcctaccattcctctgctcaaaatgcctcaacacaatctgggccttgctactgcttttatgttctcttgttcccttgcttacattgcccttaaaagagttttatgctgcacattgaagcccagactccctgaaatatcctgtgttacagaagcttagcaaactagaaatgttggttttgcatgagactgttcaaagaaaagagcaacttacttactctttgtataagcctatttttgggtttctagttggatattctttcccccttttttgttcttataaaaccaggtaaaggtattagtacagattgtaagtttttagaagagcatagaatatttgggtaataaggcaaatttatttttcctattttgctcgtaagtcagtttggtttcctcagatgggggatccattttgaatttagagataaccacaaaaacatcctaaaatactacaagaataatgattttgcatttgcaggttgatgttatttatttttttgagacagagtcttgctctgttgcccagactagagtgcagtggtgtaatcacagcatactacagccccaaccttccaggctcagttgatcctcccacctcatcctcctgagtaactgggactacaggcatgtgctgccatgaccagcttttttttttttttttttttttttttgagacagagtttcactctgttgcccaggctggtctcaaacttctgagctcaggctatctgcctcagccttcgaaagtgctgggattataggcattaagccaccttgcctggcctgtaggttgattttaattgttgctttattcatccaagttttatgatattttttgttttactacgaacattaggaatgttagcctttgatactgtttttgcagaaacaggttaagactaacaggagttttacaaaggaactgtcgaattgggatttgactagtgggaattggctgggtgataatcaactttttcttggctgactctgatcagcttcttaggcctgtgtatatacaatacctttgtgaggatatggccgattaggggaaaaactattgccaattttgcctcccctcctcttttttttttcttcttccccctcttcccctccccaccaaataaacatgatatttc

SEQ ID NO: 490 - DNA, 3320 bp, Homo sapiens
gcttgtcctctcctgcagaccaagtccggaacagctactacatcggggccgatggctccttgcggctgctgctggccaacggcatggaggtggcgctgcagactgagccccacttgctggctggcaccgtcaaccccaccgtgggcaagaggaatgtcacgctgcccatcgacaacggcctcaacctggtggagtggcgccagcgcaaagagcaggctcggggccaggtcactgtctttgggcgccggctgcgggttcacaaccgaaatctcctatctctggactttgatcgcgtaacacgcacagagaagatctatgatgaccaccgcaagttcacccttcggattctgtacgaccaggcggggcggcccagcctctggtcacccagcagcaggctgaatggtgtcaacgtgacatactcccctgggggttacattgctggcatccagaggggcatcatgtctgaaagaatggaatacgaccaggcgggccgcatcacatccaggatcttcgctgatgggaagacatggagctacacatacttagagaagtccatggtgctgctactacacagccagaggcagtatatctttgagttcgacaagaatgaccgcctcccttctgtgacgatgcccaacgtggcgcggcagacactagagaccatccgctcagtgggctactacagaaacatctatcagccccctgagggcaatgcctcagtcatacaggacttcactgaggatgggcacctccttcacaccttctacctgggcactggccgcagggtgatatacaagtatggcaaactgtcaaagctggcagagacgctctatgacaccaccaaggtcagtttcacctatgacgagacggcaggcatgctgaagaccatcaacctacagaatgagggcttcacctgcaccatccgctaccgtcagattgggcccctgattgaccgacagatcttccgtttcactgaggaaggcatggtcaacgcccgttttgactacaactatgacaacagcttccgggtgaccagcatgcaggctgtgatcaacgagaccccactgcccattgatctctatcgctatgatgatgtgtcaggcaagacagagcagtttgggaagtttggtgtcatttactatgacattaaccagatcatcaccacagctgtcatgacccacaccaagcattttgatgcatatggcaggatgaaggaagtgcagtatgagatcttccgctcgctcatgtactggatgaccgtccagtatgataacatggggcgagtagtgaagaaggagctgaaggtaggaccctacgccaataccactcgctactcctatgagtatgatgctgacggccagctgcagacagtctccatcaatgacaagccactctggcgctacagctacgacctcaatgggaacctgcacttactgagccctgggaacagtgcacggctcacaccactacggtatgacatccgcgaccgcatcactcggctgggtgacgtgcaatacaagatggatgaggatggcttcctgaggcagcggggcggtgatatctttgagtacaactcagctggcctgctcatcaaggcctacaaccgggctggcagctggagtgtcaggtaccgctacgatggcctggggcggcgcgtgtccagcaagagcagccacagccaccacctgcagttcttctatgcagacctgaccaaccccaccaaggtcacccacctgtacaaccactccagctctgagatcacctccctctactacgacttgcaaggacacctctttgccatggagctgagcagtggtgatgagtcttacatagcttgtgacaacatcgggacccctcttgctgtctttagtggaacaggtttgatgatcaagcaaatcctgtacacagcctatggggagatctacatggataccaaccccaactttcagatcatcataggctaccatggtggcctctatgatccactcaccaagcttgtccacatgggccggcgagattatgatgtgctggccggacgctggactagcccagaccacgagctgtggaagcaccttagtagcagcaacgtcatgccttttaatctctatatgttcaaaaacaacaaccccatcagcaactcccaggacatcaagtgcttcatgacagatgttaacagctggctgctcacctttggattccagctacacaacgtgatccctggttatcccaaaccagacatggatgccatggaaccctcctacgagctcatccacacacagatgaaaacgcaggagtgggacaacagcaagtctatcctcggggtacagtgtgaagtacagaagcagctcaaggcctttgtcaccttagaacggtttgaccagctctatggctccacaatcaccagctgccagcaggctccaaagaccaagaagtttgcatccagcggctcagtctttggcaagggggtcaagtttgccttgaaggatggccgagtgaccacagacatcatcagtgtggccaatgaggatgggcgaagggttgctgccatcttgaaccatgcccactacctagagaacctgcacttcaccattgatggggtggatacccattactttgtgaaaccaggaccttcagaaggtgacctggccatcctgggcctcagtggggggcggcgaaccctggagaatggggtcaacgtcactgtgtcccagatcaacacagtacttaatggcaggactagacgctacacagacatccagctccagtacggggcactgtgcttgaacacacgctacgggacaacgttggatgaggagaaggcacgggtcctggagctggcccggcagagagccgtgcgccaagcgtgggcccgcgagcagcagagactgcgggaaggggaggaaggcctgcgggcctggacagagggggagaagcagcaggtgctgagcacagggcgggtgcaaggctacgacggctttttcgtgatctctgtcgagcagtacccagaactgtcagacagcgccaacaacatccacttcatgagacagagcgagatgggccggaggtgacagagaggaccaaggacttcttgccaaagacagctactcttttgtggccgcatacctgactgtgttgtacttttaaaaaaatgattttttaacaagtgcagaaacaaaaagatactggttgcattgtaactcatgcaacatccttttttttagaaaagaaaaacacagatttggccttcgcacattttttgcaaagaacagaaggtatttttttctgtagtgtgatcacaatgaaaactttattgtcttttg

SEQ ID NO: 491 - DNA, 3524 bp, Homo sapiens
ttaaaaattagctgggcgtgtgcatgcttatagtcccagctactcaggaggctgaggtgagaggatcgctgaactgtggaggtcaaggctgcagtgagccttgttcgggccactgcattccagcgtgggtgacagagcgagaccttgtctctgaaaaaaaaaaaaagataacctctgtctttttcagtatcttgtacacttctcataggaattatctacatttgccaaactggttgtttcattatgtagccaccagctgtttgcccttacctaacagagattactattgtactgattgttctctgtacttagtgtcagagctattcagagatactagatgattttctttcaatgtatatgtgtatggcttctcttctcaacaaggggcttcgctccaatgttatcttgaacttccgtgataagtcattccacagctctttcaaaataagtacttggaatttttgttgagtgtataattatttgtgcatcttgaaatctgcttattctcttctttctttttaaaaaaatcattctcactgtcatcttatgcttcttctcttcttagatatcaatgatgtcaaacggctgaaacctggctacttagaagctactgtggactggtttagaaggtataaggttcctgatggaaaaccagaaaatgagtttgcgtttaatgcagaatttaaagataaggactttgccattgatattattaaaagcactcatgaccattggaaagcattagtgactaagaaaacgaatggaaaaggaatcagttgcatgaatacaactttgtctgagagccccttcaagtgtgatcctgatgctgccagagccattgtggatgctgtatgtaaaagtttccttaaaaaaaaaacaagcctggttgctaaaaactatgatgctaaatggggagaggaagtacttgtttcgacaaatacttgagtgccttttgtatgcatgttactgtgtggagtcttgaaattagaaaccatgaacacatgcaagtggccatttgactgagggagaagctgagggagtgattctaatcaatcataagttggacagatagcatggtagtaagatttgtaaaaatcagaatggttccagaatgtaccaagtaacctgtgtgcctatgacccatcataagccatttccgcaaaagaatcaatgggaatttacttgacttggttctagcaaggactgaggaaggtatcaagttttaggtaccattgcaggaatgattcataatctaagaaaggctttcatgtgaggtagtaaaagcacccgtcaaagcaataattttgtttttgtactatttttaattatttggtttggattaaccaaaaaattgaacgagatcatcttaaattattttcatttataatattaaataaggaaaacaaaagaaaatgaggtctgacttttttactgccttgtaaatggggtagaacaaggaaaaaaggacaatttaatgatgaaaccagtacatttagttttatctttatttatgtatgaatcccgacaaagttgagataaataagaaaaattataagggaaaagccagtggttaactattataatttttcagtgagaacactgcccatattttataaatatgtgtgtatatataaaattgttatatatgcataaatcagtttttattatttcaaaaaacattcttattattctgcatgtcataaaaagtcaagaggcttgaatttttttttttttttttgagacaagtctcgctctgttgcccagactggagtgcagtggcgcaatctcagcttactgcaacctccgcctcccaggttcaagcggttctctgcctcagcctcccgagcagctgggattacaggtgcccgccaccatgcccagcttttatttttagtagagacggggtttcaccatcttggtcaggctggtcttgaactcctgaccttgtgatccacccacttcagcctcccgaagtgttgggattatgggcatgagccactgcactgtccaagaggcttgaatttgttagcatctcagcagtagagcaaaccttctattgttcctatatattataaattacgtttagatcctaaaatttgggatagtcttcagattctcttaaatttttgtcagtatacctttttagctttttaaaaaatgagattagactaatagattttaatattttatattttagttaccaccaccctgtgaatctgcctgcacagtaccaacagacggtaagatttctattccagtaaaatttcattaaacattacacagttatggaaaaattatgttacttttatttttagttgacaaatgataattaaatatatttatgggtacagtgtgatgttttgatatatgtttacaatgtggaatgattaaatctggctaattacgaaatcattacctcacatacttaatcattattcgttgtgtggtaaaaacatttgaaatctactcttagcaattttgaaatagatgttacagtcaccatcctgtgcaatagatcactaaagcttattccttttgtctaactaaaacttggtaccctttgaccatcgcctgccctttccccatccttcagctcctggcaaccaccattctactctctacctctatgaatttaccttttttatattgcacatataaatgagatcatgtggtatttgtctttctgtacctggcttgttttttgttttttgacacagagtcacccaggctgtcactctgtcgcccaggctggggtgcaggggcacaatcacggctcattgtacccgtaacccccccaagttaaagtgattctcccatctcagcctcccaaatagctgggactgcagacatgtgccaccatacctgtctaatttttttataatttgtagagatagagtttcaccatgttgcccaagctggtctcaaaccaggtctcgaaccaggctggtcttgaacactaatcaggccgggtttcgccatgtcacccaggctggcgatccacctaccttgtcctcccaaagtgctgggattacaggcgtgagccactgcacgcagccacgtacatatttttaacatacacaggaagagagggaagaagggtgagaagagaagcatttttagaattctgtagtgtacgtgggaaggaagatgagctgctacataccacctttagtgccacactgtatcacagtggtttccaaaccatgacccattgtgcccctctgagttccatggaggtgcccgctggacactggaggggatcctgagtgggctgatctccacattcccacctggccacaggctgcttcacccagaaaacagttctctcctccttagatgtcagaattctctgtaagatttttctggtaagaaaatgattctgccacttaaaaaaacaagtttgaaggctgggtgtggtggctcacgcctgtcatcccagcactttgggaggctgaggcgggcggatcacttgagcccaggagttcgagaccagcctggccaacatggagaaaccatgtctctac

SEQ ID NO: 492 - DNA, 3377 bp, Homo sapiens
ttagatgcaagtttaagaccatttgccatgtatgtgggatcactgacacacaatttgtattttgtagctagtacatacgtgtattttatacgaactagaacagtggaaatgctgcacaaagttaactcaattgttttgattttacttattgatattagcacatcctcaacactccctccctgtggcttgctagtaagtaaggaagaactgaaaggaaaaggaactcggttgccctatctttccctttccttctggattattttcagtttaagtgcttggccaatacagggaagtaacaggagtaaggaaggatatggtcaggttccttggtcattcatgtctcttagaactccagtaccttctttctgcatttgaagcaagttgagcttagaacagaaagtgtgacctttaggactgttcacaccagtgcttacttagtcatagatggaacatgcttaccttttacggactttgagtccttattgaactccccatgcaccagggattcacaagaattctgagctcatgggacatcatgaatgtggtatgcaaatgaggtggcaaggagcacgtagctcctttgctcacatgcgtgcatcatggtcccgttggacttcacttgaaaacacaggttcgaagataaaatgattaagaatttcaagacagtgccatcagagtattaaaccaagcttcaggcccttctgagggcaaggctctatgcacatcacatgcccctgaagctgaccctgcttgcctgattctctgacatgaagaaagaaattccactgtgctttaaaaaaaaaaaaaaaaaaaaaaattcaggacagatttaatttggacttgagtacccaggtgttagcaatatcctacagattccagaaaacaatttagtccattgttgaaagagtacccttgaaggcatgtctttttttaatcccattatcttattcatctcagttccttttatttatttgcaacttagtcaatctcaggtctcacatccaaattggacctcctcagggaggaccatgctacaatttgaggacagagcacaggtctggggtgggaccgggtggagtggggagtgcccctagaaatccagtccaggcaagggcacagaaatgaacttttcagggtcagggaaagatctagaaggacgtgaaatcaccagctagtctttcctctctctacctctccctgggacctgtatgatggtggtgggagcataaaggactttgaaaatagaaatagcattttgtaagtgtcatgtaggaggtatcatgctgaggtgctgcatgcagtgttacactcctaacaatagccttatgggggaagttctcttatgagtccttttggtagacaatgaagctgaaactcaggaaggtcacatggtatcataaggctggtaagcattggagtggggctggcagggatgctggacaaggttgcagacatgagagccttcctgagttgcggaagtgtgtggccccatgttttatcagagtttgaaggggaactccagattactaggttttggggagatagttgcaagtgatggaatagccattctgagtgaagctttctttggtggtgacctggaatctctgagttcaacagttgatgctgctgatcacctagtcacctggggccttattgagcttttgttcctgccatcattgctgcctgactcttggtttccctactctggcatccagtggcctgagtcaaggttcagctcagcttctgaccagcttcttgaccaccttggccaagtccgtgtacagctccctttggtcttcgtttcttcatccatgcaagggggatggatactgtcatgaaggcaaaaatgaaagaacttgggttaaagttattgtagtagtgctggtgctgaggagaccctcagctttgagtgttggcttctgtccattcctcctgagctactgtcacatctcatgtgggtgcagtgggtcctctggacacagcgttgagcccagtccatgggttcctcatatagccagcaccttggcctgtagcaaataaaaacaaaccacttgaaaggaactcgccaagtatccctgatagctggcactcacagtttgtttgtgtgatgactttgcgtattagtcattttcctgttgcttataacaagatacctgaaattgggaaacttacaaagaaaaaaaaattatttcttacagttacggaggctgagaagtgcaaggtccagggggctgcatctggtgagggccttcttgctgatggggacagtcccaaggtggtacagagcatcacatggcaagggggctgagtgtgctaactcaggtctctcttcctcttcttatgaaaccaccagtaccctcccatgataatccattcatccattaacacattaatttattaatcatgaatgattaattatcatgacccaatcacctcttaaaggactcacctttcagtactgccacattggggattaagtttccaacacatgaaatttggggatacgttcaaaccataacagttggtgatagttgcagaggagcatgtacaaagattagaaaaatataaccaacccctgggtttgttggatgctttctgttgctcagatcattgtgacgtgagcactgtaggaggggtggatttgaaggggtctggttccccaagaggtatgtgggcatctgtgtgcctgcatgagaaagcacctttcctggcagcccgacaggtagaaactcattaatccacacattgactctatttcagggaaagatgacgtcaactcctgcatgttgaaggcagggagtggctgaaacagcatcaaggcgtgaaggcttccctgagccaccctgagttctcagaagggttcttaaagaagtcacgtcatctttatcgctacttctgctgcacttatcccataattttccaacttctgttgtgagaacttttacagcccaagtgtcctgtgatttaaccttcaatttggtaatgtctgtcttcctttagcaaagcaggctgaaggtgttgagatccgcctaccttgggaagctttccatggtggcacagtattgaaggttaggcctcatccaagttggcacaagcctttgtctccaacctgggtgggaggaaggtcaaggcagatgagtgtcctttcagtgcagggaactgccatccagggaggcttgcatttataactgagagacagcggggtgagttagaatgctaagaagggggaaatgggctgggcgtggtcacgcctgtaatgccagctatttgggaggctgagacaggcagatggcttgagcccaggagtttgaggctgcagtgatccgtgatcgcaccactgcaccccagcctgggtgataaagtgatacctggactct

SEQ ID NO: 493 - DNA, 6025 bp, Homo sapiens
cgtgtgcagtgtggcccccaacctccccgccgtgtcaccctgccgctccgactgcgactccatccggaagaatggctgggacgcgggaactgagaacaaaggggttgatgacccgggagaagtgacctgctttgcaggtagtaataaaggcagcaactctgaagttcagtccctcagctccttccagtcagattctggtgacgacaatgcctatcactgggacacctctgattggatgccaggggcccgcctgtcggacatagaggaagtgcccaactatgagaaccaggatggagggtctgcacaccaggggagcacacgggagctggagagcgattactacctgggtggttatgacattgacagtgaatacccaccccctcatgaagaggagttcttgagtcaggaccagctgcctcctcctctcccggaggacttcccagaccaatatgaggccctgccaccctcccagcctgtctccctggccagcacactgagcccagactgcaggagaaggccccagtttcatcctagccagtatctccctcctcacccattccccaacgaaacggatttggtgggcccgcctgccagctgtgaatttagtacttttgctgtgagcatgaaccagggcacagagcccacaggcccagcagacagcgtgtctctgtccttgcacaattccagaggcacctcatcctcggatgtgtctgccaactgcggctttgacgattccgaagtagccatgagtgactacgagagcgtgggagagctcagcctcgccagccttcacattccctttgtggagactcagcatcagactcaagtgtagacatcacatcttgggtacttcaccctgtttgttacagaaaagtggaagcagattggctgggcttctgtcccagtggagcattgtctgtggaatgagaagggaatactgtatttttccactagaaacttcttcacaagtcatactgtcccaacaagcaagcttgattccagttgggtgaaaatgaaaggctcagaaattgtttttgagaggtgactggtaatccttgatgtaggtacctatgttcacagctaaaaatgcaaagagggaaaaattatttcacccactaagttatacagccagtcttgtatggctttgtgcagtattgtgccctggaaagtgttacagcatcagtccttgcagtattaaaaactggcaacaatcaaagaggcattgttgcatgtaattttgagccaatgaaatgaaaatagtagtaatgattgttggaaaagttagtctcttaggcgaaagagaagagaaacaaatattattaaacaaaccagaaaatgggctgaagccttttaaatcaactctatttttttgataagctgcccaattttcagctataaaattaggcttgaataacatgtttagtatgctcagttatttctgtttgtttgtgttaagcatccaatctaatatagttgggttttatgatcttcaagaaaggtatcaatgaagagcaacatgaggctttttgggttccatttggtgggtgggggaggaagttaaagttgtttgaacattagaaagaatgtgattatctggttggttttgtgttttctggtaaatattccagttggtaaatctaacattgctacagaagttggctttgttcatatagcttctctacaattagatatttttagaagtttaagcaaaactcacaaattcaggggggaaaaaagaaaaaacgataccttcaaagtttgcggcctagataatcacaattcttcataatgcagaggaaaggtgtctgttattctaaatcggtagcatcaccattataaatacaattatgttaagaaaagaggaaagtagactagttattgtgtataaattataatagtgtgtgtgtgtctgggcctatgtacaaatatgtgcttgcactcagtaaggctgctcttgaggaaagctaatgtgaaggttttgggaaatggaccatgttgaaaattctgccggcgagcatggcatacctttcaatttctctgatctctatggtgttagagaaacatcaaatgccatattttactctggttcagttaactttattttggtactgccaataaagcaaaattgtgcttttttttttttttctcaagacagagtcttgctctgtcacccaggctagagtgcaatggcatgatctcagctcactgcaatctccacctcctgggttcaagcgattctcctgcctcagcctcccaggttgctggggttacaggtgtgtgccaccacgcctggctaattttttgtatttttagtagagatggggtttcaccatgttggccaggctggtctcaaactcctgacctcgtaatccacctgccgtggcctcccaaagtgctgggattacaggcatgagccaccgtgcccagcccaaaactgtgctttttaaaaacagtattttgttataattttccagaacttacctctgttttaaaagtgtgtaatgtttgattacaccctgggattcccttctcatctgtgggctttggccatgatttccaaaattaacaggagaatcattccactggaaatataacaatccagtcctcaaaactgaaagttgacaggttgagggactttccttttttgcttcaatcagattacggccgcctgtgcagtggccatggtaaatatatgcatatttgcactatctgcttaatgagcaaatctgtgtccacagtttctgatgacatatggcattggtgtgtaaattgtactgtccctagtctgtgcattattcactcagacatatttttagttatttcaattgcgtttaatccacttcttttttatgagtcagtgtttctgaatgtttatgcaaaaaaaaaaatcctttttcattcccaaactttctaagtaagtggatacactacacttcacaagttttccagcctttctcttcctgtctcttggtcagacctactcatggaggtattatccacactgtgatcttgaaataaatgaatttcactaaggctgctttcgagaacaaagtctttggtatttttcttatgtaagaagcacatttgcaagaatcatggaaaaaatgacaaactaatggcctagaatagagtgactgctacactttaagtaatgcaatgacataaaaaccatcaaagtaaaaccaacatgtcatttcctgcccccaggaaatattagaatgagattaatgctgatgagtccctactgcttacacagcatctctttgagggagaatgcctgactgacacagtaatgaaagaataaatagatcctaatgcagtcatgaagccactgaagaaaattgtgcccaccctttgctgtgacctatataaaatatctctttctttgggatatcatcccctgattttctgcagaatagctctgcagctaaatatataccaggcaagcatgtattgtgttttgatttattatctttaaacacatgatatctcttcactttttggaaagttagatttctctgtagattatgaaatgctttgcagtcaggccaagatgctactaggtggggatgatcactaattcaaaaaagctggaagaatcctatttgctagtccaaactccttattttatcaaagaggaaacatacccagagtgggaaagagacttgcccaagcccacagaggaagttaattcgcttaacaaggagtagaacccatccatctagccaatattctttttacatcatattgttcacccctacactgccttgagcatgggagtcacctggttctgatggaccctctgacttccaccattccttctttggaatatgctataaaagaaaattcatggagaatatttttctgaaagcctcatgatcttatgtttccttgcagtccccctagggagaggggttatagaattcatacatttctgtagacattcatcgaaatgctgcttttgccaaatgaatgtttgtataatagggatgaaatgataattacagagttcagctcagaccagtcatcagttgtagtgaaactttgattatactgttacctactggttgcatttttggttttggttttgcatttttttcttcccacaaacactggctactctttgtcctaccccctccaccatgatgaaccatgtggaaactatttaaatcaattaatgtctttctcattttttgaacatgtatgtgccacctcctggaagccatttcccataatctgttgtaggcactttactagtattgcacacattctggttaggttgagaatagctagactcttggtgctcgtcatatagtaagcaagaacttgggagtaataaaaggtgaataaaatgcatgcttcatttattccctttcctctatgaatattttgctgctgcgttctagtctatgccagctttccatgtacccttggcctgcctattcatgaaatgccatataaaagacttaggaacatgagtaggtggtccatgctttgaggttcatccaattagggaataaatgtgaaaggctggaaagggaactagtttctgggatttgcctggaacttcccttggacattactagcacattctggaaaaaaagcaagttgaacatatctaccatcagtcctctcctacttccttcccaccccaccctatccactacccccactgatgctatgtttgcatcatcaaagtcaggggaattgagaaaagagattatcaaaataaattattaaaatccagaaaacagttttatgtgaagtaattcaggaagatctagtgttcattttgcatggattgtccagataattgactcttcactccgctgccttcccagtgcacaggtattgctaaagtggttaggctttaatgttttatgtttttagtttcaaactatgggaaatggagatttgaagaggcatttattccttgtcatcattttgtgtgctctgtgagaaggtggttatatgtttttgctggtttgtgtcccacagtgttcaactgcacattattctgatgaaaatccacaatgtctttgagcttctggttgtgtaatgctggggtttaaagtcaccatttgtgggtttggcatcaattaatatttagccagctggctaagagataggaaaagaatatgatatttctttccttatgtaataatgaaaagcaataattacaagtaggtaataatacacaaaggccataattagtctcttctagtgtttagaatgcacttgagaatcgtagagtcatttggagcgtgtttggaccaattagtatgtactgtagtacccttctggcaaacaaataactgaattgctactatttaacaatcttatgagcccacactactgcattttgggagtggcaaatgtgtttggaaatggaagcagttctttttaagcactgtatcagagagattgtcttgtacgtttgcctgttgcaaacaggctggtttgtaaaagatgtatgttttggtgtttgaaatgtttataaaattgtatataaatggtttcaattttccaggcttttgtagatactatatttgatgcctatcaggatgctttaatttggggggtcgaatataattgtaagtcatccacgctgttggtctgcaaacttttgaggtaactacacacacacacacacacacacaaggattttagatttgaaaatgatgttttttactcatttcaaaatgtactgtaacctttctttggttcttactgttttcatttaactttctctgttttcaagaaaaattgtctttattgacatttgtaaaaaagaatgtgttttgcccagttattaagtattttatttttatgcaatttcagaatcacaatgaggtatgtcatttcttcatatacatgcacattcacctcaacttgcacacacatcacacaccaaaccttatgcaaaggggaaagctaacacttagagtggattttgtcccttaaggaaatggattgttcctgcatatattgctggtggcagtattcagtcttgtgttctttttct

SEQ ID NO: 494 - DNA, 3472 bp, Homo sapiens
aaaaacagcaattggacaaacccagggtaaagggccatttgcagttggagaaaaagagatacttcccctcccctaaagcatccaggtgactgtgactggcaccgtgcggcagctcagcgtccatggcatgtcttcccatctgctcctgacggccctgacagacaggtgggtgccccctgccacgttgggggtgctgcaccaagcacccggctcagcgtctctactggttcgcccagtgctgctttgttatggcgccagagctgggacggggccagccacccccaccggtatgctgactcctccactggcacagtcactccaggaacaccgaagcctcagagcctcaggtgcctttttcttccaaatatggctagcatctcccaacccgctcaacccaagcccagatcacatgcagctcccaggccggcactgttctgacagcatatggccattcgggacggatccccccgcagctgctgccctcgctgtcagcaaggcggacacatacccagggctcgaatcttgtgggctcaggtcctgtgggctgccccagcccctggccacagttcccctgcacaacgggaacgacaggatgaatatcatgttttcagagagcagatttttgcttctttctaaaaatgtatttagttattttggtactaaaaatgcaaggaaagagccctatatctggatccaaacacattgcttctctctgagtcttcgtgatttacagcatataaattacaagcagcctgagaaaggggaattacccccagctgtcagctcagacaattgagacccaggtaggcggctgatccaagatcaccgtatactatatggctgagctccctctgtaaatacgcaattactaggatggctgtactgatggggtacaagggctgtgaaaaactcaagaagctgtgaccgcatccacggggctaccctgcatggccgcactagctaatccctggctccccacgaaactgaaggcttctcattctcagggcacgtgaaataaggagtgtcagatggatatgaaaagtaacaggaacaatactgccaaaaatcatctaacatgtaccccaacctccctgtccagctattttctgttcctgtctagcagaccaggtctcgaaggacgtcggggaggctgtgtcaaaaaaagactcacgcgggaatgctattcatgatccacggcagagcgtcggcctccaggaggctcaggacccaggtcccatctgcaccttgccccagtgtggacctcgcattcctaaccaaacccacgtctccaggggccagccggagagccctttcctggctgaagacggcattagcccgcatcccactgtgctgcaagccaaagcggtgtccacgtggcagctcaggagccactttccctctgagatgacagaggatgcagcctaggcacatcctgaaaccggtctcgtcagtgtgtgcaaatatgattcatgaaatgtcagcaaaatgtcttaaagttcctaacctggggaactgatacatccctcctaacgatggtctagagaagtatttttagaagctcttaatgataacatttctttctggatttgtgtagatttagtcattagaacgtcttcagaggcttcaaagagatgaaattagaccccttgccccaactgaagacactttcctgtgacattttgtgtgagggtcaaaggaattttttttttgagacagggtcttactctgttgcccaggctggagtatagcagtgcgatcttggctcactgcagcctcagcttcgtgggctcaagtgatcctcccacttcagcctcccgaatatcctacaggcatgcactaccgtgcccagctaacttatatattttttgtagagatggggttttgccatgttgcccagcctggtcttgaactcttgagctcaagcgatccacctatcttggtctccaaaagtgctggaattacaggtgtgagccgctgtgcccggcccagaggaatttttaacgatgagttggtccattttattgggtgaaaacacacctgtgttatcccagtttgtttagggacagtggggtcaagagatggccaagaacagacagtaaaaaacaagacagcgcaacctcataataaacaccacatatgacacggctgaaaaatgcaggtgtgaggggaagtatgtagccttttcctcatcatttcaggaatgtcagtccaacttcacacacacacgctggcacgtcacacggccactaacagcagacacgggtgggctcatcaggcaccacagcctccctcggagtgagctcggacagtgttccgcagcctgcttccctgcacgtgcccccatgggcgtgcatttaggaacacccacaaggagagtttgggcctcctcccgctgcctgagctcacctgctctgtggggcatagatgccctcatttccccagctcctcccatgcacatgcatttaggacactcccaagtgtttgtgataccaacaaggttgcaatggatacccttagatgtgcgtgcacaagctcctctgtagagaggatttctctagggtgcggagttgccaggaagacgttatgagccccagtgctaactggtaacaggtgagtgccctccggaggggctgccctaagaccccgcggtcctgagagccctgtgtccccacgttccaaccaggtcgtacttagtgtttaccttctgtcaatctgaagaaatggcaccctgaagaccagtggttgccgagactgggggagggagggctgaacagagagcagaggatttccagggcagtgaacccactctgcgcgatgctgtagtggtggacaatgctgagatacatttgcccaaacccacagaagcacggcaccaagagtaagcccccagtggaccctgagtgatgagggactgtggaccctgggcaatgatgacaggcccatgcaggctcactgactgtaacaaacgcaccactccaggacggggctgatggggggttgtggggggtgtgcgtgtgtgggaggaggggtacatggaaaattccgcacttttcattcaattttgcagtgaacctaaaactgctctaaaaataaagtttattaataaaacagtaccttgttttaataggcaatgttagttgctaaggaggctaagttatatgtgtatgagtttattgtttatttctttctttttctgtgagctgcctgttcatgtcctttgaacatcttctattgggttggttacctttttcttagtttaataagaaatctttgtattttaagaacattaattcttagtcatatatacaggaatttttttcccaatttttcctccataaatatttgatacacatatttcaatgtgaaaaaagttattaaattgtaccattttatttattatggtaacttctgggtttgtggcatgcttggagaggctttctccattgcaaagtaataaaactgttctactgct

SEQ ID NO: 495 - DNA, 3279 bp, Homo sapiens
cccatctcgtgcacgacgccacacaacttcgaagtgtggacggccaccacgcccacctactgctacgagtgcgaggggctgctgtggggcatcgcgaggcagggcatgcgctgcaccgagtgcggtgtcaagtgccacgagaagtgccaggacctgctcaacgccgactgcctgcagcgggctgcggagaagagctccaagcacggggcggaggaccggacacagaacatcatcatggtgctcaaggaccgcatgaagatccgggagcgcaacaagcccgagatcttcgagctcatccaggagatcttcgcggtgaccaagacgacgcacacgcagcagatgaaggcggtcaagcagagcgtgctggacggcacgtccaagtggtccgccaagatcagcatcaccgtggtctgcgcccagggcttgcaggcaaaggacaagacaggatccagtgacccctatgtcaccgtccaggtcgggaagaccaagaaacggacaaaaaccatctatgggaacctcaacccggtgtgggaggagaatttccactttgaatgtcacaattcctccgaccgcatcaaggtgcgcgtctgggacgaggatgacgacatcaaatcccgcgtgaaacagaggttcaagagggaatctgacgatttcctggggcagacgatcattgaggtgcggacgctcagcggcgagatggacgtgtggtacaacctggacaagcgaactgacaaatctgccgtgtcgggtgccatccggctccacatcagtgtggagatcaaaggcgaggagaaggtggccccgtaccatgtccagtacacctgtctgcatgagaacctgttccacttcgtgaccgacgtgcagaacaatggggtcgtgaagatcccagatgccaagggtgacgatgcctggaaggtttactacgatgagacagcccaggagattgtggacgagtttgccatgcgctacggcgtcgagtccatctaccaagccatgacccactttgcctgcctctcctccaagtatatgtgcccaggggtgcctgccgtcatgagcaccctgctcgccaacatcaatgcctactacgcacacaccaccgcctccaccaacgtgtctgcctccgaccgcttcgccgcctccaactttgggaaagagcgcttcgtgaaactcctggaccagctgcataactccctgcggattgacctctccatgtaccggaataacttcccagccagcagcccggagagactccaggacctcaaatccactgtggaccttctcaccagcatcaccttctttcggatgaaggtacaagaactccagagcccgccccgagccagccaggtggtaaaggactgtgtgaaagcctgccttaattctacctacgagtacatcttcaataactgccatgaactgtacagccgggagtaccagacagacccggccaagaagggggaagttcccccagaggaacaggggcccagcatcaagaacctcgacttctggtccaagctgattaccctcatagtgtccatcattgaggaagacaagaattcctacactccctgcctcaaccagtttccccaggagctgaatgtgggtaaaatcagcgctgaagtgatgtggaatctgtttgcccaagacatgaagtacgccatggaggagcacgacaagcatcgtctatgcaagagtgccgactacatgaacctccacttcaaggtgaaatggctctacaatgagtatgtgacggaacttccctccttcaaggaccgcgtgcctgagtaccctgcatggtttgaacccttcgtcatccagtggctggatgagaatgaggaggtgtcccgggatttcctgcacggtgccctggagcgagacaagaaggatgggttccagcagacctcagagcatgccctattctcctgctccgtggtggatgttttctcccaactcaaccagagctttgaaatcatcaagaaactcgagtgtcccgaccctcagatcgtggggcactacatgaggcgctttgccaagaccatcagtaatgtgctcctccagtatgcagacatcatctccaaggactttgcctcctactgctccaaggagaaggagaaagtgccctgcattctcatgaataacactcaacagctacgagttcagctggagaagatgttcgaagccatgggaggaaaggagctggatgctgaagccagtgacatcctgaaggagcttcaggtgaaactcaataacgtcttggatgagctcagccgggtgtttgctaccagcttccagccgcacattgaagagtgtgtcaaacagatgggtgacatccttagccaggttaagggcacaggcaatgtgccagccagtgcctgcagcagcgtggcccaggacgcggacaatgtgttgcagcccatcatggacctgctggacagcaacctgaccctctttgccaaaatctgtgagaagactgtgctgaagcgagtgctgaaggagctgtggaagctggttatgaacaccatggagaaaaccatcgtcctgccgcccctcactgaccagacgatgatcgggaacctcttgagaaaacatggcaagggattagaaaagggcagggtgaaattgccaagccactcagacggaacccagatgatcttcaatgcagccaaggagctgggtcagctgtccaaactcaaggatcacatggtacgagaagaagccaagagcttgaccccaaagcagtgcgcggttgttgagttggccctggacaccatcaagcaatatttccacgcgggtggcgtgggcctcaagaagaccttcccttccctgtcctgggtcatgttgttgccaccctgtgtgacttttgaagctgtaaaatgagcttccagggcttgggtggcgtcggggcagggccgccgaggctgggaggaagcccttctgccttttgctggtgtttctggaatttgctttccctcacctctcacttccttctagaaggagcttcctgactggaaccagagaatgcatgtctgtccacttggtggctgctgggtggggccgggaacaagggcccctgaccctgtgtgctggccgggacctgccaccagccccccagcctgcttcttccccttaagctttgtgcccctggatgcgctaacattcactcttgtttgtccctggactggccatgaagtgaggagatggttatttaaagagaattccctatttatttgacaaaaaatccagttaatatattaatgtgaaataaaccctgtttgcacctcg

SEQ ID NO: 496 - DNA, 3421 bp, Homo sapiens
tttcgggaaggagcatgctgaggcctggagtctggtcacggtcacgtcaccccagggaggcactgagctgggacttggattccagtctctcttgaccaaggcctgccgcgtttccactccgtgacgaggagcgaatgaataaccaggcacttggcgatggtctgcaagtccccagccccgcacctccctgggccccagagcgggtgtctctgaggcttggaacattccgagcagacctggccgggaagccagcctccccctcagagaaggctaaaggctgcacggcccagctctggcgggagaggaaccgtgattgcagcctggctcgtcctttacggaaaaaagaaaaaatccccttgtcggctgcttcccaggctgtttcgttccatccagcgctggggcttggagaggcaggagccgctggcctgcagacacacgccgccgggcggctgggttctctggatgtggggaaaccgatttccttctgggggaactggcagctgcagccaagaccgttccatgatgcccgtcatcccggaaggctgggtctgcctcccgtggccacacacacacacacacacacacacacacacacacagccacagcagaagcagcaaaccctaaccccaccccaaggccgttcccactgctgccggctctcccagaatcatcctgctcctgggcagggagctgggcctgtgtggcagttcggtaccaggcaagggtgcaggggcgaggacgaaagaagcagaaggtggagatgtggtcaaggaagtggcactgctaggtgagggctgcctgtcacccactgtcccccagtgggattacagagtacggggcaccaacaaagacaggcacacagtgatgattaaagaaagttcaggcctggcgcggtggctcacgcatgtaatcccagcactttgggaggccaaggcgggcggatcacctgaggtcagaagttcaagaccagcctggccaacatggtgaaacccaatttccataaaaatacaaaaattagccgggtgtggtggcacatgcctgtaatcccagctactcgggaggctgaggcaggagaattgcttgaacccaggagggggaggttgcagtgagctgagattgcaccattgcactacagcctgggccacggagtgaggctccatctcaaaaaaagaaagttcaagaggatgcttgctaaggactggggcatgccacagagggcagggcgcgcccgaacccccaccatgacctctgaggaggctgacggggctggagccgtcagatgtcactcccgcctgcctgtccacccagggatgggtggttgctgaacgcctggcgatgggggacacctgactgtgtttgcctctgcacctccacgggggccagctggagcagactcaaagcccggactccgtgacatgggaactgggagcccagctgggttgggtggggcggggtgggggtgcaaagagaagagctcagacccgcacagctcagacccacagtgctgccctcatgccacagttgcacaagctgtgactgatccccaagccagaaagctgagctgagaggtcaggtgacttgccccaagtcctgaggcctgtctgctgggctccaaggtgccggcatggctcacagacccacccctgtccccaacccaggggtcatgtctgcgtacgccatgtgtgtccgctatgatggcgtcgaggtggatgacagctactgtgacgccctgacccgtcccgagcctgtccacgagttctgcgctgggagggagtgccagcccaggtgggagacgagcagctggagcgagtgttcgcgcacctgcggagagggctaccagttccgcgtcgtgcgctgctggaagatgctctcgcccggcttcgacagctccgtgtacagcgacctgtgcgaggcagccgaggccgtgcggcccgaggaacgcaagacctgccggaaccccgcctgcgggccccagtgggagatgtcggagtggtccgagtgcactgccaagtgtggggagcgcagtgtggtgaccagggacatccgctgctcggaggatgagaagctgtgtgaccccaacaccaggcctgtaggggagaagaactgcacgggcccgccctgtgaccggcagtggaccgtctccgactggggaccgtgcagtggaagctgcgggcaaggccgcaccatcaggcacgtgtactgcaagaccagcgacggacgggtggtacctgagtcccagtgccagatggagaccaagcctctggccatccacccctgtggggacaaaaactgtcccgcccactggctggcccaggactgggagcggtgcaacaccacctgcgggcgcggggtcaagaagcggctggtgctctgcatggagctggccaacgggaagccgcagacgcgcagtggccccgagtgcgggctcgccaagaagcctcccgaggagagcacgtgtttcgagaggccctgcttcaagtggtacaccagcccctggtcagagtgcaccaagacctgcggggtgggcgtgaggatgcgagacgtcaagtgctaccaggggaccgacatcgtccgtggttgcgatccgttggtgaagcccgttggcagacaggcctgtgatctgcagccctgccccacggagcccccagatgacagctgccaggaccagccaggcaccaactgtgccctggccatcaaagtgaacctctgcgggcactggtactacagcaaggcgtgctgccgctcctgcaggcccccccactcctaggcccggcagctgcagccccttccagatgaagaccaagcgcccctcctggggctgctgcagcttctggggcctccacagacccccctcctgcggggcacgctggcctaagagacgtggcactgagcctcggctgtcgagaggggacttcccacggcccatggacctttgtgctcctggggcagagcctccggcacccagtggcctcccccagacagagccacccctgccgtgggaacctgtccgtgttcctgcgtggatcctgtgtttgtggctcccactccccagccccccagcagcccccagccgaggggcccagggcccacagccagcggtggaggtgtcttgctccgggcccgtagcccacgccctctctgggtggcagggccttctgaaggaaacttgcaggcgagcccaacgtggtggggggccttcctccctcagaggccatggggtgagaggggctcaggcagccaaggaggcccaggcgtgctccctcttatggagcccctcccatggagctctcttcccgccgcactttctaccccgggcagaggcgcttgcccacgggacgtttggggatggacctcggcccccgcccctgcagtcagcgtcagtgctcatctacgttaataaagtggtcctatttatggcggc

SEQ ID NO: 497 - DNA, 3982 bp, Homo sapiens
aacctcctcggtccgcgacgatcctctagagcactgtgtgtctccccggacgcgagcccgctcccctgaaatctgcaaaatggctgataatttggatgaatttattgaagagcaaaaagccagattggccgaagacaaagcagagttggaaagtgatccaccttacatggaaatgaagggaaagttgtcagcgaagctttctgaaaacagtaagatactgatctctatggctaaggaaaacataccaccaaatagtcaacagaccaggggttccttaggaattgattatggattaagtttaccacttggagaagactatgaacggaagaaacataaattaaaagaagaattgcggcaagattacagacgttatcttactcagggcattacacaagggaaaagaaagaaaaattttctatctacgagtgaaacagatccatctactttgggagtttctcttcctattggtgagaggttatctgctaaggaaaggttgaaacttgaacgtaacaaagaatacaatcagtttctcaggggtaaggaagaatccagtgaaaagttcaggcaggtggaaaagagtactgagcccaagagtcagagaaataaaaaacctattggtcaagttaagcctgatctaacttcacaaatacagacatcttgtgaaaattcagagggtcctagaaaagatgtcttaactccttcagaggcatatgaagaacttctgaaccaaagacgactagaggaggacagataccgacaactagatgatgaaatcgaattaaggaatagaagaattattaaaaaagcaaatgaagaagtgggcatttccaacctaaaacatcaaaggtttgcaagcaaggctggcattccagatagaagatttcacagatttaatgaggatcgtgtttttgatagacggtatcatagaccagaccaagatcctgaagtaagtgaagaaatggatgagaggtttagatatgaaagtgattttgatagaagactttcgagagtgtatacaaatgacaggatgcacaggaacaaacgagggaatatgcctcctatggaacatgatggggatgttatagaacagtcaaacataagaatttcatctgctgaaaataaaagtgctccagacaatgaaacatccaaatctgctaatcaagatacctgtagtccttttgcagggatgctctttggaggtgaagatcgagaacttattcagagaaggaaagagaaatacagactagaactgttggaacaaatggctgagcaacagaggaacaagagacggtaatgaaagagaaaaagatttagaactcagggttgcagcgtctggagcacaagaccctgagaaatcggtaagggtttctggcatcttttaatgtttaatctttcatcaaatgatcctcaaatgtggtggcaggtggggatagagaatattgggagaaaaagagagtagaccaatttgaacagtaataaaattaactaaattcagttctcataaagtgtaaattctcttaactgttatttccttgaggtaatttttcctttttcatttgtgtgtcatttttttaaagtttaaattagttctctctgctttattcacatgtactattccatgggaaagttatctgggttaaatttacaattgatgttaatatttttcttgaatacatcttgatcacttacttttcttacattggagtgatttctgagaaaactgacgactttatttttaaagcgttttagtaattgttacttattgtaacattagagagataataatcttatttttactttaattttgcaattctcatcattaagtggaatgaattactcacatcattgcagttaagtaaggaggaggtaatttattgtttttaccacaatttattttttctgtagttgtttatgtaatatttatttctaatacaagtcttgtttcatctttgaatgatgattaagacctttaatttcattaaaaagctcattcttaaaaaggatgcagcaacttaaaattatttacctgtaggcaacttttgatttgcttttacttatgctgagaatatatcctgtgggttatctatttggaaaagtttcatattgcaccagcatcactcgcagtatgcttctgggttaacctgataaatcattcctgataagataaccatggtaggaaaaaaagaagataaatttcaaagctaaatatattttcctttatgaatcaaaagtttccttttaagaggtgagctttttaatgtaatatgttggcatgttaaattttgtatttatggttacactagtgtgtgacagaccttatttatctttgaattgaagctcctatacagtgtcaagttgatttatgagaataaataagtaattggaggcaacagttacgcctttacttttgggtttacttttgatgtgcaaatcttagaaaagggcacataagtgatgttctaaagtagagattagcaaagtgtggcctgtgaccaaatttgtttgctacctgttttcataaaaaaaagttttattgcagcacagccttgttcattccttgacatactgtttgtggctgctttagcaccatagctgagtctgctcattatgaagagactatgtagtcttgcaaatcttaatctatttactgtctagccctttacagaaagcatttgctgaccctgttttacagaatactataacagaaatggcaattagagaagtagcacggtgtcctagtacataaaaagaatactacagcctgatagactaaagcagtttagtgtggcaccaagacactttgaagagatgataccacctgaaagacccagaatagctttccagacacctctccctcctttatctgccccatctgtcccacccatcccatcagttcatcctgttccttctcaaaatgaagatttgcgcagtggactcagcagcgcccttggtgaaatggtgtctcccaggattgcacctctgcctccacctcccctactaccacctttggctactaactatcgaactccttatgatgatgcatactatttttatgggtccaggaatactttcgatcccagtcttgcttattatggttcaggaatgatgggcgtacagcctgcagcttatgttagtgctcctgtcacccaccaactagcacaacctgttgtggtctccctgtgttgcccagtgtgatcttgaactcctggcctcaagcgatcctcttgcctcagcctcccaaagaatacggttggacagaatgaactgaagattacaagtgatcaagtgataaattcaggattgatttttgaagataaaccgaaaccttccaaacagtcacttcagtcttaccaagaggctttgcagcagcagattcgggaaagagaagaaagaaggaagaaagaacgtgaagaaaaagaagaatatgaagctaaattagaagctgaaatgagaacatataatccctggggaaaaggtggaggtggtgctcctctcagggatgcaaaaggaaatctgataactgatttgaataggatgcacagacaaaatatagatgcctaccataacccagatgcaagaacatatgaagataaaagggctgttgtatctctagacccaaatttagccacttcaaatgctgagaacctagaagatgctgcaaataaaagctcaggtcatatgcaaacacagagctctccttttgctcggggaaatgtatttggtgagcctccaactgaacttcagattaaacagcaagaattatacaagaattttcttcgtttccagattgaggaaaagaaacaaagagaggaagcagagcgagagagactgagaattgcagaagaaaaagaagaaagacggcttgcagaacagagggcacgaattcagcaggagtatgaagaggaacaggaaaagaaaagagagaaagaggaggagcaaaggctaaaaaatgaagagcatattcggttagctgaagaaagac

SEQ ID NO: 498 - DNA, 3603 bp, Homo sapiens
ataattttgacccaaacttcaataaaacttttagtttttagagctgtggctgtcaggattgtgggtcacagattgtgggtcagtgccatctatctgctgccaactaccaaattcaggtcttaagcttggaccttccccccgaacttcagatctgtagatgcagctgtccccggctgtctcacagatgtctccgacatggccagtgcaaacctgctcctgttcaccccacccaccctgttctgatcaccgtcttctgttcagccaagggcagctccatgtttaggtcaggccagaagtctccatgcaatccctgcctcccctccttatctcacacactacgtgcaatcccgcagcaaatccttttggctctatcttcaaattacattcagaatctgaccaattcccatcacctccactaccaccaccccttcccagccaccatcatcacttgtctggactattgccataggctcctaagttgccttcctgcgtcctcatgggtgcctgaagtttattctccatgcagccaccttttaaagtgtgagtcacagcatctcactgctctgcagtctctcctctggcttcccatctcactcacggccaaagccaaagcacgtgccaggccctggctctctgacctcatctccaactgccctccacactctgctccagtcacacccgtctgcttcaactactggcaaagaccaagtcttcccctacctccatgcctttgcatctgctcctctctctgcaccagtcgggctggctttttcgatgatcagggctttcctggatcaaagatgatacaattcttacgtgtgtttgaccaaaatatcatatggaaatctaatatctaggatagaagatcataaatgaaggatctattctgacattcagagcttgaacagttttcagatcctttctgctgtgtgcttcaggaaatatcttcccttgtggttcagatcgtggtgtgggcttgagcatatgtgagtctcatttgttgtccagctgtatgagccggaattgttcatttttaaaggcctggacttcataaatcatgtagaaaacaagcacagatgtataaggagagttgcccattttcagagaatagatagtccgtgcttccatatataatttgtacttcaaaacttatgtattacttagttacagaataaaagccagttggacagtttagtgcaccattagattacatgttaaggcaggttctatcccagaaaacagaaaatcatgtcctccttcttatttacatcttgttcattgttttgatataaaatctaaaagtcttaaaaatttgatttataccttcaaaattcaacacagagtcaactgattaatattggattaaagggaaatgtcactgactttgacatacctaataaattctgttttactttatgttatataaatttgagacttatgcttcgtttccttagagcaccagcatttttctttttttcttttttcctgtcttataaagaactcgagacaaataggagaatatattccagcagattcctgtacatacaaagatagtgactctgaatagctggatgataggcactgtatggtcatatcatagcagaaatgtttgcccattcctgatcaatgaagtctgctgttatgacagtttgttacatgaaaggtagttaaaaggtaacattgtctggaatataaaaaatgtggactgcctcacctcacaaaagtggaggaacaccatcatatagaggagattcgatcaaagcaaaggatttttcaattagattaaaaatctgttgaaaactctattgataatcccaactactcgggaagctgaggcaggagaattgcttgaagccaggaggcggaggttgcagtgagccaaggtagcaccactgctctcgagtctgggcaacagagcgagactccgtctcaaaaaaataaaataaaaatctattgagctattgaagcttttccttaatatgttcaaactgtatccaactaagaaatacacttgactacttaccactcagaattggtgattatgatagagtagtgctataattatttgaccaggaaattatacttttcaagatatatgaaaatttaaaataatttgtctcatttttaatttgtaccttaaagaactgaaaatcaggatgactgagtttcttttcttttctttttttcagctgtaggcaatttactcaggtactttaatggattgtttaacctcattatgcctcagtttccttacctataaatgagaggagtgaactacataatgttcttaaagcaaaaaattacttatttttaacaaaaaagctatagtagaaggtagaagaaaagtagaaagttgagaaactatagatacttaaaaagaaaaaaattattccactattccacaaacacctttttctttagcatatgtacctaccacatacttattttagttttacaaaattggatcatagaatatatgttcctttataatctcattttctcccattgaatacaatattgtgaatatctttgcatgttattacatataattcaacaagtttttttttcatgatggcatggtagctaatggtttgaatatgctacaatttatttaaataattttattattattgaacaattggtttctaatattacactcttaaaaattctgtaatgattattcttatagttaaatcttttcacatatgtgtgatttgagataaattcccagaagtggaattgcaagattaaaggatttttgtcatgtaaggccaaaacattctttataaattttgtgtcaatttacatttcgtcggcagcgtataatagtgtttgtttcttccccattctcataagtactgcataatagtacttcagatgacatattttggagcttctattcaaggtggtcctggagaaaatgagttttggggtttttgtttgggtttggttttgcctgcttaagaccccatataaattacagaaaaggagaaaagggggaagtctgtattaaccaagtgggcagaaagaggccatcatcaaactatttcagagaatttctgggagatgaaagtagaaggtggggtggcagctaatgaagcagaatagagaactctggagctagagcccagaacatgtgcagagggcacaggaacctagcatagagcagcttctctgcaggaccctaaagggctccaggcttggacactgtacttaccccaggtaaaaacaagtgacctttggaaagtctgtatgtggaaccatatgctccccactgtcactatggaagggcctaactttcacataaaaaattggaaggctcggccgggcgcggtggctcacgcctgtaatcccagcactttgggaggccgaggcgggcggatcacgaggtcaggagatcgagaccatcctggctaacacggtgaaaccccgtctctactaaaaatacaaaaaattagccgggcgtggtagcgggcgcctgtagtcccagctactcgggaggctgaggcaggagaatggcgtgaacctgggaggcggagcttgcagtgagccgagatcgcgccactgcactccagcctgggcgacagagcgagactccgtctc

SEQ ID NO: 499 - DNA, 3562 bp, Homo sapiens
ctttggaaggagctcaagtgattctgtccttagtttaattgtagatgggatggatccatttgggtatctctgcccttggttagttaacattatgcttgaaaaacttgggcttgaacacttctaggtagtagcctttttgcagtgataagaagttctgtttgtccttgttcctagttctgcctacattccagtctctcacctaaatttcagaatcagaatgagatttatcaggatgttgttttgaaaatatgtatacacaatcattattcatattactgttactttattgctttttagatgacttacctgtaattttttttttcttccacagtcctttgttcccgatttctgctctgtcacttccctctcctggcaatgaacttggctgccgcaggcagggggcagggccagggaatgaaattccagagcagaaagaacaaagtcagatatctcaaaatatcatcctgccccatttaatctgggccttttatccatgtggatgcccctttctaaacagcacctgcgctgggctgcgaggcccctgcctgcctgctgctggttgggcagggcagatacacctttctccacctgaggactgcgttctcaggtaatctggctaaagcaatattccctccattttaggcattcttagattgcttttatgatttgtgctattttaccataccacatgtaatttttacttcatgcttttgtgtaaagcaactttttctctttttgtttattttttattgtggtaaaattcacataacataaaattcgccattttattttcctgccccccccttccaaaattcaccattttaaagtatacaattccgtagcttttagtacatttacagtgttgtggtactgttaccactacagttccaaagcatttttcatcaccacagagggaagcccccattaagtaataattccctcctcccatcccctggatcctatttctatggatttgtctattttggatattttctataagtggaatcataaacatgtggtcctttgtgtccggcatctttcacttatgttttctccattactgccgccttttgtgtttgattttttttctagtattttgactcccttatttccttttaagtatctattttatcttcttacctatctttaaaggaaattttatgtgacatccattataacttaaatatttacttaatctatattaaatacaggattattaaaatacaaaggaacactgctcaaaagaaatgtcatttttttttaatgtcattttttttttttttttggagacggagtctcactctgttgcccaggctagagagcagtggcatgattacagctccctgcaacctctgcctcccgggttcaagcgattctcctgcctcagcattccaagtagctgggattacaggcacacgtcaccattcccagctaatttttgtatttttagtagagacgaggtttcaccatgttggtcaggctggtctccaactcctaggctcaggggatccgcccacctcatcctcccaaagtgctgggttacaggttgagccaccgtgcctggcctgaaatgtcatttttaagcttagtgtctaatgacatgttttgtgttgttttgctgatttaataaataaggccagatactgacatgaaacagtggtttagtaatcccttatctactccagaaagctgaaggctgaggaaggacatgcacattccctcacaggtgtcacatgaaaaatcttccctatcctgtaggacttaaaaggtcgccttggatgcccacatggacaatacattccaggtggaaggttgcagattgtagggaatagtgtcaccacctttgttgtgcatccatgacaccttatataatctcttgtgcacatgtattagagggtgctccataccaatctagatcaggatccaaatcagacactagtgcaggaaagaagtgaagctggccaggaggtggcagcaacagttcagcccaaggcaagtgctgctgggcagaatgaaggtccagcgtggccaagtcttcctgatctttcaggggcaaaggaaatctggatttttaatatgtggggtgttaaaatatacatatattatcatatataaaacatacatatatacatgtttctgcacagttcctggcttataactcctctagcccttgttacagtcttttaggtgtgttaagcctcaggggcaggcctcaggaaacaatctctcagagttctcctgccctcctttcaccagtcccaaagcaaaatcctaatctccctcctttttcttttttatttagggacagggtcttgctctgtcacccaggctggagtgcagtggtgtgatcatagctcactgcagcttcaaactcctgggctcaagtgaccctctctcctcagtctcctgggtagctgggcctacaggcacctgccaccacccaccccctactgactaattttttcaaattaaaaaaatttttacttttgtaaagaccgggttttgctacactgcctgggctggtcttgagctcctgagctcagggaatcctcctgccttggcctctcaaagtgctgggattacaggtgtgagccactgagcctggccgttttttttttttgagacggagtttcactcttgttgcccaggctggagggcaatggcgtgatcttggctcaccacaacctccgtctcccgggttcaagcgattttcatgcctcagcctcccgagtagctgggattacaggaatgtgccaccagacccaggtaattaagcatttttagtagagatagggtttctccatgttggtcaggctggtttcaaactcctgacctcaggtgatccgtcctcctcggcctccctaagtgctgggattacaggcgtgagccaccacacccggccttatttttttttattttttattttttgtgagacagagtctcactctttcacccaggctggagtgcagtggcacgatctcagctcaatacaacctccgcctcccaggttgaagcaattctcctgcctcagcctcccaagtagctgggattacaggcattcgccacaatgcccagctaattttgtatttttagtagagatggggtttcaccatgttggccagggtagtctagaactcctgacctcaagttatccacctgtctcagcctcccaaagtgctgggattacaggcgtgagccactgtgccaggcaaatgctgccattttaagacctacactttgggtaccaaaggtaaagatgttgaccctaaatacttgggaagcctggggccagtgataaatataaaaattggtatgaaaatttagtaatgagctttgtattgtactcatgcttaaagttatattttccatagcatcagtcttttcaaatttgccttattcaacacattaaggatgctacaacttatgctattaaaacctcataggctgggtgaggtggctcacgcctgttaatcccagcactttgggagacccaggtgggtggatcacttgagcccaggagttcaagaccagcctaggcaacatggtgaaaccccatctctgc

SEQ ID NO: 500 - DNA, 3595 bp, Homo sapiens
aagcggcatcgcggcggcggcagcggcggcggctacaccgggcttggccccctccctcctccgttcccccctcctcccccctcccctcagcggtggctcccaagaagtccgagacacgcggtgaggcggcgacgggctccgggtgagggtctctggagtgtgggcgccgtttcctgggcgcagagggagagcttggggtcggggggaggtgagagctgaggggcgaatgtccctggcgcgggcgggagagcgcgctctcggcccggcccgcaacttgattcctaactctgacctgccgcccggcgcgccttggcctgagggtcggccgtgtggggacctggagccgccctccttgcgaccgctgtcggaggagtccggcgcccgctgttcccctcgcctcgcctttcgcggcggagggtcggagcctgctgccctctgctcaccttcgggtgcagttgctccagctccctgcccgcggagaggatctgcccgcccctcttcgtctcttgtctgtttttatcacttctaggaatttgtttggtggaggcttgggatgggctctctcagcgctactttcacagtgactggggtggggaagagttccctcacctttttcaggtggcgcgtcaggcagcctgcttggtacctggagccctgttttcccaagcccccgtccgtcagtgttcgcttcttctaaaattaccgatgacagggttataaatcagtttttagggggctcggagagagtttgggttggaaactgttagctcttttttcctcctggcttttgatcttgatttaagcgtttgcctctgaaattttgacaacttcataagatggtccaaaagtgaattttggtagaaagatttaaatgcacagttgggattttatgggggtacggtgacttcattgcaggttgttgactttttttttaaaataagatgttcttttaattttttgactctgggtttctgagccttggttattgtcccccatttctgttccaaaagcagactttttttttttttttatcaccccttcccctcacccagagaatccctttaaacgccaagaaagctgtcataacatttagcattatttgatcacagaacttttccaaatgaaatgctaaaaattccttcagaaaaaagcatccatctacccatagcattattttttggggggaggctatacgtcttgtcagttctgaaagtttgaagtgacctcttatcaaaggccacccttatgtctccttaaacgactcttaggtaattcctagatgttttcatccgttctgataaatttgttgtcagagtgttgattgtgatgatctgcaactaaaattatttcatcagtaaagatttccacacatgtggcagctgcttgttggtgaattatgaaatttgaaaaaattgcaaattaaatgtgaaaggcatatttcttttaacttctgattgtaactgtctgtcctccagtatacgttcctatctagactttggtctgcttagcagatttcctcttttcacttgacactaggaatgggagtaggatttccagagcctaaaagagagtttgttttttttttctatccctaggctccttgtatgaatttataaataaatggttttttctatcaatagtatcaatttagctggtgcactttttttttttagtataaatcacattttgtttcctaaaatgaaaataattttgttttattctttatttcagggattgacagattttaaagcctgcaggcccagtcctgccagttgcctctttttgtaaataaagatttgattaggcctggtgcgatcgctcgcgctggtggtcccagcactttgggaggccaggctggtctcgaactcctcatgtgatccgcctgcctcacccctcaaagtgctgggattacaggtgtgagcaactgtgcccagccctgtaatctgcttttttaagaagtatttcattatttgtatttggattttgattgcttttgtattttctgcattggaggtctttctagaaaggggcttatgaaccgggttttcatgattagtcttaccagtcaagatttaaaaagaaaatccaggaataataaatgcttggtaatgaagatgctggttaacatttattgagcacttactatgtactagacaatttccactactttacgtgtatgaaattatttaattgctgtggcagctctgtgagtgtatactatgatttctgttttacaggtgaggaaactaaggcaaggagaaaaattaagtaactgttggaagtttatcagctagcaaatggtggagctaggatttgatttcatgcagtctgatttgagaaacccaaattcttaacaatatgctacagagcctctacttacattattgctcagtgtagaaagtttagacagtccagagatatactgtcatcccttggtgtctgtagggactgcttctaggacctttggtgaatatcaagatgcacagatgctcaaatctctgatataaatggcatagtatttgcatataacctgtgcatatcctcccaaatactttatatcatttctagattacttataatacctaatagaatataaatgctatgtaaatagttgttatactgtattgtttggggaataaagacaagaaaaaaaagtctgcatgtttcaaatacagatgctatattaaactttttggatccaagcttggttgaatccacagacataagagcccatggatatggagggccaactgtataatgtaaaaaaattccttctcatgcgctagtttccagttttcatcctttgtagataaccaggggcaacagtttgatataggtcttttcacctctctttgtgtgcatatacaagtaattatttgcagatttgtctgcatattcagaatttaaaaattacacttttttttagcagctttagatgtacagaaatttgagccgatagcacagaaagttcccatattcccttcccttccctcgtttctcctattgcaaacatcttgcattaatttggcacatttattgcatttgatgagcccatatcaatatgttgttatttattggtctatagtttacatagggcttattctttgtgttgcagtttttttttttttttgttttgtttttttaagatctcactctgtatctcaggctggagtgcactggtgccgtcatggctctgcagcctcgacctcccgggctcaagcgatcctcccaccttagcctcccagagtgttggggttacagacatgagccactgcacttggccgagagttattttttacaaaaatgggatcaagcccagtggtggcttgcgcctgtagttccagctacttgggaggttgaggtgggaggattgcttgaggctaggagtttgagaccagtctgggcaacacagcatgactctgaccagtctgggcaacacagcatgactctgtctctaaaaaaaaaaaaaaagtgggctgagggtggtggctaacgccggtaatccttgcactttgggaggccagggcaggtggatcacctgaggtcaggagttcgggaccagcctggccaacatgaatgaaaccccctctctacc

SEQ ID NO: 501 - DNA, 5633 bp, Homo sapiens
tgcgatgtttacaataagctcagatcaaaggatgcttacaaatagacagctaagtagacatttagtgggactctggacagctgataatgcaactgcaacaaacttgttgaaacgcattttgccgccaggcttgctggcatacttggaaagctcagatctcgtacctgagaaggatgctgatcggatgcatgttagagacaatgtgaaaatagcaatggatcagtatggaaaatttaataaagttccagagtggcaaagactagctggaaaagctgctaaagaagttgaaaaatttgccaaagaaaaagtggatcttgtattgatgcactggagggataggatgggcattgctcaaaaagagaatataaatcagaagccagtggttcttcgaaagagaaggcaaagaataaaaatagaagcaaattgggatctcttctattataggtttggtcaagaccatgccaggtcaaaccttatttggaatttcaaaacacgagaagaactgaaagatactcttgaatctgaaatgagagcatttaatattgacagagaacttggaagtgcaaatgtgatctcctggaaccaccatgagtttgaggttaaatatgagtgcctggcagaggaaattaaaataggagactattacctgagattactattggaggaagatgagaatgaagaaagtggatcaattaagagatcgtatgaatttttcaatgagctttatcatcgcttcttgctcaccccaaaagtaaacatgaagtgtttatgtttacaagcccttgctattgtttatggcagatgtcacgaagaaataggaccttttacagataccagatatatcattggaatgttagagaggtgcacagataaacttgaacgagataggttgattctcttccttaacaagttgatccttaataagaaaaatgttaaggatctcatggattcaaatggaataagaatccttgtggacttgcttacccttgcacatctccatgtaagccgagctacagtaccactgcaaagcaatgtaattgaagctgctccagatatgaaaagagagagtgaaaaggaatggtattttggcaacgcagacaaagaaaggagtggcccgtatggatttcatgagatgcaagaattgtggaccaaaggaatgttaaatgcaaaaaccagatgctgggctcaaggcatggatggatggcgaccacttcagtccataccccagcttaagtggtgtctcttagccagtggacaggctgtcctgaatgaaactgaccttgctacccttatattgaacatgttgatcacaatgtgtggatattttccaagcagggatcaagacaatgccatcattcggcctctacccaaagtgaaaagactgctgtcagatagcacttgccttccccatattattcagctactgctgacctttgaccctatccttgttgagaaggttgctattttgttataccatatcatgcaagataacccacagttaccccgcctttatctgagtggagtatttttctttatcatgatgtacacaggttccaatgtgcttcctgttgctcgatttttgaaatacacacatatcaaacaggctttcaagtcagaagagacaaaaggacaagatatttttcagagaagtatacttgggcacattctacctgaagcaatggtttgttacttagaaaattatgaacctgaaaagttttctgagatttttctaggagaatttgatactccagaagcaatctggagcagtgaaatgaggcgcctgatgatagagaagattgctgcccatctcgcggatttcacacctcgtcttcagagtaacgcaagagcactttatcagtattgccccattcctataatcaactatccacaactcgaaaatgaactattttgtaatatttattacctcaaacaactgtgtgatacactccggtttccagattggccaattaaagacccggttaagcttctaaaagatacccttgatgcctggaagaaagaagtagaaaagaagccacctatgatgtcaatagatgatgcttatgaagtgcttaatctgcctcaaggacagggaccgcatgatgagagcaagattaggaaagcttacttcagacttgcacaaaagtaccaccctgataagaatccagaagggagggacatgtttgaaaaagtaaataaagcatatgaatttttatgtaccaaatcagcaaaaatagtggatgggccagatccagagaatataattttaattctaaaaacacagagcatcctcttcaaccgtcataaagaagatttacagccttataaatatgcaggataccccatgcttattcggactataacaatggaaacttcagatgacctccttttctcaaaagaatcaccattgttgcctgcggctacagagctagctttccatactgtcaactgttcagccctcaatgctgaagagctcagaagagagaatggactagaggtgttacaagaggcatttagtcgctgtgtggctgtcttgactcgttctagtaaaccaagtgacatgtcagtacaggtgtgtggatacataagtaaatgctacagtgtggctgctcagtttgaggaatgccgagagaagatcacggaaatgcctagcatcatcaaggatctctgtcgggtactatattttggcaagagtattccccgcgtagctgctcttggggtagaatgtgtcagttcttttgctgtggatttctggctacagacacacctatttcaggctggaattttgtggtatctccttggttttctgtttaattatgactacacactagaagagagtggcattcagaaaagtgaagaaacaaaccagcaggaggtagcaaacagccttgccaaactgagtgtccatgctctgagtcgccttggagggtatttggctgaagaacaagcaactccagaaaatccaaccataaggaaaagcttagctggcatgctgacaccctatgttgctagaaaacttgctgtggctagtgtgactgagattttgaagatgcttaacagcaacacagaaagtccatatttgatatggaacaattctacaagagcataattacttgaatttcttgaatcccaacaagaaaacatgattaaaaaaggtgattgtgacaaaacttatggatcagaatttgtctacagtgatcatgccaaagaacttattgtaggggagatttttgttagggtgtataatgaagttcctactttccaactggaggttccaaaagcatttgctgcaagtctcttggattatataggctcgcaggcccaatacttgcacacattcatggccatcacacacgcggcaaaagtggagtcagagcaacatggagatcgcttaccgagagtagaaatggctttggaggctctgagaaatgtcataaaatacaatccaggttctgagagtgaatgcattgggcactttaagttgatattttctcttctccgagttcatggagctggtcaagtgcagcagttggctttagaggttgtgaatatagtgacatctaaccaagactgtgtcaacaatattgctgaatcaatggttttgtccagtttattggctcttctacattcattgccatcaagtcgtcagcttgttctggaaactctttatgctttgacatcgagtacaaaaataatcaaagaagcaatggcaaagggtgctttgatctatttactggatatgttctgcaattcaacacatccacaggttcgagcccaaacagcagaactttttgccaaaatgacagcagataaactgataggtccaaaggttcgaattacgttaatgaaatttctaccaagcgttttcatggatgctatgagagacaatcctgaagctgctgtacatatttttgaaggaactcatgaaaatcctgagttaatttggaatgataattccagagataaagtgtccacaacagttagggaaatgatgctagagcactttaaaaatcagcaggacaaccctgaggcaaactggaagttgcctgaagattttgctgtggtgtttggagaagcagagggtgaacttgctgttggaggagtcttcttgaggatctttattgcacaaccagcctgggttctaagaaagcctagagaatttcttattgccctgttagaaaaattaactgagctcctagagaagaacaatcctcatggagaaactctggaaaccttgacaatggcaacagtgtgtctcttcagcgcacaacctcagccggcagatcaggtcccgccattgggccatcttcccaaagttatccaggcaatgaatcataggaacaatgccattcctaagagtgccattcgggttatccatgccttgtctgaaaatgagctgtgtgttcgagccatggcatctttagaggccattggcccactgatgaatggaatgaaaaagcgagcagatactgttggtctagcctgtgaagcaattaatcgaatgtttcagaaggagcagagtgaattagtagcacaagccctgaaagcagatttggttccatacctcttaaaattactcgaaggcattggccttgaaaacctggacagcccagcagccactaaggctcagattgttaaagctctcaaggcaatgactcgaagtttgcagtatggagaacaggtgaatgaaatcctgtgccgttcttcagtctggagtgccttcaaagatcagaaacatgatttgttcatttctgagtcacaaacagcaggatacctcacaggacctggagttgctggctaccttaccgcaggtacatctacatcagtcatgtctaacctgccacctcctgtagaccatgaggcaggcgaccttggctatcagacttgaaatattcacgagagacaataaacgctgaaaggccagtgccaagtccacattcctccagctgatacgttgaagcaaactcttactgcctttctcctggtttcatgacagtgttattcctttttctataaatatatttttaggaaaaaaagtcagtgatcctaattgtatcacattataagaaagcactctgtggatcaacataagtgggtacacaagaatttttttttttcttggtgtatgtaagcacatttgttcctttatatctgtttacaaaactgtgaatcaaaaagacaaaactttcttcctagtttttgtaattttttttttgaactagcatgactgtagggttgagctacagtcaacaaaaattgggctaagtcacttttccccaggaaagaatatttccctctcctgcatcaagtctgcgtggccatcctccccccaccatccaagactattaggttttgtccctgcacccttcactggcatcctcaatcattaaccttctgaaagctcacagtacacattagtatgtataactggctttaccaaattgaatgaaaaggagcttgtgcaaaaaaatttaaaaatggatgtcaagatgttatgtaaaagatgagtgtaattgtgaaatgttctatacactatcaaatatataaagctttctatattgaatgtacattatacagatcattcatatgtgtacataaaattttaaaaataaagggaattgactgctttgttaatg

SEQ ID NO: 502 - DNA, 4449 bp, Homo sapiens
atgagcctttggaggaactagtaactggtaaaatacatctctggaagcattttaagtaagtgccccctctaggtagatagtgacctactgtggagtggagagaaccccctcacaggcacatgtgccccctgagagggcctttgtgcagtacacaacttcacaacggtatataatgaccctagatagatgaccagcagtgacagtgatacccattgctgcacatctgtattaatctctgtggtcccctcctctcttccccaggcctctctgctgatggtggtgccaagcgccaggagcacctatcccgattttccatgcctgacctcagcaaagactctggaatgaatgtgtctgagaagctgagcaacatgggcactcttaactcgtccatgcagttccggagcgcagagtcagttcgcagcctgctctctgcccagcagtaccaggagatggagggaaacctccaccagctcagcaaccccattggctacagagacctgcagtcccacggaaggatgcatcagagctttgattttgatggagggatggcgggcagcaagctgccagggcatgagggcgtgaggatccagcccatgagtgaacgcacccggagaagagctacttcacgcgacgacaaccgccgtttccgacctcacaggtccaggcgttcccgacgctctcgctccgacaacgccctccacctggccagcgaacgcgaggccatctcccggttaaaagataggccccctctgagagccagggaggactatgaccaatttatgcgccagcggagcttccaggagagcatggggcatgggtcccggagggacctgtacggccagtgccctaggactgtgtcggacctggctttgcagaatgcctttggggaccgctggggaccctacttcgccgagtatgattggtgttccacctgctcctcctcttcagagtctgacaacgagggctatttcctaggagaacccatcccccagccagcgcgcctgcgatacgtcacaagcgatgagctgctgcacaaatacagctcctacggcctccccaaatcttccacattaggtggcagaggacagttgcacagcaggaaaagacagaagagcaaaaactgtatcatttcttaatatgattgggatcagggaatgggagaagatgggagctaagaatgtaaagtcagaaacttgcactgttttaaatgttaaagcgcttttgggggtggcttatgggggagaaaagggaaaatgctgtcagtagatggaggcaaggttacaggttgactcaataggtagtcacagttcttggcatgttgaatattatttgcacatttcactttggaaacacagtagactctatcgaggccaggcttggtcacttccttcccatcagttctgtgttgagttgccatctctcaagatggtaaattgtttcctgctcgcttttatcctctctggttctcttacttttaggacccttttttcagtaagtaatttgtttattagccaggacccaagactaagttatttacatgtccattgtaaatgcaatgtaaatgagagttctgataaaatatttttgtattttgtaatatcaaaggaatttctatatcgtaggactcagtggggacttgcatgcacatccaccattgtctctgagtagtattgaaatgtggcccggtaccaccttttttttttttttttttttttctatacaaatttgttacatgtcagtgagacctttttcaaaggaacatattcaatttggctttttgtggctgaaaaaacataactgttagacccaaagcattttatgctccgttccatcttaaggagccatccttaagtctgctcccaccctcagtagaatttattttctacaaagtggtagtaatttttttttaaattgcaaatgtaatttttgccaattagagaaaccaaccggtgtcagtaaaattctgtgagaaatgccatccctgctgggaatgttgaagttacttaatgttgatctatcccttggggaaagtaaaagtgactgtgagtggtgccattgtgtgatgtcagcatgacgttgttttgaatgtggcattatgttctggtgctcatgtttcctggattgtattatctgctttcctttaccaaggcagacagaactgctgccttagcctgacaaccggttgtcctcaaagcaaatgaacttaagcatttgggattgagggacagaaggattctgagggggctctgcgagggacggtgtgtgacatgtcatgcctggagaaggaacaaggctatttgaaaacagaaggcaggtcaagggtagaagttaaaggagaatctgaaggcaggtcagggaaaagaagaactggaaatgaaacagaggacaggtgacaaccacctcgaagagctcccagagattgtagaaagagtccagtgtaaccagcttagtaaccagagtatctggattacccaggaaggttgagctgctgagatttcagtggtgcaatgtctttaaaaaaacaggctttgttgggagggtatttccattttgaactttgaggactgttggtcagaaaatgggctcaaaagtgagtttgcttaatgaagacatttaacggttgtgctgtttatagtaaaataaaactccctaccttgcttcagttaaaaatgaagcacttggtttcttccatcctcctcctccccttaatggattgtggcagttgaaataatccatcggaggacccacctgtagtgagatgtactgtcgatgtagtgcccggtgtatctcagtggccatctgccatggtgaggtgagcgtgatctcttttcagtatagtagttaacattttctagtattttttatggagagaatgtcaaaagtggcatttcagaccccgtcccagatgggtctgaggaaaggaaggctgtaaaggacatggtaatggcactccattcgggatgtattaaaataatttgcttttcaggtattaatatgacatttgtcattgtcactgatttttttaaaaaagcaatgcacatgttggttgtggctgttttccgcatgctatcttcatatctaaatgcttcattaattatccgagcctccggagaattaactctattacgtttgtatagtaagtttgtaaactgcttggcaaactgattaagaaataatttgcaataccgtgctactaaagtggcaggtttctggtagaaattgtgcgagtccaatttggagttttaagttccttgattgatgaaactaaaaaggcaattttggaaaaagagagggggaaaagtagatcacttatcttagcaaacggttgaaaatatgtctgtcctctgtggccccaaatccagtgaaagaaattctcccagtaaaagttgcttcctaactctgtttttctcagaatacctcttacctttctcaaagaaagcttcaaccaccatcatcagaaagaaggtggcctaaaaactgacacatggccagtgcccggaggggtctggaggcataagtctagatgcccagagagcatccaggcactgaactgctcagagcttgagatgaaatgacatacaagcttcagggtaaaactgtctactagcaagattacctccctcaattctaccattgcagatttcttctgaccccaaatgcaaccttacagagaatgctgaatgaggaaggccaattccttacaatgatggcagaacccccaagcgaatgccctattgaggagaaggacatcactgtatttggaattctgcctgctagtgatagctcacacatcacatcccagaatcccactcccaatgcattatttcctgaggcaagaacttaaggtcctcacctaattcctccatcacaaccattaactcttattggacaagctcctcctgtgagtggggcctgtactcacttcctcttagttcataattccatcttcaagagactgatttccagaatagtaatctttttccagcgttctctcttctccaatgccctggttgttatttttcccacctctcctaatattgatcttcttgtcttttggttagaactgcaacttcggagttgagttcatttcctattgctgctcaattcagtagcaacatagctggcttgttcccagacccaggaagtataagtcattgacagtttcctgagtggctctgccaatccataccacccttggtactgtgaaaaggcttcttggcagccaggtggcattgaggatggtattcagggcgctttccttctgtcatatagttgtgggatctctaccaagtgtgaaggtgaatgaggtaagggagatcagaaccatgcttcctggtttttcatacatccaaggaagaagtcctggtgtgggttgtttgacaccttctttccactttcaccttttattttttattccttcctttctacccccgaaaccagacgagctac

SEQ ID NO: 503 - DNA, 3449 bp, Homo sapiens
agctcctcagtagcagagagcagtagcccacttagaaatttcagttgtggctttgaaaggactacaaggaatgagaagctggcagcaaagactgatgaatttaacagaactgtatttagaacagatagaaattgtcaggcaatacagcaaaatcacagctgctcaaaatcatcggaggatctcaagccctgtgatacctcatctactcacacaggaatccatgtcagtgaacgcctcacatggaaaaggattttcccgacctgctagaccagcaaatcgtcgtctcccctccagatgggcatccagatctccatctgcaccccctgccttgcggagaactacccacaactataccatttctctgcgatccgaagcattgatggtttaagtctttggcctggattgctatattacagaagttctagtcccacttgtcaaacagagcattctgagtgtttacaggcggacctgttctcttccgacaagcaatttgaatcttaactttccatcagtcttcagtgtttttaatctaaggaataattatcttcctgcattttgatttcttagatcagaattttttaatgccatcctcattagttttccaatacaatataagttgaaacaatgtacaatattgtatattctttgttgcaagtggcagaaagtaaggttatgtgcatggccatgtgtttgtaggtgcatgtgttgaaataggaagtatcctagtatgtatttagatatgaaaaacttatgtgctagtgttgactttgaaattataacatgtatacctatatattctttgtgtttatttaaaagttttgaaaatatgcagtactgtttatattttgtataccttttaataggtatccacttaaggcatttgcagtacaaatattaattgaccacttccttggcccccagctacaatgaaaaagaagaattatgcacacatctaacattggtagatttctaaagacaactcataaataatttcttaacccatataaggataaaataataccattgatattcttgtttattctttttaaataaaaatgtcacaagtttaatagatcagccttgtaaagcaagcataaaatgttcataaatgttttatatattatttggtagtctagtatggctttaactgaatatttgatcctcagagacagtatcatgagactgcattataaatgacatgattaaatgatgaatttattttgtcagcctcagcaacaaacatttcctaaatgggatgcaaaaagaaactgaatgatgttgaattttagtttttctttaagttgtggtaagcttttagtttagctgctttaacatggagtcatacatacttagaggtaagtcatttattatttttttcctttttctaatcttttccttaaaattaatagataacaaactaagttacttttttactaacaaggaagatcaggaataatatttctttgaaagctgaaattatacttctcacagtttgctaccaaaaaaaggcttaaactaaaccttgacatccacagtagcatcaggaatagaaatgtatattttggctacagtttgcatacagtgaacacataaaatctatattgaaaactgacagaaatatgaatgtcgaggggcttggaattctaaatggaagattttagaaggaactttgctctctactgtcactatataaaaccaattatgttatgttattagatattaactctatttaagcttttcttttactaagaaattcttatgccaaatgtattccaagagccatctccttatgatgtatttgaaccatttagagaaattcacttcattgtaccccatgacctgaggtaaagaaaataattttcaaattgcagacttccttgaaaggctcaagactgtagcatggtgatgtctagattcatactttactgtaaggacagtttcggtagttaagtggaattaaaggtctagagtgatttgtattggatggtaactaaggtctatacatctactcttttaattcttatttccttcaggaagatccttttccacaggaagctatcaaagaaaagtaaactagacaccaagtaatatcactctcataatatgctttccagctagaggggagaaaacaccaggaaagaggaaccctgggtcataaaatgacggacctgttaggaaaatgctgttgtgtgacaatggagagcctgcccaaggactgtgcaacctatctgttcctctccaccagtgtatcccaagtagtctggtatgatctgtggttccttagaatatcgaggatctctttaaaaaatgaaatttctgatctcaccccatattactaaagcaaaatttccaggggtagggactgggactccagaaccattaataaaacaaaacaaaacaaagcaaaatattgatgatcaggcagatttgaaaacagtgacattgcttgatctctgaatggatggatgcccttgggtggtcacttttcttcctaggacttgcctttgttatctgtaaattagaatggctatactttcagacttcacaattttaagccacttttttctattaacagttgaatgaaccagtgggacacattttaacgtcttcttatgttgactaaaattatagttagagctgagaaaaaaaaaatagcatctagtccaactccttgattgtaaaactgaaaaactaaggttatttgaatgttctgttttctctttttaaatattttataacttttaaatggaaaaacctattaggtaaatggaaataatccttgaaaatagtttttgatgttttgtgatttttaactggtaaatttctactttaggtgggcattttcttccctagaatatgccctttattatgctatcattgctagatttaaagggacttgtaagcatttctggaaatatttgatttaaaaacatatattaatagatgttttccctagcagacttttggagcaaaaatattattttagttcagcagaggattactgatattatgggctgatctcagaaaggaataaggatgaggcagagaggagtacttgagtttgtgtgtgtgtgtgtgtgtgtgtgtttgtgtcagtgtcacataagttctccatattgccttatgtcccaaagccaaatataaaaatataaatgatgctttgtataattcattttatcaaaaattacccataactttcatttgtttttatatcgacaatgaagatgatcatatttcattttgcagatgtggccataaaatattatttacttctacataggtgattttaccaggtttagttatcctgagaaaacatctggacttaagagtttctgcttccctacaaagatctttaaagttatttttaggcacatttgtgacaaacaactacttgatattgaaatctccttcagccattagaagctatcaaataaagtaggtgtaaaaac

SEQ ID NO: 504 - DNA, 3394 bp, Homo sapiens
atgcaatatatgtggtcttggtgtctggcttctcacttagcatcatgtttccaaggttcatcagcacttcgttgttttttattaccaaattgtattccactgtattgatatacaattggttctccttatttttgggagttctgttctgtaaagtcaccgcaaacattgaattagcaaacattgaaccactacccctacaggaaatagagttaggttcctgcaagcctctggtcacatttttgcctactgatcgatatgtaatcttgttttatgtgtatttctgtttaaagacaactaatttgatatataatgtgtctatatatttatatacgtatgtgcatatgtatatatgtataatatgtgcatatatatatagttggttcattaacattgaagttatggccaacagcatttcaactcatatttcagagggtggaggtttgtggggaggagtgttttcctggagagcctctcaacatagatacacttgtgtggacctaaaatcacccaagctaggagggccagcccatcctggtctgccctgggctgagggctttcccaggagagtgaactttcagtgctaaagccagacagggacagctgctcaccctacctgcctcctaacatctatccacgggttctgcatccaccctttggagtggcacaaaacaaagatgatcccctctttccccaagtagactctgagtgaagacacatcttagatccacttctcaggctcaatatcctcaatttcttggacctccttcatattgtgcgaggtggcagaggctgcttgctgatcaccaggctcctctcctcttctgcactttccagcctctctcgcaggtaggagtggccacaggagttctagaatgtgagcagaaggcatgtggccacttccaggccctgcctatacacaccttccactcacagtcctccatgctcttgcacaagagggaagctgccctgggtcactgctaggggagggctgacctccactcaggagcccctcctaggtgagcaagccataagcggttgtgctgggtctctgtggttaggggcttacctgtcacagcagctccaatcactttgactggctcacatgacgcaaagctcttttgtgaccagctcactcctctgcacacattcctgcctgtctagactccttttttggagtccaggtgtggtccgtgtgtccaaggctgaggccaatgctctccctcttcccacacctatctctaggggtgttgggtaagattgcattaactgggggagccccaccccgtggctgccccacatgaaacactgttaaacagccctcccaagccgttttcacccataccactgcaaagtcacgttttccccatcctctgcagctgggggcttgggaacacaataattagctttattgtgaaaatcacccatcaccgtagctcactgaggtcctctggatcctgattctgtccactgtgccttgagtcttcggccattcactggtgtctccactctccactgccttactcacaagcatgatcactatactaacaacagccagcactccacaataaactctaagtgcttcctgagtctcaactcttaatcttctcaacaattctcacgtagaaactattatgatccccactgtatagaggagtaaactgaggcacagtcaataacttgctccaggacaattagctagtaagtgacagagctggacttaaacccagcaatttgatgtcagtcatattgttaactatcaggctaatatgttgtctacacctggatcatgtctgaattcagttgttgcagacacaaatagagaacacagatgtgctccgggcagctgggccctctgcttggagacgcctgcagttaacacccctctgcttatagagcatgtttcaggcgtacttgttcaactggtcactcagcctcaacagcctccaagctgtttcatcattttatctgtgaggatttcaaaggaaaccaggagccgagcgcccagaaagaaaagaagaccggaatcagagagcgttctgcaagttcgcaagttcaagggcccagaggcacagtagcccagaagcctcaaggactttccaccaaaactcacaggtacaaccttgaaaacacaagaaaagaaaacaagaacttgccttcttgggcaaggggagttgaaagaggccaggcccagaactccagagatgaaatgggagcagctgcagcctggctgttattccaagcgtgtcgtgctgagaagtaaggggagtgtgtgctcatcactgtctgtggtgtggactcaggacgcgccccctggaagcatcgattcggcccgagtcgcttgctgaaggtgtgctctgcggaggggctgcccacccagcctctctatattgaccattttcctgctttatgcaaagtaattggccaagcattgtacaaaagaaggataattaatacactggtttaacccttgatgaaattattttcttttcaccgtccagcctgagtgttgagagagatgaaatagaaagttgagagccggagaaggatgcctctcccctccagtgggggcagctggatggtgggcaggttaccctggtgtgtcccaagccctcggccacacacagctcatgctcattcctatcaagggaagaactgctttcagcaagctaaggctggcttgaaagtggtccaagatctagaatgtccatccctttgttaaaaatcttcctcgaacttcctgtcccttgtcccccccatccagacaaccaggaggcagacataggatcagagcctggcagggacaaggcacctactctgaggatagacaaggaacacctgagtttctaacaggccaggggtgggtttcaatagcgaacaggctgcaaataacaacaagtcctgctaaaaagcactggaagttgaatcaacttcactttgcatattccatcctgaattatatgagtacacacacacacacacacacacacacacacacggggggggttgggaggggagagagagagaaagagaaaaagagattaagatttcatgtgtttctaacctacaggatttctctaaacatgctgtgcaggtcatccagcaatggagaatatagaaaacttccagagatagagaagcccttctgcttccagccccctgataaggtataagagagacagatttttaataatgtatatccaaataggagagaaaaagattctgaaactctaaccttgagacgactctaaccctacatatgatatatgaccagcagccacatgttttccatcattttaaaatagacttttatgtattttagaaatgttttccataagcatgtatttcttcaacaatcacaaaacattaaatttataataaaacgaatatgaagatg

SEQ ID NO: 505 - DNA, 5153 bp, Homo sapiens
ggggcctgagccgaagctgggtgggcatctgggagctagattcaataaagctgttctgaccatgaacttggaactggcccctttcattctggaagcccagggactgggctctggggcgcgtctgctgcgggacagtgtggaggcccctggccacgagctgttccaggtcatgagacttgtctgctcacgcctcccggtgcctccagagtcctcagttggctccgtgctgtaccctgagctcaggatcccaggcccagcccgttctctgccctctcgtgctgcctttgagccaggcgggctgaacaccgggacccaggcccggtggagaggtccccacggggcagccaccaaggccccaggtcagcagctcagagcactgccaagtcctggctcctgaggccacctccgtgccttaagtgccttgaccaaagtctggacgtgcctgtccttccgtcctccctcaggacagtttccagggcacccgtaattcctctgacagactgccatcccaaaagtgcacccattctcctgggaggcctcaggccctcgtctagcagctgccgtaggctgggcccagtgatcccgccctgggcatgtggggtgggcttgttcatgcctggcccagcaccgagagcccctggtggggaggggctgatacagctgggcccacacctcccccacccaagtgcccatcctcgcccctcctgttgacccaggccacaatcttggcccagattcccccctgtgccctcctggcctgccttggttctgcaggcaaccccagccctgcatggccacgtctgggcagaccggcacccctaccctgacacccatctgtgccagtcctgcacggcaaacacctcagagcccaggcctgcctaccctcccggagctgctgccaccctgtgggccaagggcaaagggacgtggaggaggggcccaagggcagggagggcttcctaaagcagggaccatctgagctgggtcttgacagctgcataggagttcgcagctggagatgagtgacgtgccccatggtcccttctcccatcatcctctggggccagagtgggtgacacatgggcactgtccaaatccccttcttcaccccataattagtcagcagccacatctggccacttctgtcctctaaacaccatttccatccctccccactcccactgccaggcctcagagtctcagagcagccccctctgtctccggagcagatctctgctgacacccttgcctgcactgcctcccagcacccctccctcatgcctgtgttcacctccaccaggactctcctgctcaccacggctcccccacccctcagtccacggctcagacccatctctggccaccgcagcccctgtctgtgtctgaacagactgtgaacgtcccgaggagccagcctctcctcccagcccccatactgtgtagttggagcagggtttggccctgcagagctcaaggcctggtcggggagctgccagggacacacagtggccatgtgttggggtcaacatcacagtggagcagcccaagggctggggaaccctaaggatccctggacccagccctgcagtcagaggcggcttcctggaggaggtgatgcctggctcaccccacttccctccctaccctccagctgaccaaaaccttccctgctgactggccgtccctagagatggggttgccaaaactcgcccaaaatataggatgagggcagcctgtggaagttctgggggtgacaggcctagattggtcactctgctcaccaaacctgtttcccatctcgcagtggggtcaccgtagcttccacctcccagggcgcccatgaggatttaagctgataccagatcagagtgcccagggatgtggatgagttgccttgagaacaaagtccagggaggaaagccggggaccaaggaccttcaggatggccccagcttcccgggctgtgcgggagccacgtgccacggacccctcccagctcaggcagtaccgccagagcacagccttgccctacagaagaaaggtcggcgtggccctgtcctccgaggagatgagggctcagagagactcgagggggctcctgggctgtccagagtgggccctttgagagacccctgggccctaaggttcaagtaggccaccgctgaccttggccttcctaggagggatgcaaagccagcccaccacttgaacccggcagcctgagcaccgagggacagggccgccatccagggccagggctaggacaaggccagcaaggtggcagacacggagcatctcggccggggggcctttcttgggtcacacatcagcacggggcacagaggtgagagcccagaaagagtcttgtttccatttcttttaaaacgggaagggaaaatgacccctccaatactgaatatataatgtataatgagtatattatagactggtgtagatgatggggtgaatatagcgcgaacccagcctgggttctgggtgtcttaccaccccagtcatgggtgcggtttgtgattttgttgtgaattgtggaggaagggcccaggagggccacatgccctgccagggaagccatagagagccctgccccgggaggtcagtgcctccttcaatgcctgcgatccctcaccctgccctgcttcccccaccatccgccccgcctgggcagcctgggccactgcccgccagccacccccgccttcggactgtgcatttcccgacagcgacaccgtgtggcagcagcccccacctccgaggccagccccgcctgcaccccccccacctccgaggccaaagctgtgaatagggtgaccccttctgggctgtggaagcctcgggtttgaggacaatcctggggagggaccccagggcgcttcccgctctcctggcgtgtgtgtgtttgcgggggaggtgtgggggcctctgtacccatcacagccacgtgccgggaccgccggccatcgtcccgagccagcgacatgcctggcagcctcccgcccacctacgccccgctcaccaccaaggagctgtcagcatcactgcccccaacggcatctggcaaaactgttgggggtgagccagagggagcacccccgtccccaacagcgctgagttgagagccacatctgtctccaggcactgccaccagcaggaagggaggccaccctgagcctgggaagactccggagctgggttatctgaaggccgggagttcaggtggccccaggcagaagaggtggcacagtgaaggtccacacatgggaggcgggcggagtggctgagcctgaaagttggcatctgggcccaccaaggacaggcctgccatgtttgagccctgagctgagcctccccagagcctggggggaggctggagccccagtgaagggcctcagatgccaaggagggaggtcaggccctagggctaagcccctggcacagactcatacccacacagtggcatttagtgaaatgggctcctctgacgttgcctcctgaaacaggcagggtcggaggggtcaggtctgatgaggcctgggggcatccctgtgccagctgggtgaacatggctggtcactgtcccattctgagttcagcctctttctagaacaagaagagaggtggcaccagccaggtcgcacatctcagatatcggacaactggggagctgaggtggaccaggaaggggaaggctttcaggtctggcttgctcaagggactcagctcctaccccggccccagctgttgctgagcctgagggcaggtggtgctgccaggtgccttgtgttggcctccctgcatgcgtcctgcctggtggcccaagttcggcatccacacttatgccagccagtgccctataccaccctcacccttccaaggctcccacagccttcagggctgcccagtgtgagagctgctgtgagtctatatgggtagcttggtttctctgattgggagcagcttccccagggctgggagcaggacccagacagttgctgtaaatgctggtgtgtcggcccctctggtgctgcattggtgacatccagggcccgatctgcttcccgacagtccccagagggccgccatcctcagcccatttcatgaatgtggagacagaggctcagagaggtagagtgactttcccaaggccacacagcaggccgggtacagctggaatgggcggccagctctgtccaccccatgatctgtggctgtcttgccttccaggctgcctggggttgggagagtaatggtggcataggggacaacaggttgtgttctggggtcccttccctggggccaaggaactgggccaggcccagggccctgccaggtacctcgcttccagccttgtccctgaaggtcctcatgcaggagaaaagcagccacctgcacaccgctgtccggcctccccagaaggaatgcgctcccccctcagacttgacctgggttcaaacatggcgggcctgtccttggtgggcccggatgccaactttcacccctctcaaatcctgggcatccaggctttgtctccagccaagccccaggcaggcagcactgcctggacaggcaagcaagacatactggccctcctgcagtccccggaaataaaacagagaagagcagcccttcctcaagaaggcctcaccccgtccctcccctcttctctcccctcttctacccctctccccttccctctacatcacagacccaacagcctctctcgccaagcccatccaccctccttcctcccgctcagcctccagggcttctgcccatttcctgggtcagccccacacaagtcctggccccgagtaaagataccatatccaggcaggcgctgtggctcccgcctgtaatcccagcacactgggaggctgaggcaggcacagcgcttgagcccaggagttcaagaccagcctggacaacatggcaaaatcccatctctacaaaaaaatacaaaaattaactgagtttggtggctcacgcctgtggtcccagctactcgagaggctgaagtgggaggatcacctgagccttgggaggtcaagactgcagtgagcccagatcgtgccactgcactccagcctgggtgacaagagtgagaccctgtctcaacaaataaataaataagtaat

SEQ ID NO: 506 - DNA, 4711 bp, Homo sapiens
tttattccccaattccaagctcttttccctcaattttaagaatctttctatatcacttgcattaaatttcacaactacattatcaacccattaaaatgtgactcttaagtttgtctagattcaatgcataccactatttcttgcatttccctaaaaaagctgccttagatcctctctggaacaaagcagggggtaaatgaccagatagaaggatggatggatgatagattattcattttgctttccccagtcagaattaagccctcccatggccccttgctgggctttctgtcaaaacacgtgcatcgcatcttttcagtatctgttttgcgtgtcggtcatactcacccctctgagtgctcattctctcgcctataaaatagaagaagtagtagaggtggcctgtaaggcattggggaggaggaactgccctttcactggcctcatgacagccccagccagcacccccgctctagttccacccacagaagcaagtctcacccctaccccccaggtctctccacttcctgctagagaatcacccagctccccagcctggcttgaggctcttttcagccttagctggctccccgcagctaagagccccatgctccatttgggcctccagtgtcacagggtttgacctgctgttactactacctttgtcataggggcaggtagtgggcggacatgatctagagtaccccacagagtcaggagcccccatgatctgagatagaccctagagctgagcctgaaattgggtgggcactgagggggcagcgatgtttgctgagggagaggttctggtgagagactaaatgaatgagcgagtgaggtaatggataaataaagataagaatgaaaaaatggtaagatgattaaattggtgactgaatgtaagggtaaattaatggaagaatggattcatggattaaataattaatggggaaattaatgaatgagagaatgaacgagtggttgaatggggaaatgagtggtagaggaaactggcaactgttgggttgggggtgtctatggggattgacttctccaactctcttacctctttttcttctgcccccagtgtcctctatttctccatccaccgctacgagcagggtaggttctggccccacctgaaggcctctaactggtccaccacaggtttcggccaaggccaaggatataccatcaatgtgccttggaaccaggtggggatgcgggatgctgactacattgctgctttcctgcacgtcctgctgccagtcgccctcgaggtcctggggatctggggtgtgttgggaggaggagtggccttgaaggttaggctgtgagggtaggtagcctcatggagtctgttcccccttcagttccagcctcagctggtcctggtggctgctggatttgatgccctgcaaggggaccccaagggtgagatggccgccactccggcagggttcgcccagctaacccacctgctcatgggtctggcaggaggcaagctgatcctgtctctggaggtgagtgactcaccttcgtccctcagcctgtggatcctggagggcttaagaacgaagctttcaagtccaacaggagttcctggcccaggaattcacttactagctggacaaccttgcataagtcacttcacttctttgtgcctccgctttccttctataaaacgagcataatgtaatcacctcatatcattgtccagtgaattcagtgaggcacccttctaagttccttgttgcttgacatgtggtatgcactctcttattatcatcattattattattccctggtcatgtctggtcctttcctgatcccccttcacaactccttgccccagggtggctacaacctccgcgccctggctgaaggcgtcagtgcttcgctccacacccttctgggagacccttgccccatgctggagtcacctggtgccccctgccggagtgcccaggcttcagtttcctgtgctctggaagcccttgagcccttctgggaggttcttgtgagatcaactgagaccgtggagagggacaacatggaggaggacaatgtagaggagagcgaggaggaaggaccctgggagccccctgtgctcccaatcctgacatggccagtgctacagtctcgcacagggctggtctatgaccaaaatatgatgaatcactgcaacttgtgggacagccaccaccctgaggtaccccagcgcatcttgcggatcatgtgccgtctggaggagctgggccttgccgggcgctgcctcaccctgacaccgcgccctgccacagaggctgagctgctcacctgtcacagtgctgagtacgtgggtcatctccgggccacagagaaaatgaaaacccgggagctgcaccgtgagagttccaactttgactccatctatatctgccccagtaccttcgcctgtgcacagcttgccactggcgctgcctgccgcctggtggaggctgtgctctcaggagaggttctgaatggtgctgctgtggtgcgtcccccaggacaccacgcagagcaggatgcagcttgcggtttttgctttttcaactctgtggctgtggctgctcgccatgcccagactatcagtgggcatgccctacggatcctgattgtggattgggatgtccaccacggtaatggaactcagcacatgtttgaggatgaccccaatgtgctatatgtgtccctgcaccgctatgatcatggcaccttcttccccatgggggatgagggtgccagcagccagatcggccgggctgcgggcacaggcttcaccgtcaacgtggcatggaacgggccccgcatgggtgatgctgactacctagctgcctggcatcgcctggtgcttcccattgcctacgagtttaacccagaactggtgctggtctcagctggctttgatgctgcacggggggatccgctggggggctgccaggtgtcacctgagggttatgcccacctcacccacctgctgatgggccttgccagtggccgcattatccttatcctagagggtggctataacctgacatccatctcagagtccatggctgcctgcactcgctccctccttggagacccaccacccctgctgaccctgccacggcccccactatcaggggccctggcctcaatcactgagaccatccaagtccatcgcagatactggcgcagcttacgggtcatgaaggtagaagacagagaaggaccctccagttctaagttggtcaccaagaaggcaccccaaccagccaaacctaggttagctgagcggatgaccacacgagaaaagaaggttctggaagcaggcatggggaaagtcacctcggcatcatttggggaagagtccactccaggccagactaactcagagacagctgtggtggccctcactcaggaccagccctcagaggcagccacagggggagccactctggcccagaccatttctgaggcagccattgggggagccatgctgggccagaccacctcagaggaggctgtcgggggagccacccggaccagaccacctcagaggagactgtgggaggagccattctggaccagaccacctcagaggatgctgttgggggagccacgctgggccagactacctcagaggaggctgtaggaggagctacactggcccagaccacctcggaggcagccatggagggagccacactggaccagactacgtcagaggaggctccagggggcaccgagctgatccaaactcctctagcctcgagcacagaccaccagacccccccaacctcacctgtgcagggaactacaccccagatatctcccagtacactgattgggagtctcgggaccttggagctaggcagcgaatctcagggggcctcagaatctcaggccccaggagaggagaacctactaggagaggcagctggaggtcaggacatggctgattcgatgctgatgcagggatctaggggcctcactgatcaggccatattttatgctgtgacaccactgccctggtgtccccatttggtggcagtatgccccatacctgcagcaggcctagacgtgacccaaccttgtggggactgtggaacaatccaagagaattgggtgtgtctctcttgctatcaggtctactgtggtcgttacatcaatggccacatgctccaacaccatggaaattctggacacccgctggtcctcagctacatcgacctgtcagcctggtgttactactgtcaggcctatgtccaccaccaggctctcctagatgtgaagaacatcgcccaccagaacaagtttggggaggatatgccccacccacactaagccccagaatacggtccctcttcaccttctgaggcccacgatagaccagctgtagctcattccagcctgtaccttggatgaggggtagcctcccactgcatcccatcctgaatatcctttgcaactccccaagagtgcttatttaagtgttaatacttttaagagaactgcgacgattaattgtggatctccccctgcccattgcctgcttgaggggcaccactactccagcccagaaggaaaggggggcagctcagtggccccaagagggagctgatatcatgaggataacattggcgggaggggagttaactggcaggcatggcaaggttgcatatgtaataaagtacaagctgtt

SEQ ID NO: 507 - DNA, 3755 bp, Homo sapiens
tatgatgtcagcccattccttaaaaactcttacatgggctgggcacctgtaatcccagcactttgggaggctgaggtgggcggattacttgaggccaggagttcgggatcagcctggccggcatggtgaaaccccatctctactaaaaagacaaatggccaggcatggtggcacacacctgtggtcccagctactcgggaggctgaggcaggagaatcgcctgagcttgggaggcggaggttgcagtgagctgagatcgtgccactgcactccagcctgggtgacagagcgagaccctgttttaaaaaacaaaaaacaaacaaaaaaacaattcttacgtggttcctcattatcgtcatgcaatagggtacataagcctcttcatagcctagcctgtccctacaattccagcttcactccttgctactccccctcatatctggccatccaccattttgaactggtcagcatagtgtaatgtagtcaacacgtgcaaagacttcagaatcaaaggcctgggtgtgaaccagttctctccacttacttaaccacattatcttgaaaaaatttaattcatctttcagagcccctgtttcatcatctgtaaaactgggataacaatacttctaagatcattgataggattactttggttatttaaaaagcattcctgtgccattactagtaatatttatcattttaaatgatgacaattattactttcctcagaaagcttctccgccctccccacattatggaaggtgcccttatagctcctgtgcttatctcctaacagtgtaaattcctgttgaatgttcatctctaccactgagcgtgagctcttggaaaacaggaccattgtttctcgttcaacttggttaactgcaaaacattgatgataaccaggaaatgcttgttggttgaaaggaaaagaagaaagaagtaaagcaataagcaaggtgctgtgggggccatgaacatggcaaaggcaaagcccctaccatccagatgtagaacctgtagctggacagacaaattgcagattgctatctttgagtctcctgtaaggatgaagtatatttatgagaggggaaaaagaactttaaaaaaacttattttttccttattgtgggctatatcatacatacaggaatgcataaaagtagtatgtagagtttgaggaataaaatgaacactcatgtaaccaccatgcaggaaaagaaatagaagagagttgcagaagctccaccctccccatatgtctcccctgtcacagcttccttcctctccccaagaagtaactcatgtcctggatttcgtgataatcatttccttgcttctctttatgactttattgcctatgtatggatccctaaccaatatagctttgtttttgaaccttatataaactgaaccatactgtattcatattcttgagactggcttgtgtctctcaagtttgtgaaattaatccatgttgttgaagatagctgtggttctttttcttttaattactatagtattccattatatgactatgtcacaatttatccatctattgctaatggacatacaggatttttccagttggggaacgacaaacagtgcttccgttaatattgttgtatccattttctccactatctgaacatgcagcattctttttgttgatattgttgagaattcactctacctctggaagcagtgaaagccctaggggaagaaaaattcaaactagtttgcacaaagaagatttaaataggtagacaagagtctcaaagtgtgcttgtaaatgtgtgtttgaaaactttgtgtttctcaaagtgtgctccaagatggcccacaacaaaatcatgtggagaatttgttaaatatacagattaaagacccagcccaaacccaccaaccaagaccctctgcagttatggcctggaaagctgtgttttagcaagcttaccaccgcccgccccccacatgactcatgtagatcaccaaccctctaccttttttttttccttttttcgtttgttagcatttagttaagctccctccttgtggcttgaagccaccagaacacagcctccctacctccccccacatatacacccttaatcttctcccagctctcctgccgaagaacttggccttcgtgacagcaggctactttgggagtttcccttcctcagaattctgcagtagcccatagcactccatcaatgatgggagcagctccagcctgttttatttattattatttttttttgtcagcgtgtgattactcatgtctcctgactgaccaaggtccacatttgtcaaggtcaagagttgggcagaagctctggtttctctttaagaggtaatgcctcataaccaactttaccaaagtaacctgggtgacactcatggaagttgatgcataccaccagcatttccctggcctcccaggtgcttcccgtgcttggccaggcctttactttctgtagatgatacaggtgtaatggaacaaatctcagcggtgggtgcgttaggagaggagaaggggcagtactttcgtgcccagaaaatcagcttcccttcatatgtcctccttgggctagcatgccaacagtctccaagcggactctaccttagcacacctacacactgcggtcctagtcttttgctttcttctccacatctctctccctcatccctcaatctctcccctattcccaaatgctgcagaacactcagaagtctcattttaagtaactccgaagtctttccatgacccctagcaatgttttacctaaataggcacttattgttttaaatagactttcctttttagagaagtcttagcttcactgcagaattgggcatagagttcccatatactagttacactgctctaaaaatcctgtgctctacctactcatcccaccccccaccgccctctgttcatcgatcattgatctttttaaacctgcctccagttttgacttttccagaatgtcatataattggaaccatacaatatgtaccctcttcagaggagcttgtatcactgagtaatatatatttaagtttagtgctgaataatattcccctgtccatctggatatatcagtttatccatccattaaaatactgaagatcatcctgggtgcttccaagttttgtcaattatgcatgaggttgctgtcaacatccatatgcaggtttttgggtagatgttcaggtttcagctcatttgggtaaacaccaagaagtgcaattgctaaaaagtatggtaagagtatgttcagtttaagaaactgcagtgtcttctgaagtgggtgtaccatttcgtgttcccacaagcaatgagtgagagttcctattgctccatgtcctcaccagcatttggcggtgtcagtgctttggattttggctattctaatagatgtgtagtggtacttcattgtttttttaattgagacacctagttttaaaactactcttcacttttttctctgtgttttggggggggtcttgtgttttaaaattttgcagagcaaattatgagcaagtgatagtgttctttcattattaaacatgatttacagatatttcagactaactctctttttttccttttaaatatagataaatgcagagggaacaccagaggacgtttttcttcaactctgcacagctattgactctattttctgaaggcaaaaatgcatgtttgttagaatggaaacagaaaaacattaaaaagttcattcctt

SEQ ID NO: 508 - DNA, 4518 bp, Homo sapiens
ctattctttttttcttccgactggtgtggatcccagacaatttcagggtcctgcagggtttgagaccctctgtgaacactgacccgggaccccgttttgcccatgggaagttgaagccagcgcagcccccggccaggggcactgtctcctcggccccgggatgctggacggaggggacaacgtgcaggggcagctgctgctgggctgtggacctcccggaaccggaggagcctgggaggggctggcccagcagtgagggctccgatgcgcctcaattcatatgctaaggagccctggattcggctttaattgccggagtgggaggtgaccccaggggcccaagctgggggcgtggctgggaaatgcacagaaagagacttcgacgggggtggctatggtttgtgctgtgctgtgcacacgtctggctgatagaaatctatgtctataaacagttccttccaggtctccgcggaaaactgaagattcctgtgtgctttcagaaaagaggttccaaggaaaagggcagccatttagttttcacaagtctgggcagtgagcgatttggagcttccatccttggctgacatcatgaacaccaatgttgctggcctcgatcgcaagaagggtgggacttcgtgcttagccttcctggggaagggcctgtccctgggtcacgtccccagtgaccacaggaggaagagaagggatgaggatcctggggggcctggctctgcgtccacccgtctctgtgtggatgcctcctgtgtccagggtgataaccggtcacccgactgtgtccttggggtcattcctggcttctcctgccgcttgatcacccctctggctgcagggagcccaggacggagaaggagagacctcattctccctggggaatgcaggctgagaccacccatgcttctggagcagggtttcatgtgggggaggtccctccagggagggacagtgaactgacgctgtgatattgctcaggatggaggcccagggcagacggcgtcaccagctgccgcagaagccaggttgccagaggggctgtgtcaccagccctggggacgccatgttgctgtgcgtttcgacacattcctgtggagtgtctgaggaaaaacagggcacacgcattcctgataagattgcaccaaaaggccagggtgggggaccaggctcccagcctccctctgtctcagttgggggccgaggggcagggacagccaggagaaggcccagccagatgctgctggcttcccccaggactctgcccgactggcctctcggttaaacctcctcacctgagcctctcttatggcgtggttgagtcacacatgagagggttttgtctgccgggaggggctcttcttatgggacaacaggggcgcgaggtgtgtggtgtggctctcagggatgtgtctggactctatcacgtctgagtgtccctggggccagagtgctgggggcaggagcctgtggtttatcaagcaccttctgccagctgaggccgtgactttttgtccctcactggaggaggcttcaaggtcagcctcttcttcctttggtcccaagcttgccgtgtctcctcctcattccccacgtccacatgagaaggcagtgttcacaggtgggttggtctgagattgaaatcgcaaggccaggattttctgtctgggcagccccctcgagtcagcctcagaggagcccagacctcttggatggctttcggcgagcctcccagtgggcacagcactcgccaccggacactgcatggactcagcttccacactgcgatgggtatggcctggtccttgcactaccaggggcaaggaggaacgctatgcctggtgggggtgagcaccccatctcatgacaaagcagttctccagggtctgccccacttttctgtaaacctgggggtccagcccagtgcattggctggaaggagaggggacgcctcctgtcccagctcatggcgctctgccgaccccactgtcagccccaaccttggtgctccggggggccccaatgccatagatgcacttcatggggagcaactggggctgttcctgaggaccaagatgggcagagaccctaaagacgtccatggattgacccctgctctctgtggcccctgcctggctggcctcccctcctcacactctccacagttctcatgcaacacagcgcctctaaaaatgctgtcctgaaaatgtgcgctttggggaagagcagcttcctcctcttcgaccaagttcgggtcccttctacccttcagtggctgtaggcagtcggtgagggtcctggacggggtgggccgggggcagggaggggcactgtgggctttggttgctcaggggtcctggcagacacaccaacctggtgtgtttggaaatgcacctggatgtgtgctgacctctgtgtggaggaccacgggtctgttcatcccccactggctgcacccccgggaggctgcagcgtgcactattcggtccctacgctgcagttattcttgtatctgccttgtcgctggccttgctgcccatgactccctcaggtcagcccacgtctctgtcaaactttcatcctccgcaattctgcgcagcctgtaaatgcttaaaaaatattgcggaacaggtgagtcacattacagaaaggacgcaacctggaaaagcacagacattccttccccttctgcacctgttagagtaagggaggggcatgagggggtgggacctgcacaaggtgcagctgatagaaatgcagtcttcaggaaaagccctggctctggaacggcaaaggctgtgtgcctgggaaaaagacaaacgtgtcttatccggagacggcccccctgccccaaaggctgtcacgctgccgttcagttatctattctgcagcgatagaactggcttgacctaaaaattcagtgacggaaaaatgtcatctaatgctgcttagtgcagtcaggcggtcagcagatgagggcagaaggccactggtctttgacagaacacgcggatggcgaaataacaaaacaggtggcggatgagggcagaaggccactggtctttgacagaatatgcggacggcgaaataacaaaacaggcagcagatgagggcagaaggccactggtctttgacagaacacgcggacggcgaaataacaaaacaggattcaggctgcactgtcagcagcagagacaaacaattcttccaaaataaacaagcgagctcccagcagaggcctgtgaagtctcccgttctgcccaaaccacacacatgtggcccacagaggaggctgcagaggcccacggggcactcaagtggccgagtgtgagacccaggccaccggccgtcctccctgtcagaacaaaaggttcatggaaagggccaggaggacacagcaaggggaaccgaatgccactggcatttcttggatcttttgtaccatagtctaagcatttagaggaagcaccgcgagtttgctgccctggaagctgacgtgctccccaaacacaagacgcaggactggaggccttgccccgcagctcgagaggccgttttgggacatatcaaggaaggaaggcttaagcgacacaggacctggctgacttacgcacccgctgtctaaagatggggtgctggccggtgaactggagtggctcacggcagacctggagtgacagtcatgggtctgtacctgtgtggagtcctccatggctgggcttgcagagactgagctggactgcattgcacattggctggaaggagaggagccactgagagacccagcttacggcactctgcccaccccactgcccaccccaaccctggcgctccaggggggcccaatgccacagacacactccagggggacaattggggctgttcccaaggaccaggagggacaaatgccctaaagatgtccatggtttgacccctgctgtctgtgggccctgcctggctggcctccccttctcacactctccacagtcctcatgcaacacagcacatctgaaaatgctgtcctgaaaacgcgcactctggggaagagcagcttcctcctctccgagtggagcgggctggccccatgaggcgtgattttcattgtgaaatgtgcttcacgtaacactggggcctttgtcaccatttttaattgtacagtttggaggcattaagtgtgttcatcatcaccaccttccacccacagagcttcttcgtcttcccaaacggaaactctgtcgtcggtaaacactccctcccctcccgcagcccctggcacctgccttctccttcctgtctccatgaacctgacaactcttcggaccccacctaagtggagttgggcaggatttgtcctctgtggctggctcgcgtcactcagcggccctgaagactcatctgcgccgcagcctgtcccagaatctccctccctctaacactgattaatatcctgctgcacaaaaaaacaaagatgatcatttgatacccgaaatccacttgaaaattggtaag

SEQ ID NO: 509 - DNA, 3609 bp, Homo sapiens
tgatgcttagaatggttagcagaagtaggtaggaaacactcagacctcaattttcatgaacttcacttttcacagtattttaaacaattagagatgttggaaagaggtaaggaagaattttactatttagtctgctgcacatattcttttgttgttgtttttttgtttgagacagaatttcactcttgttgcccaggctggagtgcagtggcacgatcttggctcactgcaacctccgcctaccggtttaagcgattctcctgcctcagcctcctgagtaactgggattacagacatgcgccaccacgcccggctaattttgtattgttagtagagatggggtttcttcatgttggtcaggctggtctcgaactccagacctcaggtgatccacctgcctgggcctcccaaaatgctgggaatacaggcatgagccatggcgcctggcctgctgcacatattctgacaccatgtgtctggtgaacccagaccctgtaaagaatcttcactggtgattgtttgatataggtgaccttccccctccctctttttgcctgattttatttccctttctagattataccactaaatcagaaagcactgaatattttgtaagtttgtttgggtgagagcaagaataatcttttcttgatttttatttttatttttttaaaacctttaactcctgctgaggttgagacaaaccgtatctagcatactgttacctgaaacaaatgtggtaggagggaaggtgatacagtcctgccattgcagaccagtgggaaaggccaaagagtattttgagtagcaatgtacatggtcaaagcattgtttatgtactatttcatttgagtttgattatgtagtttgaacctggctggtcaggatttgatagacagttactggtttgggatctgacttttcttttttataaaaattaacaaaaaatatatgtaaatatacacacatacatgtggatagttctctctgtgtcttaagttatttgtatgcatgcagctgttgtgatcacgtgtctgatgggcaggtagaagtagaaataagagttcctatgtttcccaggctggccttcggctcctgggctcaagtgatcctctctcctgggcctcccaaagtgtcgggattgcgggcgtgagccaccgtgcctggccctacatttactctttaaatactttcctattggaatgaaagaggcagggtggctcacgcctgcaatcccggcactttggggaggctgagacaggggagtcccttgaggccaggagtttgagaccagccaggtcaacaaagcaagacctccctgaagggaaaaaacctccagttcccatttgggtgtcttttggaaactgctaatacctcagtctttgttgttgttgttggtatttcctccaaacacactctttctcagttttaccattttgtttttgtgaactaagcaagagcaggaattaatttatatagttattcatatctggacaaattctggaaggttgctggagtctctttcacttcttaaagtgttttcatttaagaaaaaaatctttaattgtagcctgcacaattgtagccctatccttacccctaaggtcccatactcccaaggcattgaggttaggtagaaggcccaagaatggggccggggcccattgcgtctggaatgcagtgtgaactgatggctgtctctgacctcatggacatccctgcaccttcctcctggtgctcgccagcaggtgcaggaattcagtcgtctatgggttcgtttcccctttttcgcgggtctctattccgtggtgtgaagagcctgtaagggtaaatgtcctatttgggtacaaccactttactcttattctgtcagaatctgtccaagcgtttttttggcttgtttgctgtgttcctttaaagatggttgagataaaaccagtcagaaaagaaatagttttttgccctatacttaactaaaatattgatttattccaaagttgtttttatttacttttcactgacctcaaagagaaaacttagacaccttagagaaacatgaaacattctcagaggaaggagtgatgagcatggttctgtattaatgtgttcactccttagcagaagatatagaaatactgcagcttaggccaggcactgtggctcatgccttcgggatcccagcactttgggaggcagaggcgagtggatccctggagttcgagaccagcctgggcaacatggtgaggccccatctctgcaggaaatacaaaaactggccggttgtggtggcatgcacctgtggtcccagctactcgggagggtgaggcaggagggttgcttgagcctgggaggcaggggttgcagacagccaggatcacactactgcactccagcctggcaacagggtgagaccttgtctcaaggaaaacaacaacacaaactgcagctcattctttctaaaggtatctggaaaatgacagaactgagaataacatccagattcagttccctgccatgagaagttccttttgccttgtttgtggatattgttgtcagttcattgcagctgtcttgagtaacttacagaggctaatgtgaccaaagaaagatccatcatcccttgttgtttttctagttaaaagtcatagcacaggtttctggtaacatacaaatgataagacactgtccataattctaattacaacaattcagtttgtatagtaatttggtacagcattaaagggggtgatgccctcctcccatctcatttccctccctttttcctatttcacatttattcttttgtctaaaagacagaaaattggtatgattctcatatgccgcatagaacgtgtagctccatcacatcccacagctttctagaggtctttggggttggaacacaaagtttaacttctgtttctgtttttccttgaattcttttgtttcctggcccttttccatcttgccggttccccttatgttacccactatcgtccatgctctccctctgtgttggttgtctcaaaacagcattcagcggaattcattgagtgggtgaattctgtgaagttgccttttctggcagtgctgttactcagtgatgcacaaacgtagcatttgccctttggtagacaaagatctgtgttttttttttttttgtttgtttgtttctttgagacggagtctcgctgtcacccaggctggagtgcagcgggttcaagcgattctcctaccttagcctcccgagtagctgggattacaggcgcctgccaccacgcccggctaatttttgtatttttagtagagatggggtttcaccatgttggtcaggctggtcttgaactcctaacctcaggacctcaggcgatccacccacctcggcctacctaagtgctgggaacaggcttgaaccaccgcgcctggcagatctggttagtattcttcaaaggagccaaaggcagtgctttcgtgtttgctttgaggggaagtagtggacgatttgattgtgacaccttttagcattggtgagttgatttatctaaaattaactgttaaagttagctggccttatacaacgtaaaagtaaagaaaattcatcagtttctc

SEQ ID NO: 510 - DNA, 3500 bp, Homo sapiens
ttaagctgcgaattaactgattgctgtggtctaagtgttggcgtccttccaaagttcatatgttgaaacttaacccccaacatgatagtactaagaggtgggaagatttgggaggggattaggtcatgagggctcctctcatgaatgggattagtgcccttataaaacaggttgaagggagctaccttgcctctttcaccatgagaagacacagcattcatctcttccatcacagcttggtcttgaacctcccagcctccagaaccgtgagaaataaatttctattatttccaaattaccaagtaattatacaggtttttgctatagtagcccaagtggatgaagacattgatctacctgtgattattgctactacatcctgcaaactgttgcccactgggggttactttttcaacttaagagaacatagcttccttatacataaaaatctataaaacatgcaatttattaccctctaaaaatgtcctttttctcaaaactggggttgctgaatgttcaggctgcatattctccctatagtaggcattgagtaaaataattataactttatctctgtattgtgtgtggttctcaggcatcagaagaacaactgtaagtgcagaaatcccatgcgagaagttaatttaggagctattaataatttctcagatacgatctcatgtattaactcagcacaactctagtgttaaagttatcaaagagcatatagggggacgatgaaccattggttaatgtttttaaaaaaatctttagtcctgagctttatatcatgatctgttttgaggaacatcctaatgtcaaggccacgttcagtcctctgacatcttccctcctttgtcaccttctagaggaagcctttctttcccccttctgcagttctttcttcctttaatagctgtctttgttttaataaggaaactgtcgggggcagggtggagataaggaaaggaaaaatgaactgaaggaataaagaagctacaggaaaagagaaaataagaaagatttttcagaaatatttatatctcttagagtcccttaaatactaaaaattagaaactcgagatggtatgtgacatttgtaccctgacactttgcctgctgtgaagtggtaatggtgctcagctttcccacggcagccccaagagtctgactttagagaattcctcacatattctgccagggcagacacgtgactaatttatttctgttctaaaagacctcagagaagaagactggtctagaatatctctgaaagttagagcacattgcaacagagtggatatttatttttattttatttaaaaaaatgatttaaagatactatgatgtcaagatgacatcgttaggtgatatggccgtaatatgttgggactaatgtactcaaatgagtgggtcactgagtcaagtcatgggttcatactcaagttcatcatctaatttttagccctttattatttttgagtaaaaatagcatttaaaaatactgttttaataaatactgaaacatactcattataaagaaagactaggtaatagaaagtttaagagaaagtctccaccccatactcccatctctcaattccttacccagagaaatttgctgttaagtgtgatgtatagccttttagccattgtttgtatatacagttggttggatgagttaaagtacaaatccctagaagtagaattttccaatcaaagttttgtgcatttcaaatgttgaaagaaaatgccaattgcataccaagccctttaaatggatttgatcaactcatttaagcgcatggctggatgcaagtgaaaaccccatccggccacatctctaggacagcattgggctagctcaagtatggtagaccaggggacagtagcactccacaccccaagggctttggaaatttgtaggaggagaggtattttgttgtcgccatgactgggaggttaaaataagggattgggagattaggcttgatgcagtgcacagggcggttccacacaattaaacgttgtcttgtgtcccacacaatttacaaatattttggtgggcattcatattggtgaagaacctgcttattattctgggcccagagcctaactacattttacatataaattcaaagttggtttttgctgttgttgttgttcatggttttaatatacattgaagtttttaggaatataaccaccatgtaaattgagagttaaaacattatggaaaattgcctcactgtggcatttaagccatagaccaacatatctttatcagtctatattcactactagggcatttgcagggattctatgtataatctctatgcctaagcttatatatttagagcattatactgacttttaaaaaaacgtgtggagtaaattatagtatttatttcacttaaggtacactacaaaatatttgttataaaaggagctgtgtcgggccgggcacagtggctcatgcctgtaatcccagcactttgggaggctgaggcgggtggatcacctgaggtcagggatttgagaccagtctggccaaagtgggcgaaaccccttctcttctaaaaatataaaaattagccagatgtgctggcatgagcctataatcccagctactcgggaggctgagacaggagaatcccttgaacctggcgggctggaggttgcagtgagctcagatcatgccattgcactgcagcaacaagagcaaaactccatctcaaaaaaaaaaaaaaaaaaaagctgcgtctgacaaggttgaaacccactgctccagagagcagtcacatttcctggttcagatgtgctctgctggctcatgtggtctctggttctctgattccgcttggctggctcctgaggtgttcacctccttctccatgccccagaacccataggtcaagagttactccaagcttacaccacagtctcagagaacatgaccaagacgggtccactctgccttgtgcactccaaaggaacaggcaacttgttggcagaagagttcctctcagttcctaggagaaagcaagttgaccaacctagtgaccatgaagcacgcctgagaggagtgaaaacaagaagatactcgctccctgcctatgctaactagtgctttttgcagttgtaggtatggaaggagagagtgcaagtgtaagagattatttagttgcatttcaggatatttcttagtctccctcttattctcctaaaatgatttattactgttttttgacctttgttttacataacatgaaaatcctttctccaaaatattgacttcctatggaattacaagactctgaaattttaaaaagaagaaatctgaatccatcactaaaatgtcagcctcatccagaatgcaagttgtatgagtgtagggttctgcatgttctgttcatcattctagtcccagcatgtagaacagtatctgatctgttctcaatgatattgattgaattaataaattcagacattgtgtaaag

SEQ ID NO: 511 - DNA, 3620 bp, Homo sapiens
acttatttgctcaagggttgtttattgaacatgccagtgccaggagactggcgtggagcatgaggccgaggctggctggagtgggttttggggagtgtcaggaggctggtgtggagcgtgaggccgaggctggctggagtgccaggggctgcagggtcaggtgtacatcggtgagctcccgcaggacttcctccgcatcacgcccacacagcagcagcggcaggtccagctggacgcccaggcggcccagcagctgcagtacggaggcgcagtgggcaccgtgggccgactgaacatcacggtggtacaggcaaagttggccaagaattacggcatgacccgcatggacccctactgccgactgcgcctgggctacgcggtgtacgagacgcccacggcacacaatggcgccaagaatccccgctggaataaggtcatccactgcacggtgcccccaggcgtggactctttctatctcgagatcttcgatgagagagccttctccatggacgaccgcattgcctggacccacatcaccatcccagagtccctgaggcagggcaaggtggaggacaagtggtacagcctgagcgggaggcagggggacgacaaggagggcatgatcaacctcgtcatgtcctacgcgctgcttccagctgccatggtgatgccaccccagcccgtggtcctgatgccaacagtgtaccagcagggcgttggctatgtgcccatcacagggatgcccgctgtctgtagccccggcatggtgcccgtggccctgcccccggccgccgtgaacgcccagccccgctgtagcgaggaggacctgaaagccatccaggacatgttccccaacatggaccaggaggtgatccgctccgtgctggaagcccagcgagggaacaaggatgccgccatcaactccctgctgcagatgggggaggagccatagagcctctgcctcgatgccgttttgcccccgctctttggacacgccgacccggcgctccccaaggaatgctgtcccaacaagattcccgtgaaagagcacccgtgtcgccccctcccgtggacttctgtgccgccccgtccacacctgttcttgggtgcatgtgggttttcggttcctggcggtccaggacggggcgggggctcccctcccatctcgtgctgggaggtctcagcgcgctctcctgtccctgggacgtgcgtctctccttctcatgccgttctggaaaatgctcttgctgtagagagcagctgcttctgccagggtgttggaggtggtggagcgccttccgattccattcatggcattttgtgatgtgatgtaattggaatagagctgttgatttaaggcacacacaatccctcacactgtgggtttttttttagaacttcccagacgaaaactcacgcccttgccctaacgcgctttgctgtgagcctggcccctgcccagggcttgggtctggtgagctgagcagcttcctgtggatggtgtggggccggcctctggcctggctcacctggccactgtccagccagccttgtgacagactccggcctgaaggcagaatgaacccacacctggagtgaggaagggggcctggcacggttggccaggctctgcctgattgccagccagcgggcatctgaagccggatccttcgcccgccggaggctgccgtccgtctctcctgctgcgctcgtgccagctccgtgggtgtcctcccagggagcttctcttctcaacaggccttgcgaggctggggtgagaggtgatagaggcagcactgtgcatgattccgagagggtgtggtggcactgccagccgactgctgacagcttgggagctgctgtgcccaggacgtgggttcagcgtgggcgaggaaagcctggcgagcgtggccctgtaaaagctttctgaggcgggaggcgctcacttacctctgactgcctgggcgctgcgtgtagcatcttggcctacaggacagattttaggtgacacctggttatgacagtcagaaatttgagaagcttctcacaagtgatgcactttaaataatctgcatgccattgagacacctgcatgtctggtgtttgtggttcaagtgtcttgccgccggccttcggatgtaaacccactgataacggacagaaagagaatgcccacaagtgggtcttctgtggaagatgcagaaggaggaagttagtgcttacattttagtctttttctccctcaaaaaaataggttaagtttcagtgccagctagaaaatactgctttctgccatcgattgggggtggtttttgtcaaatatactgttgataaatatttatttttgtaaacttgaagtgtgtggtggccgtgggggagggacatgctggcagcaggcgccttcttcagctgtgggtcctaaaggcctttgatcctttgaagaagaaagacatggtatttgttcagcagacgccgaccactcagacggaggggcccctgggattccctgtctcagatggcctggtcttacgcctgtgtagatttcttctccattgggaatgaaggtgtcaggtgggactggaacgttctagatggtatgttccgtgatattaacaactctaacccaggacagaccacaagccacactcagaggcctcactgtgctgggggcttcggtgtccaggcgcccaggtgtggccaccagcaccggtttctgccttcgcgttgctggggtgcagtgagactgccacacgcgtgcacatgtggctctgtgggtgtctcctagagaggacgtggcccctgctgccagcccttgagcagcccgtgtgggggcccgagggacccacacagtgggggccagcctcgctggagggagagcaaccctttgccgatgaccacgcttgccgccatctcttagttttctttttcacaagcgctttatttttttaatagacaaatcacattttgcaaggcctttaattaaataagattcttctttccttcattttatgctttatttcctgtttgaaggcttactgtagaagtggcttactgtagaagcagcttgctgagcccctccgagcggtccccagaattagctggttcacaacccccaccctcccccgcccccgcctgtgtcaggtgtggatgaggtcgtcacactcagaaggacaggcttgtctgccagctcacaaggggaggctgcagtgggtttgggagctgggtttaggcccctggtgtctgagggcccaggccttgccagcctctgctgctcctgctcctgggtttgaagatgcaggccgatcgccagctccgtggcagcggtcactaaggacagcctgactgtgccatcttggagcctcaggcggggctccggagatagaagacaggtcgccggaggctccccctcctctcctctcccctctgcagatgctccctgggcgctaccctgcagggtgccaggcaggagtggtctcagaacgtgcgcttctgattattttactggggtccattgtccagatttttctttgattgtaaaatatatttttactttttagtcttctaatttaataaatgatccatataaaaatagagaaataaagtcctttaagggaaggttt

SEQ ID NO: 512 - DNA, 4774 bp, Homo sapiens
attccccaggctgagagtacgcgagggcgcagcagcggcaaggggctggaactggggtcggggctgttgggctcctgctcggggtgccccctctctggcccgatttccgggcccgctcaccatccgggacccactcagttgggacgcctccacctcgctgcccccacaggaaccccaagatgggccgggggctccggggcactgtcaggggtggccggccacaggttgccaagcccgacctccccagactccagagccaggtgcacacctgccaggtgaaggtgagattgaagataaccagctccccacatcccctgcagaacaagtggagcagggatggaaccagcaaacagaccgcgatgattctgaaacgctgtcccagcagagtgaaagtggatcagacacaaaaactgacccctttgaaagtgcctctgacacagagtccttgtctgggtacctcccgaggggagtcttccaccctctaagaggtactcccgtagatatagaagcaccttgggaataccctgatgtctcagcaactggaccccctcaggagcagcatttgaccagtgttcctgggcttcatgcaaaggaagaactcgatttgtcccctagcttagaggatgactcttgcaaaaatgggtggcgagcctttgccacagttgctggagaacaggaggcaggacacctctgggactgcgcgaccagcctggagcgagagtctttgctggcaggggttccccgacacacagggtgctgcttacagagggccacagacagcagtggtcccgagccagtacagggggtggctgttcaagacctcagagggctctccagtgtttctcttcagaaatccaggtctgagagctatctgggcatcccagtggtctggcccttccttctctggtgctgtgaactgggtcggagttggccacatatccacaacagggccagggcaccggtgctacctagcagaggcccactggacaacacagcccctctggggaccaggacaaagaaggaaagtactctaggccctgcaggggacacagaattgctctggtcccagccccactcggatgtcccctgccagcctcctttgaggacatcttgcctcctacgcaccaaccgtcaccatagtgccccagaaactactggtgacaagaacagggcatcccccagactcaactgtgggcacatgagggcactggtcagggcccattccatagcagggttttcaccagagtgccccgaggatcccgtgggacagaatgttgtgaagtctgggacccatgtgaaggaaggggccaaaaatgaacgagatccaagaatacaaaacatcccttcccctgcacccacccagctgtctggcccgattcctgcttttcagagtggggctccccatctgcagggtccctgcaagcctggtgggtttcgcttgcaaagggcctctcaggacactcctgggggaaaaccagttaagacaggattccaggtcatgtctggtggcttcatgcctcacctcagagttagtgaagctcagtgcagaggaagtgcctgagcccgctgagtgcaagtcagagcaaagcccagaaagcagaacccaggaaccccaaggcacccagctcgcaccaagagctgctgatgagagagagacacagaagcacctctggggcatttctgtccaggcaggaaaccaaaccagtaattacacatcaaagtatgtgctcagcgaggaaagcaagtcacctaccagggccaagttcccacggcagcctagcagtgaggggacccaggtgtggagtggagacttgatgggctgcttggaagtgagtgacagttcagatgcccctgagaccacccagaaatcaagcgcaatagacacttcaaaggcagccgaagaagccatggttctagaccccaactacagggaacaggctttgcaaggtctttcagaattcaaggcagccacggtgtctcactgcggccctggggctgaggagggtgaacaggggcctgggggtgccgggggccggcagctggagcccaaagcaggcggcgaggcctcgaggggcaggggcgccctcatcattgtagctgtggagcagaaaggtcttcaggccagcaggagcaatgcggggcctgttccagaaacactgccccgtgactttcctaaggaaagaccagaatctcccttgagcactggcgagaccccctgtgagtctcccactagggggaaaacaccagccggtaatgagtgtgagttgccagcagcccccatacagggagctggcgatggggctcttcagcgggtggcccaggccgcagagcttgggagagtgctggtcccccaagctgcttcggaagagacgccgagcacagaggagcccccgggagagagactgcgtggggagagccggagctccgggtcaggggagcgtggcccggaggaggcccccgaaggcggtgctgcagcagcccggggccagcgcccccgcgtccccgccttggagccgccccagccgccacgcgggctccgcaagggcgcgcaggagcctgggaagcgcccgacgttttccaaggtgacctccttcaggaagggcaggcccttggccactgagagcccaggaggggtcccggccccgaccaccgagggtcgccgctggggctcttcaggccccgaggggctccccagggagaatccgcccgctgcggccggtcgggacgcaccgcctctgcaccacggggacgccagcgcctggcccgagtttgtcccgcaggctgcaggcgacaggactgcagggccggcaggagcggggcacacggggacctcaggggatcttggtagccgagggccttcctctgagagctgcaacgcaaagagactcaaaacaacggagaaaaaactcagggcaaggttggccttggctcataagaccttttcaaactttattgagtcgatagttctagagaaagagaacacccatgaacgttccccaagttctcccaagggcgagaaggagaagagcaggctgcgccagggttcctggcgggcgtttctgaaaagcaaagatgccggaagccccaaaaagcccaccctagtgagtctgcctctaggacccgaagttctctccccagcagagaccgacagccactgtgaggaacgggcggaggacaaagagggctatgtttttagcgatcactgggcacccccacttgcctccacacctttgtcctccagtttagtttctccagaacacaggaggaaaagtgaaccgaccatcaagtgcacagccacccaggaaggcggtaggtacctaccttcaggtatctttccggaaaagtcctggctggcgtcccccggcagccctcgggcccagcaggctggaatcgcacacaccctgccttccagctctgcctgctgcctggcatatgaaaaccccgggacgccctgcagacccacgagccccaagcccctgagtcccaggcctagtgctcagcggatgggtctccactaccccgggaggggtagcgccatctccatggtttctcttggaagctacagctacgtggacagcagttcaggggaccctgaaagacccaagattcccaagggccagaccagtttcctgctttctctgcagacgctaaaccaagatgagcagaaggaagagagcagggaaggaggccagggtccgcgcggcttgggcacagtgccctggctcagggaccttcctgggagtgagaaccacatgccctgggaagaaccagcaggtgagaagcccagttgctctcacagtcagaaggcgttccacatggagcctgcccagaagccctgcttcaccactgacatggtgacatgggccctcctctgcatctctgcagagactgtgcgtggggaggctccttcacagcctaggggcatccctcaccgctcgcccgtcagtgtggatgacctgtggctggagaagacacagagaaagaagttgcagaagcaggcccacgtcgaaaggaggctgcacataggggcagtgcacaaagatggagtcaagtgctggagaaagacgatcattacctctccagagtctttgaatctccctagaagaagccatccactctcccagagtgctccaacgggactgaaccacatgggctggccagagcacacaccaggcactggtgagttacgcgcctctctcttttgctatgtactctggatcctggcatgaaggacaagaagctagtgctgttggcagctgtatccacttgcctggtagaagtagcttgaaggtgagagagataaacaattgtcctcttccttcagttagggaggagtgcctactacccaaagaaagggaattattggctgggcacagtggctcatgcctgtaatcccagcactttgagaggctgaagcaggcggatcacttgaggtcaggagctcaagaccagcctgggcaacatggtgaaaccccatctctactaaaaatacaggccggttgcggtggctcatgctataatcccagcactttgggaggccaaggtgggcggatcatatgaggtcgggagttcgagaccagcctgaccagcatggagaaaccccatctctactaaaaatacaaaattagctgggcatggtggcacatgcctgtaatcttagctactcgggaggctgaggcaggagaattgcttgaacctgggagtcagaggttgcggtgagccaagatcacgccattgcactccagcctgggcaataagagcaaaactccgtctc

SEQ ID NO: 513 - DNA, 3717 bp, Homo sapiens
gtctgaggtttggtgactgcggggcaggccgggggcagctgtctgtctggctctttttgacagcccccagtgcgaaaggctgccagcatgtcatcagtgagccccatccagatccccagtcgcctcccgctgctgctcacccacgagggcgtcctgctgcccggctccaccatgcgcaccagcgtggactcggcccgcaacctgccgccgctgcacaggattggcacagctgcactggccgttcaggttgtgggcagtaactggcccaagccccactacactctgttgattacaggcctatgccgtttccagattgtacaggtcttaaaagagaagccatatcccattgctgaagtggagcagttggaccgacttgaggagtttcccaacacctgtaaaatgagggaggagctaggagaactatcagagcagttttacaaatatgcagtacaaattttagatgctgtgagcctagaggagcggttcaagatgactataccactgcttgtcagacaaattgaaggcctgaaattgcttcaaaaaaaccagaaaacccaagcaagatgatgataagagggttatagcaatacgccctattaggagaattacacatatctcaggtactttagaagatgaagatgaagatgaagataatgatgacattgtcatgctagagaaaaaaatacgaacatctagtatgccagagcaggcccataaagtctgtgtcaaagagataaagagactcaaaaaaatgcctcagtcaatgccagaatatgctctgactagaaattatttggaacttatggtagaacttccttggaacaaaagtacaactgaccgcctggacattagggcagcccggattcttctggataatgaccattacgccatggaaaaattgaagaaaagagtactggaatacttggctgtcagacagctcaaaaataacctgaagggcccaatcctatgctttgttggccctcctggagttggtaaaacaagtgtgggaagatcagtggccaagactctaggtcgagagttccacaggattgcacttggaggagtatgtgatcagtctgacattcgaggacacaggcgcacctatgttggcagcatgcctggtcgcatcatcaacggcttgaagactgtgggagtgaacaacccagtgttcctattagatgaggttgacaaactgggaaaaagtctacagggtgatccagcagcagctctgcttgaggtgttggatcctgaacaaaaccataacttcacagatctttatctaaatgtggcctttgacctttctcaagttctttttatagctactgccaacaccactgctaccattccagctgccttgttggacagaatggagatcattcaggttccaggttatacacaggaggagaagatagagattgcccataggcacttgatccccaagcagctggaacaacatgggctgactccacagcagattcagataccccaggtcaccactcttgacatcatcaccaggtataccagagaggcaggggttcgttctctggatagaaaacttggggccatttgccgagctgtggccgtgaaggtggcagaaggacagcataaggaagccaagttggaccgttctgatgtgactgagagagaaggttgcagagaacacatcttagaagatgaaaaacctgaatctatcagtgacactactgacttggctctaccacctgaaatgccgattttgattgatttccatgctctgaaagacatccttgggcccccgatgtatgaaatggaggtatctcagcgtttgagtcagccaggagtagcaataggtttggcttggactcccttaggtggagaaatcatgttcgtggaggcgagtcgaatggatggcgagggccagttaactctgaccggccagctcggggacgtggtgaaggagtccgcccacctcgctatcagctggctccgcagcaacgcaaagaagtaccagctgaccaatgcttttggaagttttgatcttcttgacaacacagacatccatctgcacttcccagctggagctgtcacaaaagatggaccatctgctggagttaccatagtaacctgtctcgcctcactttttagtgggcggctggtacgttcagatgtagccatgactggagaaattacactgagaggtcttgttcttccagtgggtggaattaaagacaaagtgctggcggcacacagagcgggactgaagcaagtcattattcctcggagaaatgaaaaagaccttgagggaatcccaggcaacgtacgacaggatttaagttttgtcacagcaagctgcctggatgaggttcttaatgcagcttttgatggtggctttactgtcaagaccagacctggtctgttaaatagcaaactgtaggtccaaatctcaattttttagaattttaagttatgaagtgctcaaaggtactgacacagttgattttattcacaccattaggggtatgcaagatgtccctgttttataaacataatcacaacagtaataaacctcaagtagtggctagtgtttagtatagaaatataagatgttgatttagtaaactgataaaaatcgaattcttgtctttttagtgggatccttactgtccctggaaagatacagcatagtggttctcagcacagtctccagaacagaagcatctgtagtacctggtaacttgttagaaatgtacattctcaggctccacagcaggccgcctgaatcaaatcctgggaggtggggacagaaatctgtgttttaagaagccttccaggtaattctgctgcacactcaagttcaggaaccaccggtatagaccattaccttagtggatttacctgtagagtttattggatcctgaaaccaatcaattacttagaactaggcaaagatgaaagtatagccaactattcttggctatatatatattcaagtgggccgggcgtgatggctcacacctgtaattccagcactttgggaggtcgaggtaggcagatcaccgagcccaagagttcaagacaatcctggccaacggcgaaactctgtctctacaaaaaatatacaggcgtgttagcatgtgcctgtaatcccagcttcttgggaagctgaggcacaagaattgcctgaacccaggaggtggaggttgcagtgagctgggatcgcgccattgcactccagcctggctgacagagcgagactgtctctaaaaaaaaaggactcaagtggaccctacaatgaagcctacacatcccaatagaagccccttcttatgctgagggaagcagccctcagaacatgatagcttgtatccagcagagtggcacgtgctggcacacctcacagaagcaccctggccctggatgcctgcaacctcagaagagtgcagctcccagagggaggcagccatccatctgggatggtcctaagcatggaatcctaactcctgattccgtctcctatttcttgcttggctacgccagttcccaaatctggtagatgtccatgcccatgtgctcctgctgggactcaattcaggctgtgtatgactatgaagtcaggctcatctgcttactggctgtgtgaactttttgtatcttggttttcttcatccatgaaatccaagtaatactacctaattgttactgtggagattaagttcaaatgcaatgtatagtaatatt

SEQ ID NO: 514 - DNA, 4233 bp, Homo sapiens
acttccactaaactcttgtgtgcactttggcttcaaattaatggagagtccagggtatggtatgcccagagagtagaataatggagagtaagtcctggtaggaaatgccagaccatgtgcggctgctttagtttagctatagaggtcactagagaggggatgtataagtgggaagaaaacacaagctgttattttgtcttctcacatttggaactagatgagaggcacccagagggcacgcacactagagaagagaaagaccttatggatgcatgtgattctgtaatagacctgccatcaaaaaagcttatagagctgtatacaacctgtgggttttccataaggaagcagggatcagatgcacatctgttggaggctgggggagccggcttgcttgaccttaatacacctccctgctgtaggagtcggattcctggcagtgtgttgatgttccctgttagagccgggctgtgggaggggcagttggagccagcggcatgtgtgtggagtgagatgcgaggcagggtccctggctgcaaaggaggtgggattgggggtatgggtgagtgtgggtgctgggggatggacagaagtggaggtcctctctgaagagaaaaacctggacaccaaagggtttaagtcctaatggcctctgactccctgaccctgcctgtccttaggggaagtgctgagggtccctccctggggaagtcctagagctgagtctcttcccttagtaaaatctactgaaaatcaggatgcccaagactgggggcttgaaaccctgcatattcttcaccgccttgcttgagagctttccattttccctgcccactgaagatggtccaagacatgcagtaccttcttgcttcctgctttacaccccaagaggggattgaattctttatgtatgtgtctgccacctttgctagattgtaagctccctggaattgtgccatagtcatctgaatacttgtagtctttagatatgtatgtgcctggcctggcatgtagctggtactcaacaccctttgggatccaatctgtggctcagggtatggggaagagatgacccagacccctctagattctcccagtcccaaggagaacaattctgttagggtgccttccagcaagacagcaggaaccctcaccacccactggctccagtggtggcccctgggctcctccctctctggcacagggactaaacagagccagctccactggagggagtgccctctcctttctttccaccctttgactctgaaccattgtgtcactctgtcctgaccccatttcctccccggctagccctcagccatctgtgggcagctgtgagactgagtttggtgcctggtgcagctcagaccctggcaccgacctgcttggccataggcatgtcctcttgtttcttcagctgactggtgctttttggggtgcctctacccaggtcttcttgtcttcctgagagttctgaaaccctcttctgtggggtcaaacctggctgcacatttgaatcactttaggggctactgaagcatccagcatccagggactcaccctactgagtcagaacttccagaggagaggtcgggaatgtgtatatttttaaagcttcgcagatgacagttgcggtcactcaaatgtggagtgtgcattagataatattattgttgtcaatgttaagttttgtgggtgtgctcatggcattgtgttttacataggagaatgcccttgctcttagagattcaggctgaagtttttagaggcaaagtgtttcttacaaacactttgcaaagggcatcttactttaaatggtaaagcagagcaagaaagagagcaaatgtggagaaatgttaacaattattgcaggcaggtggtgaaagaaaactggctgtaacagaccttctggacgatttccatctgttttctaagaggtggacattaggagagaacgcagcctgaaccaccaaggtgtataactccaggaggcaccattcacatggttttcatttttgtggtcgggggtatcattcacatagaatacaatgtgtggggtgccccctagggttgtgtgacatagtggcattggccccagccatctctccctggatgggctgcagagtagcagagacgcaggccctgatctacccttcctctttcaagggaccgacatggctatttgtttttatacagaatccctagtagcccttgaagactaagggaatggagcaatcttaatttaaatttaaatttaatttaatttaatttgagacagggtctctgtcactcagactggagtgcaatggcacgatcacggctcactgtagcctcaaactcccaggtccaaacgatccatccacttaacccttcccagtagctgggactataggtccatgccaccacacccagctaattttttttccccccatagggatggtcttgaaccctgggctcaagcaatccccccgcctcggcttcccaaagtccttgggattacagacatgagccaccacgcctggccctagagcaatttctaatgtagagcctgacagagagagaactgaattggggaagtggggaggcaggaaacatgaaaccctgattcctaaaatactttctgcgtgtcctctagtcctggaaaatgaaatctagggcttgaatttttagaggaagccaggtcgctgtgtttcaaggtcgctgggactggttgctcctgtgtttccatctctggagttccctcgtgtctggctgctgctctctgaaccttcgcttcaccttgggggtggccttcttggtcctgtgggggatgctgtttgtcccatttcctcactgccacctctcagcatcatagtgagctgagtgctgagcctttgggaggagcattgccagtgtggccctgggcgtgagatctgtcagaggggtgggcttccttccctgtgtggctgagacagtctagtggtggcctggcccagagccaggaggatggtggttagagaggggtagctcgcctttcctctgtctgaattccagtctgggaagagcttcaggaacagtgcctgcttggatcaccctgggacctttccttctctttcctgtgactttggagtcctctgagagatttgacctaaggaatcagtaggttggaatcaaggaatcccggagctggaagggactgtgtgtggttttcttgccatccttgcccctgccttacagatgccaatccaacctggttagttccaaaacccagtcctgtgtctgaaggatactaaggagcacaccacctacatcctgaccacccatctccatgtctgaaaattccccacctcccagaaggttctgccctgacattccagttcaagctcagtggaaatgatgggaatttggaacttgaggaacatagtaggggtgatggatccataaacatgtcaattttgaataaaatatcttaagcctgtgtttgagatatacactggttgctattgggagccaatagcaaatagcaaattggaacaatttgaaccaagtcacggaggtatcacatacgtggtcatgaatggttggaggtgagagggagagcagggcaggagagagtcttatagagaaatcagagagcctttgaaatatcttaggcaggaagcgaggtgatcagatttacattttaggaagagccctcaggatgttctgtgaaaaagccttgaagaggccaaggttagtagggggaaggactattaggaggccattgtaatagcccaaatgagagaagataagggcttgaattagggcaaccacagttaggatagaaggaaagattagctttgggaagtattaaggaggaaaaggtggcaggccttggcaattagagagaggggtgaaaggaagggggactctaggatgactgcaggatttttagcttgggggactgggtggtgccattcaccacaatggggaaccaggagcaaggagcagattgtggggaggaaagaagatgatagttgagttttggacatttggattttgagatatgagtgggcatgtaaacttgaaggagagatacatatttggaatcatcaacatgtgagtagtatggataggaaacaagaatagatgagattgcccaagcagagggggtagagttaacagtaagctgagaatagaatcctgagccaacaccaacatttcaggggtggacaaaggaagaggaagacaaagaaggaggagatggagaac

SEQ ID NO: 515 - DNA, 3518 bp, Homo sapiens
ttttgaattcactttgagctgacggttttgtccaaggtgttggatgaagagcacttgagaataaactgcggtcgcttgccccagcattgaagctcagctctcagaacatgtcatctggaggctggtttcaggatccttgaatgagtacggtgctcaagtattgctgagctgcagtcctggttactacttagaaggctggaggctcctgcggtgccaggccaatgggacgtggaacataggagatgagaggccaagctgtcgagttatctcgtgtggaagcctttcctttcccccaaatggcaacaagattggaacgttgacagtttatggggccacagctatatttacgtgcaacaccggctacacgcttgtggggtctcatgtcagagagtgcttggcaaatgggctctggagcggcagcgaaactcgatgtctggctggccactgcggttccccagacccgattgcgaacggtcacattagtggagatggcttcagttacagagacacggtggtttaccagtgcaatcctggtttccggcttgtgggaacttccgtgaggatatgcctgcaagaccacaagtggtctggacaaacgcctgtctgtgtccccatcacatgtggtcaccctggaaaccctgcccacggattcactaatggcagtgagttcaacctgaatgatgtcgtgaatttcacctgcaacacgggctatttgctgcagggcgtgtctcgagcccagtgtcggagcaacggccagtggagtagccctctgcccacgtgtcgagtggtgaactgttctgatccaggctttgtggaaaatgccattcgtcacgggcaacagaacttccctgagagttttgagtatggaatgagtatcctgtaccattgcaagaagggattttacttgctgggatcttcagccttgacctgtatggcaaatggcttatgggaccgatccctgcccaagtgtttggctatatcctgtggacacccaggggtccctgccaacgccgtcctcactggagagctgtttacctatggcgccgtcgtgcactactcctgcagagggagcgagagcctcataggcaacgacacgagagtgtgccaggaagacagtcactggagcggggcactgccccactgcacaggaaataatcctggattctgtggtgatccggggaccccagcacatgggtctcggcttggtgatgactttaagacaaagagtcttctccgcttctcctgtgaaatggggcaccagctgaggggctcccctgaacgcacgtgtttgctcaatgggtcatggtcaggactgcagccggtgtgtgaggccgtgtcctgtggcaaccctggcacacccaccaacggaatgattgtcagtagtgatggcattctgttctccagctcggtcatctatgcctgctgggaaggctacaagacctcagggctcatgacacggcattgcacagccaatgggacctggacaggcactgctcccgactgcacaattataagttgtggggatccaggcacactagcaaatggcatccagtttgggaccgacttcaccttcaacaagactgtgagctatcagtgtaacccaggctatgtcatggaagcagtcacatccgccactattcgctgtaccaaagacggcaggtggaatccgagcaaacctgtctgcaaagccgtgctgtgtcctcagccgccgccggtgcagaatggaacagtggagggaagtgatttccgctggggctccagcataagttacagctgcatggacggttaccagctctctcactccgccatcctctcctgtgaaggtcgcggggtgtggaaaggagagatcccccagtgtctgcctgtgttctgcggagaccctggcatccccgcagaagggcgacttagtgggaaaagtttcacctataagtccgaagtcttcttccagtgcaaatctccatttatactcgtgggatcctccagaagagtctgccaagctgacggcacgtggagcggcatacaacccacctgcattgatcctgctcataacacctgcccagaccctggtacgccacactttggaatacagaatagctccagaggctatgaggttggaagcacggtttttttcaggtgcagaaaaggctaccatattcaaggttccacgactcgcacctgccttgccaatttaacatggagtgggatacagaccgaatgtatacctcatgcctgcagacagccagaaaccccggcacacgcggatgtgagagccatcgatcttcctactttcggctacaccttagtgtacacctgccatccaggctttttcctcgcagggggatctgagcacagaacatgtaaagcagacatgaaatggacaggaaagtcgcctgtgtgtaaaattccttcagatgtctttttcgtcaattcactgtggaaggggtattatgaatatttagggaaaagacaacccgccactctaactgttgactggttcaatgcaacaagcagtaaggtgaatgccaccttcagcgaagcctcgccagtggagctgaagttgacaggcatttacaagaaggaggaggcccacttactcctgaaagcttttcaaattaaaggccaggcagatatttttgtaagcaagttcgaaaatgacaactggggactagatggttatgtgtcatctggacttgaaagaggaggatttacttttcaaggtgacattcatggaaaagactttggaaaatttaagctagaaaggcaagatcctttaaacccagatcaagactcttccagtcattaccacggcaccagcagtggctctgtggcggctgccattctggttcctttctttgctctaattttatcagggtttgcattttacctctacaaacacagaacgagaccaaaagttcaatacaatggctatgctgggcatgaaaacagcaatggacaagcatcgtttgaaaaccccatgtatgatacaaacttaaaacccacagaagccaaggctgtgaggtttgacacaactctgaacacagtctgtacagtggtatagccctcagtgccccaacaggactgattcatagccatacctctgatggacaagcagtgattcctttggtgccatataccactctcccttccactctggctttactgcagcgatcttcaaccttgtctactggcataagtgcagcggggatctctactcaaatgtgtcagggtcttctacggatcaaactacacatgcgttttcattccaaaagtgggttctaaatgcctggctgcatctgtatgaaatcaaggcacactccaggaagactgccgcgtcgcgccaacacgtcatactcaatgcctcagactttcatatttctgtgttgctgagatgcctttcaatgcaatcgtctgggctcgtggatatgtccctcaggtgcggtgacagaatggtggcaccacgatatgtgttctcttgtgttgtttttcctttttaaacccccatgaacacgaatactctg

SEQ ID NO: 516 - DNA, 3632 bp, Homo sapiens
agtcccagcgcccgggcgccgccgccgcgcgccccgccgcccatctacctcagatttttaacaaataccccggctcgcactacccggagatcgtgcgctcgccgtgcaaaccccctctaaactatgaaactgccccgctccagggaaactacgtcgccttcccctcggaccctgcttattttcggagcctgctgtgcagcaaacacccggcggcggcggcagcggcggcggcggccgccgcgggggccacttgcctggagaggtttcatctggtcaacggcttctgcccgcctccgcaccaccaccaccaccaccaccatcaccaccaccaccaccaccaccgggcccagccgccgcagcagagtcaccacccccctcaccaccaccggccgcagccccatctgggcagctttcccgagagctgcagcagcgactccgagtccagctcctactcggaccacgcggccaacgactcggattttggctccagtttgtccagctccagcaattctgtgtcctcagaggaagaggaggaggagggagaggaggaggaggaggaagaggaggaggaggggggcagcggggcctcggattccagtgaagtcagctcggaggaggaggactcgtccaccgagtcggactccagctccggctccagccaagtgtcagtgcagagcatccgattcaggcgcaccagcttctgcaagcctcccagcgtgcaggcgcaggccaacttcttgtaccatctggcctccgccgccgctgcaaccaaacccgctgctttcgaggatgccggcagacttcccgacctcaagagtagtgtcaaagcggagtcgccggcggagtggaatctgcagagctgggcccccaaagcatctccggtgtactgcccggccagcctggggagttgtttcgctgagataaggaacgatagggtatctgagattacattcccacactctgaaatttccaatgctgtaaagagaactgacctgacaattaactgcctggcagagggggcctcttcacctagcccaaagacaaacaatgcatttccacaacaaagaatactccgagaggctaggaaatgcctacaaacaactcctactacacactgtgcagataacaacacaatagctgctaggttcttaaataatgattcttcaggagcagaagcaaattcagaaaaatattccaaaatccttcattgtcctgaatttgctacggatttgccctcttcgcagactgatcctgaagtgaacgctgcaggagcagcagcaactaaagccgagaatccctgcactgacacaggcgacaagacattgccatttctgcacaatattaaaatcaaagtagaagacagtagtgctaatgaagaatatgaacctcacctttttacaaataagctaaagtgcgagtgcaaggatacaaagggtgagttttacagtgtgactgagagtaaagaggaggacgccttgttaaccacagccgaggaaggttttgcatgccctgaaaaagaaactccttccttaaatccactggctcaaagtcagggcctttcatgcactttaggttctccaaaacctgaggatggggaatataaatttggtgccagggtgagaaaaaattaccggacactagtactgggaaagcgacctgtccttcagacacctccagtcaaaccaaatttgaaatcagctagaagccctcgtcctacaggtaaaactgagacaaatgaaggaacactggatgattttacagttataaacagacgcaaaaaggtagccagcaatgtagcatcagcagtgaaaaggccatttcatttcatggcaaattttccttgtccaccatcactcattattgggagagatggggatttgtggccggcgtattccttaaacaccactaaggattctcaaactcctcacaaggcccatcctatatggaaatggcagctgggcggttctgcaatacctcttccacctagtcacaaattcaggaaatttaattcataaaaatgttttggaagatattttcttgaaccatattaccttccttttgttgtaaactgcacaggatggtttgtacaagtccattaatgtgttacaccccctttggagtcctggtttatcgcattttgaagacagaaatcggattactttttttccgttgcgggtttttttttttttttctggagtagggtgggggcggggtaggagaagggttggtttacattccacagactacttcaggctaaagactcaagtaaaactcagttattacggtagagctggaacactttactgtttcgatgctaataatgcacccggtacctcaattcaactgctacaaataaatgtcaaaaggttgaataataaatattacaatgagccattaagtttatgcactagatttcagagctgaaagtgtaactgttaattcagtgaaagtttgttaggttacatggttacacagtgaggtgaggtgaggtagcaagaagtttctgtgagcccaaaatgttattttctggagctcttgtttgtggggtatctttttcttttgactccccttattccctctccaagagtagttgcacttaacttttttttttttttttagtggaaagattggggtgtgagtcctgattaaatgctagtaaaagctgcctcatacatactgagtaaaataaatacggaattgtattttttttgtaaagggtgtgattttacttttaaagccactcctttgcaacaggaaaagtctgttttgtgttctcacccaaaggttttaaataaggtgactcttactattgtcctgcttatcttgtggcctgaacatgactcttcaaactcccaaaacaattgaaatatttcttttttttttttttttttttggagagagtctcgctgtgtcgcccaggctggagtgcagtggcacaatcttggctcactgcaacctccacctcctgggttcaaacgattctgctgcctcagcctcctgagtagctgggattacgggcgcgtgccaccatgtccggctaatttttgtatttttagtagagacggggtttcaccatgttgaccaggctggtcccgaactcctgacctcaggtgatccgcctgtctcggcctcccaaagtgctgggattaaaggtgtgatccaccatgcccgggctgaaatatttctcgtaatagcagaatatttcatggccgaactcttgatagtgacaaatcagtaaatacaaccaagaaaaagaaaatgaggggtcagagttgcaataccccaaatgaaaaataacagttttttcagggctttttggtaccagaactcaggcacttggattttatgaccttatactttttctgcatctctctaaaacttgtgttttcagaccatcctgtgtatagagcaggagagtttctactgcaagtgacaatcagaggtgactatctatatttgcacttaaaatcaaagtagttcaacatgcaaatgctagggtctagccctgggtaagggccatgctggtgtactgtgttgtgatgatggaagcagtaaatcaaaattatggaaatttgcactgttgaaaagcatgctttagctttattttcaattaaaaacactgtttaaaattc

SEQ ID NO: 517 - DNA, 3847 bp, Homo sapiens
actcacacacgtacacacacacattgacacacacacacattcacacactctcacacacactctcacatcacattgatctagggatttcctcaggttgaaacgggcctgaccatctgcaaatgggcaggtaagtccaaatgcagaactgatcttcacttagggcttcagacaaaatctcaattgatgtaaaagcccattaaccgcccccctcaaagtaaaacaacagcaacaacaacaaaaggtgtttcgaattagtttttgaaactaaaagtatttcaagaaattcactccatgaatgagtcatgacatggcacagtgggaagaacaacttcctggggccaagaaaacctgagctgaaagtcagtagtgcctgtgagcagcccctggacctggggcaactcactgacctctctgagcccagcttcttaggggcttgtgagcatcgtcccttgccagggcctctgcacaccgcctggtctggaacagggacaccttgggtgctcctccctccaagccttcccaccgccctggtgcacaaggcacctacagctctggagctctcagctacagctgaggtgctctgggctctcctgcggggccgaggggcttgtgacgctgggcctcttcctacagtcactcatatccacgtggaatgaggtttccaatatccataggcaaatatgatccacccacctgcctgcctaccttctgaagtcaccatttccctgacataattgcatcttacagatcttacagctgtttcctgtggcccacttgatggttggtggcaccttggcatgtccaccaggtagcacctcatgctgaacatcacagctggccccaggcaggcccttcccttcctcctcactctgtctacatcactggatcagggaagctggcttcattcaacccttccttctgtaggtcctgaaaggtgaggtgatggctgcttctccactccccacccctctttgttgtgtaagtgtgattggtcacacatcacagaaaactcatatagcagatatttgccacgtaacgtagaatttgaaagcacatctatgccataggaaacggctaattgccttgactcaggagtgcccccaagagcctgtctcattgggaatccttcagctgtcccaagaggaaaccattgcgttgacttttgtgacagtcatgtacttggttttaatgatgtttatcacttacttacaagttcttaagcaccagagttgagttgggcctctttctgcccctgggatcactgggcatgtcctcgtcagtgcctgatttcttttgctcagtgtgtttgggggatccttctatttcattgcctggtcttcgctcatttcctattgcagttccgtgcatggcccattacatgaacacaaccattgttttctctcttccattgttttctctcttctgctattgatggactcggggttgcttctgatctttggctcttaggaaggttgccccataaacatcctcttacctgtctccaggtgcacctgtgcacagtgcctgccagaaaagtacctgggggtggaactgagtttcttcactttggcaggtgctgcagacggtcagcttctcttctcaccagcagtgggagagccccctgtgctccagccctccccagagctggggatcatcagacctgagagccacaggtcctcgtccatgtgtagctgaccagatgtgaggatgctctgcccatgtttggggacagcttcttttcctctccccatctggctccccgctgctccctgtgtgcccaccccacctgccccggtgtttggctggcctcctcttcctgctgagccagtgcctctaaggagctgccagcagtggggatgcgccaggcctcctccagttctccagggcgcaggctttctgcagcgaccatcccgggtctcatcgagctctgcaccctgcacccgcagcgctgacctcacggagtctgcccctctgctgcagcttgccctggcctcctgcctgcctctttctgatcctgtcgtcttttgcctccttggcctccctcctggccttgctgctgtctcccttcctcagcttgtcttttggggaatctctaaccttccagaactccctctgcccatatggagccccgatctgggcagcaccacccctttgcaaaactcccctccgtccacacctccctggggcttgcaggcaccatccaaggaacagcaggactcaccatctcagtgagccagggcagggtagcccgggtctgaggcagcgtgggattgggagtctgagccatggcgtgggctatgggacctgggccaggcagcaaatgtctctaagctctcctgttctcatccataaaagaacataattataaggattcagtgagagaatatccacggcagtgtttgggagtgatgtgctacctggctcagaagtcactgtgaacatcattgtccctttctgtaatgtagctttctgtcatgcatctagctagtatgtaaggagaacctggtgcacacaggctgttacttcaccttatcttgttgtggagtgctcgtaactgcccgccaggaggtaggcaccgtgttcctctctgctttacagaagaggaaaccgaggcctaggaagggggctggccttggctgagatgtcacccctgatgacaggcaaagctgggaatctcatctctgtggccagactcccagcaccatcatgcacggctttctggagcaaaggcagaatgatgaggagatcacaggcacggaggcaggagtgtgaaagcatcagaatatgccaccccaaaggatgccgctttgacataaggattattttgagctgaaggcaactgagaaacagccagatgcagaaaaagctctctactccccatgctcccatctgcctcaagggagggcagaaatttatctttttttttttttgagacagagtctcactctgtcacccaggctggagtgcagtggagcgatcttggctcactgcaatttcagcctcctcggttcaagagatcctcatgcctcagatccccaagtagctgggatgacaggcatgcaccaccgcactcggctaatttttgtatttttagtagagacggggtttcgccgtgttggccaggctggtcttgaactcctgacttcctccttcaacacctgcctcggcctcccaaagtgctgggattacaggcatgagccacggtgcctggcccagaaattcatttttgtgaaggattcctcctcccctctcctgtaccagaaagaagccacaactcatcaccggagatggcaccaacctgaatagtcataacctttaacaacccttatcttccattatttcccccgtatgtatccctttccacatttgccatccctagaagctcaaaacatttttcctttgtcttgtcatgtctccacaatttttttattttttttgaaacagagtcttgctctgtcacccaggctggagtgcagtgacacgatctcgactcactgcaacctccgcctcccgggttcaagtgattctccagcctcagcctcctgagtagctgggattacaggcatgtgccaccatgcccagataatttttgtatttttagtagagatggggtttcaccatgttggtcaggcttctctcaatctcctgacctcgtgatcctcccgccttggcctcccaaagtgctgggattacagacatgagccaccatgctggccacatctccacaatttatggctctttgttaagatgttacacaggctccaaatgctaaccacctcagagagtcacatttctttgtgaatgcccacgcatatgtatataattaaatctgttcttttctcttgtt

SEQ ID NO: 518 - DNA, 4000 bp, Homo sapiens
atgagcctcagtttcctcatgtaacatggggatagtaatagcacttactttctgcggtggtgattgttagtaatggagggagatggtacttatatgtcaaatactgtgctaagcaatttgtaagtactcaatgactcttggcttttgttgcaccgagccttttactgggctgtctgccctatgcagagcacagctgtacatcatcagtgttgggttgaatgttgagctgaactatgttgccacctgggccactaaaatgcttttttctttttctttttctttttttttttttgagatggagtttcgctcttgctgcccaggctggagtgcaatggcatgatctcggctcaccgcaacctccgcctcccgggttcaagcgattctcctgtgtcagcctcctgattagctgggattgcaggcaggtaccaccatgccccgctaattttgtatttttagtagagatggggtttctccatgttggtcaggctggtcttgaattcctgacctcaggtgatccgcctgcctcagcctcccagagtgctgggattacaggtgtgagccaccgtgcccggccaactaaatgccttctttcccataacccagactttctgcttgaatccccatgaaagtcctggcttcagccaataacttgggcgaaggtgcattgcaagtgaggcaactggtgtgatcaaagcaggtttgtgtgttcacatatgtgtatatatggaggtgggcggtttaggaggaggcttggtgtcaggactacttgagaggatgctaaggacataatcagatatttgggggactaggaatataggaatttaaggggattgctctgattatgtgaaactggttgatgaaaatcttggtgtggtgggtaacaatatggacggagggggctgggcccagtagctcacacctgtaatcccagcactttgggaggtcaaggcaggaagatcgcctgagctcaggagttcgagaccagcctggacaacatagcgaggcccaatctctacaaaaaaatttaaaaaattaggtgggcatggtggtgcatgcctgcagtcccagctgttcgggaggctgaggtgaggactgcttgagcctgggaggtccaggctgcagtgagctaagatgggccactgcactccagcctgggtgacagagtgagaccctgtctccaagaaataaaaattaaataattaaagaatatgggcagaagggagggtatggacatgtaagtatgggggagaaatcttaaacttgttaactaacttgctcttgggaagaagtcaaacattatttcagtatggatggagtagtccctgagaaaatcaggaagaataggtttgcagcaagacagaatttgattatttcttcaaatgaggcaagccagagcttttagcaggtcatgagtgatcacagtgtgggattattcacatactcagcctctctccagtgcttgtttctcctgctgccctaatagcagttgtttccctttgatagtcttcctggagcttgggcttgtcactgtccccagacctggaaggtaagctcctgaagcctggtatgctagttacttttcagaatatcggccttgataccactggtgcattcatgatagaggccgtggtctagagcctgccccaaccctgcaggggaacagggaaacattggctttctgagctacgggatttccaggaaggtttgttctccagccagaacatattgggtttctggggactcttcttgccaaaattcactttcattgagcaagcatttagcactgccagaatgttggggagagaaggttgctgaaatccagttcatcctaaggcctcaggatgttctgtgaataggctttgtgtccatcatttagcaccctccccatggcttggtccagggacccctggtctccttgaggagagaattaccctacctttccctttctcctctgggcttagacttagcagttctgggagaggggtatgtttggtattgggaatgctgcctagggtatggccactgtggaggtacagctaaaggctttctcctcattaactctaagactttactggtttggctgtcatagcatgatttgaatttcctgtgcttttacatattccatgtttctttcctgactttattacaagtaaacagatccattgttctgtgccatttaactagttagaacacgtttagctgcatttagcagaaagcgctaacttaagcggctgaaatggaagggaacttggtcttacctttttgggaagctgttttccagaagccacccagtttgttgtctcgtggcctaaaattgggtcacatgtctatttttgaatcaattgttggtaaagggaatagaattattgaagaaccagaatttaaccctgtaagttatcgtcattcttggtttgtgtttatgctcatagttcacaaaggccaatggacctcccacttcccttccctgttaatagagtctggcttaaaagacactcagtagctatctcctaggggaaggcctagctgcactctctgttcacttcattcccacttccttttaccactgacctcccacagacttatttaactgcttcctttgggagggactattctttcctctcctacctgacctcccctgcttaacagattttccatgatatgctttgtggtcctcagctgttttactttcaggatgccttctatatcctcagcttctcttaacttttattttgcacatccttccagcactgattgcttgtgaactcatctcgtgcctgcaagacatcaaaagtttctccaaagacatcccttcctctctgccctcatcctatatcaaggtcttagctccttgaagactgcattaatgtgtcttttgccttcatcccccccccccaccctcccgcttcctctagtccttgtgtttaccaaaatacttttgctaaaacctgtatgtctagcttctgctgatactcttagcaatactcccttatttccttctggcgccatttgccaatcaccagctaatggctttgctctttgcatggtacctgtttctgtcctactagcttctagtctgaaaaggaagcctttactagcagcttcaacccagtcctccttaccttgcacctattaacgttggttcaacatgaaggggaagtaagataagtggaagaggatacacaggaaaggtggaactggattcaggtatctgtgttctgccattgacacttgggactgcgttccagcttccacctgtggaaaccagaaagcatttgccaaaaattctaaacagagggtctatttctgaagctgaggaatcacatggagtgaatagcatgggggaaggggattactaatgaggctgaaagaaaagtaccaggaagagactgacttcatgcataatccataaagccaggttttcttgaaaggtgacctgctttcttgtattcctgcaagtacacggcagggtgggcagttccaggcttatagtcattattccctaacaaacggtcaagacttaggctgcccaagactctactacccttgtagtcaaaaatccaaccaccttgacctttacctcattatctgaccctttagcatggagtcctaaaatggtcctgaatggacaaatatctagaactctggtaaattaacttgagtagcatgggaaataagtatcacctcatagcaggactgaaaaacctccagttaggaaaggggactcagaactgtactgtattctgtagaatctttatccgtaagtgctatgtatatactaatagttaaggtgaataataaaacaattgtgagctaaggaatgtgatacagaacacaaggagtcaattaatgcatgagtcttaagggaaattcttagacttcagtgggtctaagctcagaactctgagcttagagaaacaggatgccccagtaaacatgatttgtttgagagaaactaccatatgtaatagatgattcctcaataaactgttttcactaggtc

SEQ ID NO: 519 - DNA, 3938 bp, Homo sapiens
gagctgctgccgccgccgggcggacgggcggacgggcggacgcgcggagctgggggcggcgcggcggggccggcggggcgcggcggggctgaccggccccgatgaggcggaaggagaagcggctcctgcaggcggtggcgctggtgctggcggccctggtcctcctgcccaacgtggggctttgggcgctgtaccgcgagcggcagcccgacggcacccctgggggatcgggggcggcggtggcgccggcggcgggacagggctcacacagtcgacaaaagaaaacgtttttcttgggagatgggcagaagctgaaggactggcatgacaaggaggccatccggagggacgctcagcgcgtaggaaatggagaacaaggaagaccttaccccatgaccgatgctgagagagtggatcaggcataccgagaaaatggatttaacatctacgtcagtgataaaatctccttgaatcgctctctcccagatatccggcacccaaactgcaacagcaagcgctacctggagacacttcccaacacaagcatcatcatccccttccacaacgagggctggtcctccctcctccgcaccgtccacagtgtgctcaatcgctcgcctccagagctggtcgccgagattgtactggtcgacgacttcagtgatcgagagcacctgaagaagcctcttgaagactacatggcccttttccccagtgtgaggattcttcgaaccaagaaacgggaagggctgataaggacccgaatgctgggggcctcagtggcaactggggatgtcatcacattcttggattcacactgtgaagccaatgtcaactggcttccccccttgcttgaccgcattgctcggaaccgcaagaccattgtgtgcccgatgattgatgtaattgaccatgacgactttcggtacgagacacaggcaggggatgccatgcggggagcctttgactgggagatgtactacaagcggatcccgatccctccagaactgcagaaagctgaccccagcgacccatttgagtctcccgtgatggccggtggactgttcgccgtggatcggaagtggttctgggaactcggcgggtatgacccaggcttggagatctggggaggggagcagtatgaaatctccttcaaggtgtggatgtgtgggggccgcatggaggacatcccctgctccagggtgggccatatctacaggaagtatgtgccctacaaggtcccggccggagtcagcctggcccggaaccttaagcgggtggccgaagtgtggatggatgagtacgcagagtacatttaccagcgccggcctgaataccgccacctctccgctggggatgtcgcagtccagaaaaagctccgcagctcccttaactgcaagagtttcaagtggtttatgacgaagatagcctgggacctgcccaaattctacccacccgtggagcccccggctgcagcttggggggagatccgaaatgtgggcacagggctgtgtgcagacacaaagcatggggccttgggctccccactaaggctagagggctgcgtccgaggccgtggggaggctgcctggaacaacatgcaggtattcaccttcacctggagagaggacatccggcctggagacccccagcacaccaagaagttctgctttgatgccatttcccacaccagccctgtcacgctgtacgactgccacagcatgaagggcaaccagctgtggaaataccgcaaagacaagaccctgtaccaccctgtcagtggcagctgcatggactgcagtgaaagtgaccataggatcttcatgaacacctgcaacccatcctctctcacccagcagtggctgtttgaacacaccaactcaacagtcttggaaaaattcaataggaactgagccctcatgtccccttggcaggccccccagggtctggcactcactgcagacttcctctttcaagggaggcagggcccctgtgggcactaggtgtaaaaggtgctggccaaatggttcagggtgaagagggctcttgattcaggggctggggtctgcctggtccttgagcccctgagttgtgggggtagggtgaagagcatatcccacaagaggccccacagggagcagagactgctttaatccctgctgacatcacggaaaagcaacagagccttttcaactttgtcactatgtccccttgaacattatgtgggagaacaccaaggtagcctaggccacccaaaagtgagtcctgcgaggttgcccagccctcagatggctctcctacatgatggtgctttagaaacaaaggtaaaatttgcctgtttggggcagcttttagtatcgatgccactcatctgcagcagaagagaaagaagtcctcttggggctttttagtttctgccgtcctgggggaaacattgcagttactgcacagcttctgttctctgtcacaaccccaggtgatttggtccggtcaaaggccatacttggggccctaagagtgttcagtattgaatgctgatcagctgccaggtgaggagtcagaagagggagcccccctagacatttctttgcagctatggacatgcgggatatctccccctgctctctgggtatttgaaatgtcaattttagcactctccaggcacaaggacagcccagcaccagctttacagggcagtgtttcagatggccctgagcccacggaaaaggccaggtagacctccaaactagaaatgctggctgatttgccctgatccatgcttccatttccctgtctctcttccccaggcaattactggcctcaaaagaggaacagaggtgctgcgaggtgctcacctcacagagtctggaggcctccaggatcaactgtgggcaaagtgcctgcctctgacctcatcatggttctagttctcatacagaactccagaatttttaaagaactctataattggattgcaaactaggatgctacataggattctggtattccacatccaatatggatttctagaatgctgtgattaaaggagccagccaggtgtaatacagtcaaggcagcccccagcctagagacaatctgtgaaatccaaagttggtggtgttgggaaagcagggggacatgtgtccctcagctcagcagaggctgtggtacaacatggtccttggtgaagacctgcacccctggaacctcccaccatcatcacaactgtagtctcatttgcagtggagaaaagaacccgatgtcccacagccagatatacacccagctccatgccagcccttcatgtttaccttttgctttgttaattacatgtcagactcctagagggcctccagactaataggaagcatttctgtaaccaacctgccacccactgattcagaaatggaaatcacattccacaatctatggcttccaccagctagcccaggaaatacttgaaatcagcattccaattagtgttgagtctcttgattgtgtcatttaccaattaaataactgagacctaagtctgggaacagagccacgaatctgcctttgagatgctggcagatctcaaggccatcaattattgggggagggagggacaaacactcccaatcatccaccagtcagactgaatgtgtagctggcgaggaattacttccacttctggcccagcacaagccctgctttggccacctgtctgcaagagaggcggcccctgtgcttgcaacgcttacgtgttcatcccagtgtccttttccaaatgagtgctgtagctttagaagtggccctctatagaaagaagtcaaaagatgaggccccttctagaatctaggataacaagagtgttgacagtttgaggagtcgaattgagattcatcatcaaagagcaatgcagcgtcgttaaaataaaaactgtgccttttaaaaag

SEQ ID NO: 520 - DNA, 4384 bp, Homo sapiens
aagtgaccgcgcggtgcgccggcccgcgaggaaacgcgctcttagaccatggcgacccaggcgaagcgtccacgggtggcggggcccgtggacggcggcgacctggatcctgtggcctgcttcctgagctggtgccggcgggtggggctggagctgagtcccaaggtgagcgagcgtgccgcgggccgcgctcctgtcgcagcacacctgctccatcggcggcctgctggagcgagagcgagttgcgctgcagagccagtcgggctgggtgccactgctgctggcgctgctccacgagctgcaggccccggcctcacgctggaggccctactttgcgctctggcccgagctgggccgcttggagcacccgatgttctggtgagagccttgggaggggttggggagcgcctgcaccgtagcctgctgcaagaacagtttccccgcccctgcaccagtcctacccagtaaagtgtgtgaaggaataaagggaacctgggtgtgggtgtccctgcaggccagaggaggagcgccggtgcctgctccagggcacaggcgtacctgaggccgtggagaaggatttggccaacatccgcagcgagtaccagtccatcgtgctgcccttcatggaagcccaccccgatctcttcagcctcagggttcgctccctagaactctaccaccagctggtggcccttgtgatggcctataggtcagtgggtggggcctctgaggacggaacccttttctttacaactctatagagggacaaaagtggaaaaacagtgaaatccacccccagtccctcacccaagacagggccttagccaggttctgtcaatggcagctttcaggaaccactggaggaagaagaggatgaaaaggagcccaactcccccgtgatggtgcctgctgcagacatactaaaccacttagccaatcacaacgccaatctagaatactctgcggtgagtggagtttctcttggtgcactgattgagcatgattcaagccattgtgtcttaggctccattctcttactagtgctacaaaatgagtaggtgaaatcagctcctcctgtatgtccttttagtatgcatattactgtagaatcatttgaatgcgaaacattttaaagtcctcaaagtaagttgtggttaatcctctgataaactatactaccatcatttatttagtgctagacattgagtggtctgcatagccatgtttcattcctttctggctgatcacatcagtgagcccagactgtgtgtggctctgtggatagcagcctggaacagtgatagtctccgtgttttggagggatgaggacattcacaggccaaaggtctaagacgatcctagaactgatataaagctgtgtttataccagctctattctatataaaaagtagcctgaaaagatggcacatttataggatcagaaattagtaagtatggttatttcttaatccttgcctccattttcctttcccactttgatctgcgaaagttccattttttcccccccgaggcggagtctcactgtgtcgcccaggctggagtgcagtggcgtgatctcggctcactgcaactgccgcctcctgggttcaagcaattctccctgcctcagcctcccgagtagttggaattacaggctcctgccaccatgcccggctaatttttgtattttttagtagggatggggtttctccgtgttggccaggctggtcttgaactcctgatctcaggtcatctgcccactttgacctccctaagtgctgggattacaggtgtgagccactgcgcctggccgaaaatttcgtttttaaagctagcaactttttaagtgctgaagaggactgtgcagaaatccacccagttaaacatgaagctggccctttaaagttagcccaacccttttttgtttcacagtttagggtctaacaggaactaaaggtagaactttggtagttaacagcatcagtcatggctgaactacacctgctgaaggctcttcttaagtggaaataatcttcatggggctggcccgtgaaaggcatggccccagcttctccctttcacctcagaattgtcttcggatggtagccactcagcccattcctaaaggccatgagattttcaacacttatgggcaaatggctaactggcaactgattcatatgtacggttttgttgaaccatatcctgacaacacagatgacacagctgacattcagatggtgacagttcgtgaggcagcattacagggtgagtgtatcattaactcaatatttgacactgatggtgtgtctatacccatgcctcaggttaaatagctttgctaaatagcagttgactttatagactgggtggcagactaaagaagaaatgaacccttgggtgtactgagactttcacattgctgtttcatctacaggaacaaaaactgaagctgaaaggcacctagtgtacgagcgctgggatttcctatgcaaactggagatggtaggggaagagggagcctttgtgatagggagggaggaggtgctgactgaagaggagctgaccaccacactaaaggtactgtgcatgcctgctgaggagttcagagagcttaaagaccaggatggagggggagatgataaaagggaagagggcagcctgacgatcacaaatattcccaagctcaaagcatcgtggagacagctgcttcaaaatagtgttctactgactttgcagacctatgccacagacttaaaaactgaccaaggtttactcagtaataagggagtctatgcgaaactcagctggagggaacagcaagccttacaggttcgctatggtcagaagatgatcttacatcagttgttggaactgacaagttagcagtttccctgttccctgaaggaacagcaataagaactttattctaagctaatactcattgatgtttgaaaaagaggaaaatttggatctttcttttgcttactaaacaccaagaggaaaagtagcaaagttggtgtgctaggattaactcaggtaagggtgatgtgttttaggattgagaacagcagacttgggaatcactgctaattgttacttaaagcatgttacagctgttttgttctcagttttaaccaaagccagtggacatacggtagtaataagtaagtcttgttgtgtttcagcatttaataatagactttggaggtagacccctggtttaaatctaagtctagtttgaggaagtcacttaacctttattgaaaagactctggatttaataagctgtgtaactggtactcgatagttacccaaagttcagtctagatggcacaaaccacctctcagggaataaaccctaagacatcactcaaggaggacttcaattatttaattttgaactgttttgtcctctctggccataaaacttgacagtcatgaaaggtaaggcaaattttaagtgggttaagtttttaaatacgtatctactcattttctttaaaaaaaaaaaaaaaatacctgggggaaaaggatattaaaactgggtattttaaactcagcttaaccagataaacctgctccagcatttgtccagtgttgaaataaataggaagaaaaatacaatttccttaaacatgccagcttagtagtaggaatgacctatcaatcaatcaatcaatcattcagcaagaagttagttgttggttccccatggccccaaggtctacagggctggattgtccacttttcctcctcaccaccagcactgcctgctgctactgagaaaggcacagtggactcatgtgtgtgtcatgactttaatggttagctacagtatgcatacacatacaagaagtaggggagctgaagcccaggaaaaggttacaaaatacaacacagggaccaatacatttgcaaaacattcaaaatccttataaaaggggctgtattggtcctttcaactttgtcattattcagcttagcctgtatggccattcattcagtggggtaatgggggagaacaattaattaatgagatttggttccctttcctatattcccactgtttttaagtttcaggagaggattgtgggggtgagggtagggggtgggctttaggcctggtctggtttccctttatataaagagctgacccccatctcaggcggctgaggtgtataatccccaaaagaaataagatggtacaaatgcagtcagctttggaatacgtttgggtagagacaaaatgaaaactcatgggattccaatagtgagcccttcccatgttcctggacatatccaattctagcacatccacatttttaataacttagtgattttcaaggtcccctgtccacattaaaaaaataagttacataat

SEQ ID NO: 521 - DNA, 3791 bp, Homo sapiens
aaaacaaactttaaaacaacagcagttaaaagagacaaagagggacattacataatggtaaaaggccatgtccaacaggaaaatattactgtcctaaacatatatgcatctaacactggagcttccaaatttataaaacaattactaatagacctaagaaatgagagacagcaacacaacaagagtgggggacttcagtactccactgacagcattagacaggtcatcaagacagaaagtcaacaaagaaacaagggatttaaactataacttggaacaaatggacttaaccgatatatacagaacatttcatgcaacaaccacagaatacacgttctattcaacagtgcatggaactttctccaaggtagaccttaggataggccataaaatgagcctcaataaatttaagaaaatcaaaattatatcaagcactctctctgaccacagtggaataaaactggaaatcaactccaaaaggaaccatcaaaaccatgcaaatacatggaaattaaataacttgctcctgaatgagtattgggtcaagaacgaaatcaagatggaaattaaaaaattctttgaactgaatgataataatgacacaacctaccaaacccctgggataaagcaaaggtggtgctaggaggaaggttcatagccctaaatgctgatatcaaaaagactaaaagagcacaaactgacattctaaggtcacacctcaaggaactagagaaacaagaacaaaccaaacccaaacccagtagaagaaagaagtaaccaagatcagagcagaactaaaggaaattgaaacagcaataacaacaacaaaaatacaaaagataaacaaaaagctggttctttgataagataagtaaaattgatggactattagcaagattaactgagaaaataagaaagaaaatccaaataatttcactaataaacaaaacaggagatattacaactgacaccactgaaatacaaaggatcattcaaagctactgtgaacacctttatgcacataaactggaaaacctagaagagatggataaattcttggaaaaacacaatcctcctagcttaaaccaggaagaattagataccctgaacagactaataacaagcagcgagattgaaatggtaattaaaaaattaccaacaaaaaaagtcccggaccagatggattcacagcagaattctaccagacattcaaagaagaattgataccaatcgttttgacactattccacacgatagagaaagaagaaacccttcctaattcattctatgaagccagcatcaccctaataccaaaatcagggcaggacataaccataaaagaaaactacagaccaatatccttgaagaacatagatgctaaaatcattaacaaaatactagctaactgaattcaacaacatatcaaaaagataatccaccatgattaagtgggcttcataccaaggatgcagggatggtttaacatacacagttcaataaatgtgatacaccacacaaacaattaaaaacaaaaatcatgtgatcatctcaatagatgcagaaaaagcattcaacaaaatccagcattgctttatgattaaaactctcagcaaaatgggcagacaagggacaggtatgtcccttgtaataaaagccatctatgatagacccacagccaacataatactgagtggggaaaagttgaaagcattccctctgagaactggaacaagacaaggatgcccactctcaccactcctcttcaacatagtactggaagtccaagccagagcaatcagacaagagaaagaaataaagggcatccaaattggtaaagggaaagtcaaactgtcactgtttgctggtgatatgattgtttaccttgaaaactccaaagactcctccagaaagctcttagaacagataaaagaattcagcaaagtttctggatacaagattaatgtacacaaatcagtagctcttctatataccaacagcaaccaagcagaggatgaagtaaagaactcagccccttttacaatagttggaaaaaaaaaaaaaaaggaatatatctaaccaaggagtcaaaatagctctacagggaaactacaaaacactgctgaaagaaatcatagatgatacaaacaaatggaaacatcccatgctcacgaatgggtagaatcaatattgtgaacatgaccgtactgccaaaagcaatctacaaattcaatgcaatccccatcaaaataccaccatcattcttcacagaattagaaaaagcaattctaaaattcatatggaaccaaaaaagagcctgcatagccaaagcaagactaagcaaaaagaacaaatctggaggcatcacactacctgatttcaaactatattataaggccatagtcaccaaaacagcatggtactggtactggtataaataggcacatagaccaatagaatagaatagagaacctagaaataaacccaaatacttacagccaactgatctttgacaaagcaaacaacattaagtggggaaaggacacccttttcaacaaatggtgctggcagaattggatagccacatgtaggagaatgaagctggatcctcatctctcaccttataccaaaatcaactcaagatggatgaaggacttaaacctaagacctgaaactattaaaattctagaagataacattggaaaaattctagacattggcttaggcaaggatttcacgaccaagaacccaaaaacaaatacgacaaaaacaaagataaatagctgggacctaattaaactaaagagcttttgcatggcaaaaggaacagtcagcagactaaacacaacctacagagtgggagaaaatattcacagtctatacatctgacaaaggactaatatccagaatctacaatgaacacaaatcagtaagaagaaaacaatcccatcaaaaagtgggctaaggacatgaatagaaaattctcaaaagaagatatacaaattgccaacaaacatatgaaaaaacgctcaacatcattaatgatcagggaaatgcaaatcaaaaccacaatgcagtaccaccatactcctgcaagaatggccataataaaaaagtcaaataacagtagatgttggcgtggatgcggtgatcagggaacacttctacactgctggtgggaatgtaaagtaaagtatacagccactatggaaaacagtgtggatatttcttaaagaactaaaagtagaacttccatttgatccagcaatcccactactgggtatctacccagaggaaaagaagtcattattcaaaaaagacacttgcacacatatgtttataggagcacaattcacaattgcaaaattgtggaaccaagccaaatgcccatcaatcaacgagtggataaagaaactgttatatatatatatgatggaatactactcagccataaaaaggaatgaattaacagcatgtgcagtgacctggatgagactggagactattattctaagtgaagtaactcaggaatggaaacccaaacatcatatgttctcactgatatgtgggagctaagctatgaggacacaaaggcataagaataattcaatggacttcggggacttgtggggaagaagaggaggagggccgaggaataaaagactaaaaatatggtgcagtgtatactgttcgggagatgggtgtgccaaaatctcacaaatcaccactaaagaacttactcatgtaaccaaataccacctgtaccccaataattatggaaaaaaaaattaagc

SEQ ID NO: 522 - DNA, 1748 bp, Homo sapiens
agcctccgcccgcaccgagccgcgggacccgggccgtaccggggaggggccgctccgggccgcagcgcgagggcagcgaggggcggcggggacctggcaccgggcggggccggcggcagcgaccatgatcgctttgttcaacaagctgctggactggttcaaggccctattctggaaggaggagatggagctcacgctggtcgggcttcagtactcgggcaagaccaccttcgtcaacgtgatcgcgtcaggacagttcaacgaggacatgatccccaccgtgggtttcaacatgcgcaagatcaccaaagggaatgtgactatcaagctctgggacattgggggacagccgcgtttccgcagcatgtgggagcgctactgccgaggagtgagcgccatcgtgtacatggtggatgctgctgaccaggagaagattgaggcctctaagaacgagctccacaacctactggacaaacctcagctgcagggcatcccggtcttagtcctgggtaacaagcgagaccttccgggagcattggatgagaaggagctgattgagaaaatgaatctgtctgccatccaggaccgagagatctgctgctactccatctcttgcaaagaaaaggacaacattgacatcaccctacagtggcttattcaacactcgaagtcacggagaagctgagactccagcccttctccctcagaccagggaccgtcatcatctaaacctgaagccgagctccccgcccacccctgtcgtccccctaagcccacccctcctcacccagtgtgaggagggccctctggggaccccagagtcctgttctgctgaggtttgaactcctgtttttattgtaaaataaattgccccccattctggtcccctaacttctcacccttccccgctgcctttgtcccatcacccagccctgcctccctcccagcagccctgggccacagcccccgcccctggcttttccccggcccgctcttgtacctcccttttcaacactctctgttattgtcctgtgtgtacagtatatatatgtatatatattttaattttttaatttaagcaaagactaaaatcaaccatttgatgctgcaggggcctttcaggatctgggagggggcagtctggagagaaggagggagacgcaggtggacttggggcaagttcagatcagaagaggtgcaggctggcacctgcggcaggtgccagcctgggcactggtggccgcctccctgtcccgtgtgtttccaccgcccaatctggcttgtcctggcagtgcttgaatgccacaggctggcaggggcctctgggggcccctcccctcgacccccagcctgggtagagccaccaggtacgacgaccaggtaccagaaaccaccaggcacacggggcagaaagccagcgtccatgccccagcagccccctcctgcctgttcctggctcccagctcccgcccctccccagggcccccacctccacggcccacttcattttctgttctcattttgcagagttgcacaaggagagaactcagcatggggggttggttctttgggttctgtttgtttatttgtttaatttaatgatttgtaaagtgatgttcctcttccttttttacacttttcagctcatatttaacctctgtttggaaaatgattcttgtaactgtacatttttttgcttcctaataacaatgacaacaaaaaaaataaatgaccagttttgtgttggg

SEQ ID NO: 523 - DNA, 1958 bp, Homo sapiens
ataaaaagggcttaataatcacttgtttattttcccttttctttccagcagaaagtcacctcgtcatcaatgtgactcaaactaatcatcccttaaccctcgagtttgatgcttgttcagttatctcatgtggagatgaacaagctcaaaggcagctatcaaatgtagataagtatttatgtccataccgtattgagtcaaccaagtataagtatggagccttaaaaagtccctgtggtgactggacagatgtttggcagaccacccaacatggacggtggacagccaggccccctttttcaaagaagttgcaaggactaaaacagaaactccaacttattcatggtcccactccaccaaattgtaagtcattgcagtgtaaccccttattgctaattatagataatctccaaacaatggcccaagaaccctccatatttgaacggtattggttaggagcaaatgttacaggacgagaccccataggaatcttctctctgaggttagctagagcatcagctaagaacaataaagaaatccagacccagagtctggagaacatgtgggacccaacactgtgcccaaacatatcaggctcagcgctctcctcccatctctagaaccacccaactaaggtaatggttgtagaggtaaaagatttaaggcagaccatagctctagagatggggtacaaagatgcaaatgcctggctggaaaggattaaatattccatctgcagtctaaacaaaaacgattgttacacttgcgtgcactgcaggccagaggcctaaatcatcccgtttccactcgtatggtcctccagccgaccaggcacaaattgtaaggtagctctctcccaacaccccacagcctggggtcatgaatcatgcggagctctctctctgctattccccaaagtccggcaccctgtgggtcagtccccgaggtccatccagcttccatctcctgatgccagttttaccttgtgtctctcatgacagagagaaaacttagcatttctgggagacctaaagggatgcagtgagcttaagtcattccaagagctaaccaatcagtctgccctgatccattgccaagtggatgtatggtagtattgtgacggaccattgctgaacactttgccaagtagctggagcagagcagcacttgcactctgatccaactggccatccctttcaccctggcatttcattaaccaaaaaggataaaaacaaagcatcataaaacaagagatgtccctcatgggtcctttgaccctcatgtttatatagatgccattggagtcccgagaggagtcccagatgaatttaagtcccaaaatcaaataattgctgggtttgagtccctactattctggtggttaactataaataaaaatgtaaattggataaattacatctattacaaccagcaacaatttgttaactatactaaagatgctattaaatgaacagctaaacagttaggacccaccagccaaatggcttgggaaaatagaataacattagatatgatactagcagataagggtgaggtctgtgtcatgattggaactcaatattctacttttatacctaataatactgcttccagtggaaccataacaaaagcattacaatgtcttcctgttttatccaatgaactagctaagaattcaggaataaatgatcccttcactaatttaatggaaaaatgtttcagcagatgggaaggacttatgtcctcaatccttacttcttttgctgttataataggtgtgcttattcttgtaggatattatattgtattctgtgcccaaggcctagtacaaaggcttatagaaacagctctcacaaaaacctcccctacatctccttctccatattcttattcctaggtgatcaagaagaacagcaaagccaaattatattagaaaaatttgaagaggaggaattatt

SEQ ID NO: 524 - DNA, 2330 bp, Homo sapiens
ctccaagagcagggttggtagagctgagggatgagagatttgcctgtcctggagagtcaccacccttccagctttggggaggcccccagggaaagtgagggagaagatatatgaagattgctgaattacgtgcctccttcggagaaccccacccagtcccgggcccagggcagtaacttgcccattggaaaggggaaagcagaggccacactcagtgacaatggccacaaggaacattggctagcatgtggatgacctctgtttccttacaggctctgaagcccttccatgaatccccggaagaaggtggacctgaaactcattatcgtcggagccattggtgtgggaaagacctccctccctcaccaatatgtgcacaagacgttttatgaggaataccagaccacactgggggccagcatcctctccaagattatcatattgggtgacacaactttgaagttacagatctgggacacgggcggtcaggagcggttccgctccatggtgtccacgttctacaagggctccgatggctgcatcctagcttttgatgtcaccgacctggagtcttttgaagccctggatatctggcggggtgatgtcctggccaagattgtccccatggagcagtcctaccccatggtgttgttggggaacaagatcgatctggcagaccggaaggtaccccaggaagtagctcaaggctggtgtagagagaaagatattccttactttgaagtcagtgccaagaatgacatcaatgtggtgcaagcgtttgagatgctggccagtagggctctgtcgaggtaccagagcatcttagaaaatcacctcacagaatccatcaagctctcgccagaccagtcaaggagcagatgctgctgacctccagacgcctgctctggaagcccagaaacagagcctgccccgagcctggtcaccccaggcttgagaacaggtgaccatccccctccagccccactgcctgcccaagcacagtgcagggggcctaagctctgcggcagagcccttgaccctggtgctgggcccagagtcagagggcagcccctggctcaggctgagtatagtgagagcgtctggatgaagcccggaatgtcagagccaaaccctggtcctgcagaagtcacagtttccgcagtggctccagctttccccacccatccacccctcaaacactcccgctccagaacacacatctccgcagaccggccactgattggagtctggttacatcctcctgtggacagaccttcctcacccgctcccacctcacacccctcagccacaagcaaagctttggacaatggcacagctcagcctccttcaacgagcagactaaggagtaaaggtctggaccccacatgctgggcccgcctcagctcctggcagaagctgtcgtgcctgagaccccctctgctccctccagggtagaagactgagggagcacaggagaagccacaagggaccatggctcattcctccttgctgggtgctcaggcaactcacataaatctctgagtctcaatttgtttatctgtcctgtgggggtgagatgtgccttgccccctgtatcacagtgtggttttgaggaccagaagctgtgcttaaatccagtagctgttgtcaatatgcatttatttacttctttgacaagtttatttttgcgtatctactatgtacgatgcattgaagtccagtgacaaacaaaacacagggactctgccctcctggagccgacatctggtgagggagagacgcagactctagacagatatttccaaatagcaggcagcacagacagggcctagcctggagagggtggacaagatgtcctctcagggtcttcaatggccaagtccaagcccactgcagaatctttctgtctacccgtaagtatcctttcctgagttccaggcaaagctggggatgttagcctatgactgtcatctgacttggaaggtacacctaggggccggggggaggtcagcaggggagtttgggagccacttctccccccacgtggcactggagtgtgaactggctcattctggacaccagcatggagccagcacgggaacaggggggcagcctagagcacaagctctatctgtgtccttcagagctcctgggaaacatgatgcgccctcatgggaatggcattttgcatatcacacaggctgtcctgggagtcaggcagactggattgtcacgtgcggtgtgcatgcagcagcttgtgcactgcagtggacctgtggaccatttctaaaggtgcacaacaaataataaatgtgtccttctttgttttt

SEQ ID NO: 525 - DNA, 2205 bp, Homo sapiens
ggatgggagatgacattcctgattctgagtattgctccagtacttgccgtgacaggaatgattgaaaccgcagcaatgactggatttgccaacaaagataagcaagaacttaagcatgctggaaagatagcaactgaagctttggagaatatacgtactatagtgtcattaacaagggaaaaagccttcgagcaaatgtatgaagagatgcttcagactcaacacagaaatacctcgaagaaagcacagattattggaagctgttatgcattcagccatgcctttatatattttgcctatgcggcagggtttcgatttggagcctatttaattcaagctggacgaatgaccccagagggcatgttcatagtttttactgcaattgcatatggagctatggccatcggaaaaacgctcgttttggctcctgaatattccaaagccaaatcgggggctgcgcatctgtttgccttgttggaaaagaaaccaaatatagacagccgcagtcaagaagggaaaaagccagacacatgtgaagggaatttagagtttcgagaagtctctttcttctatccatgtcgcccagatgttttcatcctccgtggcttatccctcagtattgagcgaggaaagacagtagcatttgtggggagcagcggctgtgggaaaagcacttctgttcaacttctgcagagactttatgaccccgtgcaaggacaagtgctgtttgatggtgtggatgcaaaagaattgaatgtacagtggctccgttcccaaatagcaatcgttcctcaagagcctgtgctcttcaactgcagcattgctgagaacatcgcctatggtgacaacagccgtgtggtgccattagatgagatcaaagaagccgcaaatgcagcaaatatccattcttttattgaaggtctccctgagagcctagagtgttgattgtagcaccaaggtcttctgtccacaatttattcagcaagatagctgatgcagtcatggctcacagagtgcactggatcaatgtgaggaccaaaccaaaattttggcagcagctgcatggtctcattaaattaaccaggcacacccagaaaatattctgtatccacatccctaaaacaagattgaactcagctcaagcaacttcgggtccggactctcctcaggaatcaaaccaaaaagcactatttcactaaaagaagtgaagatagttggccagactaaatccaggtatttggacataaatctcaggtggctcatctgccttttcccaggaaaatgcggccccagctttcatcagtgtgtgctttgtcttgatagaaatgcataatcatcaaagctaagtattttttttacctcaaatataagatcctttagcactgattttaaaagtattcgtaaaccacttataaactacgaatgaaaaaataaaggacgacacagatttgtaggggcaagaaaggtgagtagggaaggactagatcatctgcatcgagatttgaaagacacttgtggcttacttgcaaagcttcttttagcattgagcgtacgagggaaattctgttcttgatgacagcgcagtgggaattcccactccaacaacccatgaaatgttactgcataattattcaccttctgaggcccattacgacttatcagcagagaaagaaatttaatttaaactcacccctctgtgctaaagaatgactgggacatgagatcaaagcgcgaagctctgtcctccagtggtttgcaacacctaggcacaatagggtgagagaacgcggcattccagcgcttcccagctttccggaccccggagagagggggtgggggtgtgggctcacatcgccggctggcttgagggaggagagtggtggcggctccggaggtggacgtgtcaattatatcctggagctccgggaagccagattgcttctaccggcggctgcaggggctttgcaagcgaagataggcggccctccttccttccccactgtgggggattggggtcagtggagcccgtggatttagccacgaggggacatgactggagccctgtcacgcgcaggtgtgcgtctccgagagctctttcaatataagtgcgggagaagatttatgctgcagcctcatcacaggatgccttaaatgcatgtacatagtgcgtatctaaccacccataaaagccaagtttaatccttg

SEQ ID NO: 526 - DNA, 2432 bp, Homo sapiens
attggattagcggcagcagcctgccagcctgcccgaggagtgctgggaccagcgcgctgcacgccgactggcacgatggcctcgtctcaggggaaaaacgagctgaaattagccgactggatggcaactctgccggagagcatgcacagcatccccctcaccaatttagccattccagggtctcatgattccttcagcttctacattgatgaagcctctccagtaggtcctgagcagccagaaactgtccagaattttgtctctgtgtttggaactgtggccaaaaagctcatgcggaaatggttagccactcagacaatgaattttactggccagctaggagctggaattcgttattttgatcttcgaatttccaccaagcccagagaccccgacaatgaactctattttgctcatggtttgttcagtgccaaagtcaatgaaggccttgaggagatcaatgcattcctcacagatcaccataaggaggtagtgttcttggacttcaaccacttttatgggatgcagaaatatcaccatgaaaaactggtccaaatgctgaaagacatctatggaaataaaatgtgcccagcgatttttgcccaggaagttagtttaaagtacctgtgggagaaggactatcaagtgctggtcttctaccatagtccagtggctctggaagtgccctttctctggcctgggcagatgatgccagcaccctgggccaacaccacagaccccgagaaactgatccagtttcttcaagcatccatcactgagagaagaaagaagggatcgttttttatatctcaggtggtgctgacccccaaagctagcactgtggtcaaaggggtggcaagtggcctcagagaaacaatcacagaaagagctcttcctgccatgatgcagtgggtccgcacgcagaagccaggagagagtggcatcaatattgtcactgccgattttgtagaacttggtgactttatcagcactgtcataaagctcaactatgtctttgatgaaggagaagccaacacttggtagcactacttggagtttccatgaataagatggagaaagctcattgtattagggcatactatctgtaaacactctgatcttcctattccactgagtctctgaagggaatagggctggtagtgggtgggaaaaggggaaaaactgtttcttcagtgattacaatcatactcttcattactataaatatttcatttcccatttgatgagcaaaatctacttctagtgttaggaataaaaaaaaaagaccagtaactttgtttttcaaaattagtctttgtaacatagaattcatgagtgtttacttgattaggttctctatttccagcctatgactcctacgctgtctataccctgcaacctttctgctccctctcttgctcgctctttttaatcagatgctgtatgggaatcaaaacaattgaatgcccaacattctgtgtattacattgttgtcttaaaacttactagttttgtgggacttgttataatgctctatagtcatccacagttgggcaatcatagctaatttttggtcatagaaaatctgcatcaaatcagtttccatgcatcagtaatattgaaggtcataatcagtgatttttgttatatgaaaataatagtgtttcacagtatttctatttaaggcagctataaatataggagaaaaatgtttttggagagctgtgaatgccaatttcagagggaaaaatggttgaggggtgaaagagatgtatggcattttaatttggcaatctcttaaataatattgccctgcaagtacccagtaaatggtaaggtacaagtgtgttaaaattgaaaactctgaaaataactctttaaaaagccctcttaatgatgctcttgatgaaagaaaaagacagaaggaaggaaggaaggaaggaaggaaggaaggaaggaaggaaggaaggaaggaaggaaggaaaggaagagaggaaggaagaagaaaaagactgcaagctttcctgccaatttgggattttcaaatatttaattctaaattccagattttaaggaagatttttcaagaaactgcaagtttttgacttgaaggaaagaaagaggaaggctggtagaagcagttagagcaatgtgtttgaaattatgtccatgaaatcacagggatctctgaaatatctttaggaaacttgaaatttatgaggtctgaatggacttgtttaaaattggctctgactcctcacttctgagtttcatcctatccgagggatgagattaaggcagaggcaaaagtttcacacaaagtttctgcaacctaacgtttaatagtccgggtctacagggaagaacaatgacacagcttgagcgttacttcctccttcgtgtcattgtgatatttgacaactctaaaaaat

SEQ ID NO: 527 - DNA, 1959 bp, Homo sapiens
atgggggctcaggacgacctgaggaaggtcacccagagtgcctacgcccaggttgtgcagtttggggtgagtgagaagctgggccaggtgtccttcgacttttcccgacacggcaagaccctggtggagaagctgtacggcgaggcaagcgcccagctccttgatgacgaggtccggcacctcgtcagtgccacctacaggtgcgccctggacctgctgacacggtgccgggagcatgtggagaaggtgggccagcggctcctggagaaggaagtactggagaaggcagacatggtggagctgctgggcccccggcccttctcggcgaagtctacctatgaggagtttgtagagggcgtgggcagcctggaggaggacacatcccttcccgaggggctgaagggttggaaccgcggacaggaggaggaagatgtggagagcagcctgtgcagggggctctgtgtagcccgtggcggtcgcctgcacctgctgctgggtggagttggggtgactgccacttacctggggccttggcaaagcagctgcggaatctcacccaaaacaaattaaaacgtgacaactgtgaatgggtgttttagatgagggtgctctgagcccacatgcagggagtaggagtgggagtgggcagagggggtaccctgagtccctgggccctcccgctggaggacagtcgggtccaggcttagacgggagaggccccagggctctggcccctgtggtgctgaggaaggcacgactgtagcttcgagaggggcttgcgtgggacaccttggagacaccaggccttcctggggcctccgtggaggagcgttgatatggtcataaagacactcggaggagcctgggtccagcacagaaaccctctccgtttggtagaattcagaagaggagaacgtcagccaggcatcaaggggaagtcagggttctaaagcagctgtttggatcggtagaagccgatctgctgttctgtccttagaaaggaaaaagcccacaccacccacaggtgcatggctgagggaggaggtggagctgtggggcctcacacctgggttccccatcagggcaccccccgccacccctgcctgcgccttggctctgtggcagcactgctgagtgtgagggaattgagttgcttagaaaacctggcccctgtccttggctggaggtgctttcactgcgggatgtgtctggatcgtcagttctgttcctgtgacccctttttgttggagtcttggagcgggaagctctgcagggccccagccggctcaggggtgtttgtggagagactgtggtcctgaagccccagcacgtggctgcccctggccctggtacctgttcgtgaacacttttcctggggttgggtagctcctaatttttattaggaaggccccttctgggctctgagcttcaggccctttggcgccttgtactgagggagggtttgctttttcttgtctggggtgtgtgggactcgatgaggatgccccgtgtgctttctgcagcacacgacctgcctccaggactcgctggggtcagcaacagcagggcagtgtcagcctcaaccactgccttggggtgggtggatgcgtgtctaggtcacctgggatgagacctggggaagacgcccatttgcatatgtcctgggtgagcggccggaggaggaggccctgcttgtgggtcagctgggatgggacctgggaagatgcccgtttgcagatgtcctgggtgaacagcgggaggaggaggccctgcttgctgccccgggcactgtttgttctcagcctccctctcgacctaggccagatcagacactggggctttgtagtatattttataaatcgcttgttatgttggcctcggagcctcaaaaatataatttccaactgggggtgaacactttcaacttttgctgtttataaaatgcatatcattggactc

SEQ ID NO: 528 - DNA, 1924 bp, Homo sapiens
tcaaatagtttgcccattttttattggaggtttgttttcttatgtagttgtaagagttctttatatattctgagtacaagttctttatgagatgtatcctttgaaatgttctttcctggttgatgacttgtcttttcattatcttaacagtatattttgaagagcagaagtttttaatttttctgaagttgaatttctttctttctttctttcttttttttgagacagagtcttgcaatgtcacccaggccggagtgcaatggcgtgatctcgtctcactgcaacctccacctcccgggatcaagcgattctcctgcctcagcctcccaagcagctgggattacaggcgcccgccaccatgcccggctaattttttgtattttagtagagacggggtttcactatgttgcccaggctggtctcaaacacctgccctcgtgatccgcccgcgtcggcctcccaaagtgctgggattacaggtgtgagtcactgtgcccggcctctttttctttttgtttgagactgagtctcactctgtcatccaggctggagtgcagtgggaccatcacagatcactgcagcctcaagctccccggctcaagcgagccttccacctcagtctccagagtagctgagactataggcatgtgccatcatgtccagccagtttttaaattttttgtatagacagggtctctctatgttgccagggctggtctggaactcctgggctcaagtgatcttcccgcctcagcctcccaaagtgctgtgattagaggcatgagtcactgtgcccagttttaattttcttttatggattttggtgctatacctaggaaatctttacctgacctagtatcacagactttattctatttataagaaatgttatagctttaggttttatgtttcggctatgatccattttgagttaatttctgcatatgatatgaggtatggatgggagttcattgttttccatctggatatgcaattgttccagcaccatttattgaaaagactatccttgacccactgaattttcttcatacatttgttaaaaatcagtgtccataatatgtgggtgtttttctcagactctcttgtcatagtcagtttgggctgctatgacagagcaccataaactgggtggttcataaaccacaaaaatatttttctcatagttctggaagctggaagtccaagagaaggtgccagcatggtagggttctcctgagggccctctccaagttgtagatggcttacttcttgctgtatcttcacatagcagagaacagagagggaaagcaagctctctcatgactttataagtacactaattccattaatgaggtctccatccatacgacctcatctaaacctaatcacctctcaaaggtcccacctcctgataccatcatattgggcagtagggtttcaacatatacattttgaataggacacaaacattcagtccataccactcaattctattgttttgttctatttttctatcttcacaccaataatacacagtcttgaatactgtataagtctttataagtctttaaatcaggtagtatttgccttccaaatttgttcttttttttccaaaattgttttggttattgcagtactttacatttccacataaattttataatcaatttgcaaattccaaaaaaagtctgctgggattttgatttgaattgctttgaatatgtagaacaaattggaaataattgacatcataacaatatttagttttctggatcagaacaaagtatgactctccatttattaagttattctttcacttctttcaacaatgttttatagtgttcagtgtgtaggcttttcacatcttatgtcagatttatctctatgtatttaatgttttttaattaaaaaatttttatgaatc

SEQ ID NO: 529 - DNA, 1711 bp, Homo sapiens
aacaaaagcagggtagggctccagctaagccacgtaggcactacgatgggcaacagaaaggttggtttctgggcaattcagagaaaccaaggacagctacccccagaactcagagtagccaactgggctgctcacaggagatgccttaactgaaaggtgatcagactccacaggagacccagagaagatgtggagggagctcagaggctgtcctggaggagacctggagacagctcagaggctgtcccagagaagacgtggaaagagctcagaggctgtcccagagaagacgtggagagctcagaggatgtcccagagaagacgtggagagagttcagaggctgtcccggagaagacgtggaaagagctcagaaactcagagactgtcccggagaagacatggaaacagctcagaggctgtctgcaagaagacgtgcagagagttcagaggctgtcccggagaagacatggagagagctcaaaggctgtccacaagaagatgtggagagagttcagaggctgtcgttactgctgcacttggctgtttttctttggataattattgcaatcaattttagtaattcaggtgttaaatcacagtcaagcacctatttacctagtggtaaaatccttaagtaagtcatatttggttgggaagatcaaagaaatcacccagtctcccacatccgaaattgtgcagtctggactgtcaggaacaaaagtgaaagagagacgtcatcaaggccgggcgcggtggctcatgcctgtaatcccagcactttggaaggccaaggagggcggatcatgaggtcaggagttcaagaccagcctggccaatatggtgaaaccctgtctgtctctactaaaaataaaaaaattagccaggcgtggtggcgggcgcctgtaatcccagctacttgggaggctgaggcagaagaatcacttgaacctgagaggcagaggttgcaataagccaggattgtgccattgcactccagcctgggagacaaagcgagactccatctcaaaaaaaaagaatgactaaaattaagaagattgatgattccaaatattggtaaagatgtagaacaactagaactcccacatattgctgatgaaaatgaagaataatacattactttggaaaatactttggtactgatttaccatatgaccccaaaatctcacttgtagaaatttatacaggaaaaatgaaaacatatgctcacagaaagcttgtatacacatgcttatggcaataaatttatttatagttgcctatcaacaagtgatgaacaaatatattttagtatcttgatactactttctagctagaaaaggaatactactaagcaaaaatagaggatgaagtagtaatatacataacatatatgaatttaaaaacaccatgctgattgaaagaaaacaattatcaaatacacagtgtaatattctattcacagaaagtttgaaaacaaaaaactatagtctctgaaagaaaaccattggttgcaggaaggtggggattcattggccacaaaagggactgaggaagctttttatgggtaatggaaatattttatatcttgatggtggcaccaattatacaactgtatgtacacatttgtcaaaattctaatcgtattatacacaacatgagtgactttaactgtctataaattatatctcaataaaattggtcttaaaagat

SEQ ID NO: 530 - DNA, 2385 bp, Homo sapiens
gaacctggtgggaggtagttgaatcatggagacagttaccccatgctgctgttctcatgatagtgagtgatttctcaggagatctgatggttttataaggggctttccccactttgctgagctcagctctcattcttctcttcctgccaccatgtgaagaaggacttgtttgcttccctttccaccacgatcatacacccattcacacgcagaagcagtggttcagagaaacctttaatcacctctttgcaattgccaattctgcagaagctggagatgctggtgttcatttggtatcaggggtccccggtggcatatagatctccagccttgggcaggctctgctcagtccctggatgaagaagcctggaggttcctgagatatatcagcaccacccaggctaggaagtgatgatacccattttgaggttagcatggccaacaacggatgtgaagtgcatcgttttgatcctagtgtcaagtcagctcacattctggagagtcagcacctttggtatcaccgcttgtccattgactggcgggatccccatccagctgttgctgcccaaaaaccacatagcaacaccagaaaactgggaagcattttgaatgaatttggacatcacaagattgacgttctcaaggcagatctggaaagtgcagaatggaaagttttggaaaatcttattctggaagatgttcttgagcagattggacagctcatctttgagatccatctccactggcctgggtttgaggtcagtgtcagtgacagcagcgttgtgcggttctggtacagccttctcaaagagttagaacaaaaggatttcaggctttttcacagttacaaagacttatctaaacctcagctattcttgaagaaagacattttcaatgcaagtagctgttatactctgagttgggtgaatacaagatggaaataggatgcaggatgtcatcaagagcacaagaaaatatttgcagaatgcagcatgtccataattctaatcatgagtttactcatccagtctcctgctagcctgtgccctgcttgaggcagggagtgtgttattgcgggcatgcagcctagtgcttggcatgtgatggggcacagtcaatacttgttaaagggataaacacagtcacccctatttgcccagactcttccttcaccttaacttggaagattatccccagctcatcacagttttccctaaaattctctatgtatctataatctatgaattcaccaacattgaaatgaaattatataaatttcctatttttactaggttggtgagatttttaagttcttcccctactgtttaaaatagggttttaaatttgaatttgaccctcctttttcaaggtttttcttatttaccttgttaatgatattctttacaaccttgtagatttcagtcattccttctcagcctttgctgaggccatgctgtggctttctaagcagcaatacttctgatttctgggaactcggatgcaccaaattctgtcactgagttaaagagactagactatcaagagcttcaacacgaaggtgtaagttccagttcgagaccaagtctgaaggtcttgacctcaccaagacccatgtcccagcttgaagacagccagacagagaattaattcttccttactgccttaggttctattcaggccttcaactggttgaatgaggtccacttacactgaggtgaagaatctgatttatttagtctactgatttaaatattaatttcatctggaaatatccttacagatacacctagaataatgtttaactaaagatctggacaccctttagtccagttaagttgacacataaaattaaccattgtaggtaggtaggtagataaatagatagatgatagatagatagatagatagatagatagatagataagatagattttcctactggcatgtttcaccattttcttgactcacatattctggtttccatctggctccttcggtctgtgctctcctcactgaagtaaggcctttaatgattacttcattataagtccatgagtaatatggtttggctacgtccccaaccaaatctcatcttgaattgtagttcccataatccccacgtgttgtgggagggacctggtgagaggtaattgaatcatggggttggtttcctccatgctattctcatgatactgagtaagttctcatgagatctgatggttttataagaggtgtcccccttcacttggctctcatttttctccttcctgctgccatatgaagaaggatgtgtttgcttccccttccaccacgactgtaagtttcctgaggcctcgccagccatgctaaactgtgagtcaattaaatctctttcctctataaatt

SEQ ID NO: 531 - DNA, 3177 bp, Homo sapiens
cctggcccctgacctcccatgcccctatctgtgcctccacccatccccgcaagctctgtcccctccccacacttccctgcccttttcccctccccttctacaatccccctaccctcatccccctcctctccttctgatccccagcctcccattctctcagtctctcccaccccactcagcctcctatcacctggcctccacctccccacctcctgtcccccgactttctatacccccagtctcctgtcctctcagtcttccctgccatccccctttctgatcccctggcctccttttccatcccacctccagctttctgtcttccctgccttctggcctctcagtttcccactcccccgcccccaccagccacctgtctcccctgagcctctcatcccctcctcatttttttttttttagacagagtctcgctctgccgcccaggcgcccaggcgcccaggctggagtgcagtggtgcgatctcagctcactgcaacctctgcctcctgggttccagtgattctcctgcttcagcttccctagtagctgggattacaggcacccgccgccatctctactaaaaatacaaaattagccaggcgtggtggcgcatgcctgtaatctcagctacttggaagggtgaggcaggagagtcgcttgaacctcagaggcggaggttgcagtgagccgatatcatgccactgtgctccagcccgggcaacgagagcgaaactccgtctcaaacacaaacagacaaacaaaaactattcagcatatcttcagtaaaatcttccttaatccttttttaggctcctattttctgagcacctaattgagtgccgggcatcccctaagcattcactggatcttcacacccaccctgtgatgtacacgtttttcttctgcctgaaatgtcctaagctgcccctccgagagtcactgcctcagggaggtcctcacttccagggacagcagagtatgacggttaagcagggaaactctccagctagatggcctgggttcaaatcctagctctgtcccttccagctgtgtaatactggtcgcgttactgaacctctccatgcctcagtgtccccaactataaaaacgagatgtcataatagtcaccttactgggatgttgtgattagataaattaatccatgccagtgcctggtatagagtaatggggagctgtgtttgctctggaatgtcacgctgagaacccgggacttagggaccataggaagcctgggaggcttggaggggaaaaggagaggcatttgagaaccagcttaggtccccagtagtgcctcctctctccccgtcccatcccggttgctgcttccgtgtccctcccgggagaattatttagggagggggcggggtcatcatcctggctccgccccctgggttgtgaaatctacacccgccaggctccagaaccccacctaccacataccacctgttcatgctctcccatcagggaccacgaagccagtcctcagctgtgacgctgaagtttgatcccgcggggacaccatcgtattaaaacgctcagagactgagtcacagagaggggtgtggccggcattttagttccgcccctgccggagtagccgaaggcctcattggcgccttcacgcttcagctgcgcttagtagccgcggcgtaattggataaaagcccgtggagggggcgggatcccaggggggtttctacgattagtcaatacccaggagggcgggatagaaaggtgcagatctacgacccgattggcttcgggctcagctgggaggcgggacgaattattggttgggggaaacccacgaggggacgcggccgaggagggtcgctgtccacccgggggcgtgggagtgaggtaccagattcagcccatttggccccgacgcctctgttctcggaatccgggtgctgcggattgaggtcccggttcctaacggtgggatcggtgtcctcgggatgagatttggcgtttcctcggggctttggtgggatcggtgtcctcaggatgagatttagggtttcctcggggctttcgggatcttcacctaatatccggtattattttatgagaggagtggtcttggctgtcagaactggatccctggggtgatatttgggaattagtggagtgatctctgaagacctagggctatgatctggagctgctgtggctgaaatttggggcctctgaagtggcatggagattgaggtccagagagcctgagatcttgagggctgacatttggagagatggggtcgagggttgtctttgggccttgactgctttaggcctttctcactctcattcccgggatgctttgccagaatctctgctggattggccgtaaccctgtccccgagcgggctcacagggtctgaaggccacgcatgaggcaaaggtaaagttctgagccacccggtgcctccttcccaggactgcaagatggaggaaggcgggaacctaggaggcctgattaagatggtccatctactggtcttgtcaggtgcctggggcatgcaaatgtgggtgaccttcgtctcaggtagggaccctcagcttggatgtcatgggtacctggggtggggatggaaataagaggggaaccgggaagtgccctaacacccctgtggtccccataccctgcaggcttcctgcttttccgaagccttccccgacataccttcggactagtgcagagcaaactcttccccttctacttccacatctccatgggctgtgccttcatcaacctctgcatcttggcttcacagcatgcttgggctcagctcacattctgggaggccagccagctttacctgctgttcctgagccttacgctggccactgtcaacgcccgctggctggaaccccgcaccacagctgccatgtgggccctgcaaaccgtggagaaggagcgaggcctgggtggggaggtaccaggcagccaccagggtcccgatccctaccgccagctgcgagagaaggaccccaagtacagtgctctccgccagaatttcttccgctaccatgggctgtcctctctttgcaatctgggctgcgtcctgagcaatgggctctgtctcgctggccttgccctggaaataaggagcctctagcatgggccctgcatgctaataaatgcttcttcag

SEQ ID NO: 532 - DNA, 2488 bp, Homo sapiens
cttaaaaggaaattccagatggacagttttaatatttatttcagcatttaattcaggatgtttcaacatgtatctctgagcataaggattcttgtttaagaaaaacccaaatcttctagtattcaaatttccagttgtctcagtggcatacattctaagtttgattaaattaggacacaaatgagaggcccacacattgcaattggtcattgtcttctgaagtctcaacttattaaaatctcctgcatcttttcccccttcaaatttatctgttgaagaaaccaagctgttcacgctgtggagtgccctagtcttgattttgctgatttcatctgcgttgcagtttaacaggttcctctgccctctgtatttccttctttcttcttcttttttttttttttgagatggagtctcactctgttgcccaggctggagtgcgttggcaaaatcccggcgagctgcaacatccacctcccaggttcaagcgattctcctgcctcagcctcccaagtagctgggactacaggtgcctgccaccacgcccggctcatttttgtatttttagtagagaggggggtttcaccatgttggccaggctggtctcgaacttcttacctcaggcgatccacctgccttggcctcccaaagtgctgggattacaggcacaatccaccgtgaccagcctgctctctttatttcttatagaagatctcgagtaccatctacaggctggataggatttgggttggattttttgtggggaagactatttcacaggtggtggtgtgatctttcatccacaggcatatatctggtggtatttttgtgatctaaggcagccatggatgcccaatgcataattcaccaggagctagaaaatgctgatataattctatcagccctttacttattagagtacttccataaaaagaaaattctctatgtctactacttgattgctcaaatatatgtagtttgtataaaaaaaatatgtatctttctgtcaagtgttgattccctagcttcgtccaatggtgctattactttaacatcaccatttatttataatctttaaggagctcttattcttttatgttcttttagcattctgttcatatttcatgtctgtaacatctcaaatcccactatgttgggtcgcactggggttagtttttctatttatcttggcctttttttctttcatgcttctggttcacctcattcgtctggtggtccttggatatccatttatattttgggaggttgctagtgttgcgtttcctttgcttttgtgaaagcaggcctgttttactgccagttctcttctcctagtggggattcttagtgggaccttcttgtgggagtgggtatattatgaaacttcatttaaaggtaagagtatagggagctaattgttaggctcatggttctctaaatgcttttctttggggattgatgtaagcactccaagccctagtcctcaccatacagttttttcaattttcttaagaaaacccccacccccggcccctgtgtaaatgtttactgcttttgtcctctatgcacaggagtggatatgggagtgagatcttttctctatataggccctcaattaatcatcatttctagtccgatttcacactaattctaggcccaaagcccccctattggattttgctagacttgctcccatctcttctgaggccccttagtggtataatctaagctttctctttcagtttcacctgtcttcagaaatctacagaacagacggagtctctcactatcacctgggctggagtgcaatggtgcaatctcggctcactgcatcctctgcctcccgggttcacacaattctcctgcctcagcctcccaagtagctgagattacaggcgcacaccaccacacccagctaattttttttatttttagtagagacagggcttcactatgttggccagactggtctcgaactcctgacctcgtcatctgcctgcctcagcctcctgaagtgctaggattacaggcatgagccactgcgcctggcctctttttttttttttttttttaatttaagagatgggggtctcattatgttgcccagactggttacgcctatagctctagctactgaggatgctgtggcaggaccatcacttgaactcctgagctcacccaactacagaacatttcttagcaaaactctggccctttttctttgctattacagattctttcctttttcagtatctataattttattttagtaggattttaggaggggtgggtgagatgtcattagtttgacattaagtagcaattagtgctctctagaaaaacaaaattcttattttcagccagcttggtcaatacagttattttctaaaatatattgatgtgcttggtatggatagtatatttagaacttttcactaaattttcagattatttgtatttttgatctcactaaatcatgtctgattaactt

SEQ ID NO: 533 - DNA, 2238 bp, Homo sapiens
ttgattctcagcggctgaaggactaagttccccagagatggacccgggtgtcatagctgcttccaggggcctcggggacacaggcgggactccaatgtgcaggaggagacacacgtcaggggtgggtgtgtgacttccacgctgctgacagtgacccaaggatgcagctcagggtcagatgccgttagatcaaccacttcaatgtattataaaactattataaaaactatttttgctacccaggaaggtagctgagttcacttagaattcctgtcagctaggctgtttatctgaaagtggttacttgtccctgaccatctggaatggctcaaatgagctcctgcagaccacagagctcatctttgggaacccagtctctctttttggggaagtgagccccttccttgggaacccctgaggccaggcatggccactgtggatggtgggaggatgccccaccctgaggaccccagaggctcctgtggccccttcctgggactgctggggccggtgtgtgtcagcgttcaccccaaggccccctttcagctgggctggacgccaagtgccttcaggcctcatcctgccctccaccatcccatagtcagtgaggctgtggcatctccctcctcgactgtcttgccctcttggtttttgtatcagcgttttccaggctgattgctgctgaaccttctgtttttttttctttttctttttgagacagtcttgctctgttgaccaggctggagtgcagtggcatgatcttggctcactgcaacctcagcctcccgattagctgggattgcaggcatgtgccactatgtccgtctaatttttgtatttttagtagagacggggttttaccgtgttagccaggatggtctcggtctcctgacctcgtgatccgcccacctcggcctccgaaagtgctgggattacaggcataagccactgcgcccggcctggagcttcctttctttgggttttccgatgttcttgactctgttgtagctgagctagactggggactgggtttccgggtttgctttgtctctgctgaagggctgaggtttcagagccagcatgcactgcacagggagcagagggaggaagaaggatccgactgcggagacacagtgactgaggccaagggcagcttgggccgggccagcagtgaggggagaggtctgggtagaaggtgtcatgctgggcgggggcggggggtgtcctgcgggccttgggtctttttgccgagttgggggacagcgaggagcaagcacctgccatcgcccactttgttttctgtgggacctcctaggacagtgaggcccctgcctcaccagggcatggcccactccgctgtccaggccttcgtcccggctgcctctgctgtggggcagggaaggggctgggtgtccaggacacaggcgcttccaggcttcatacacagatgccttttctctgacgttccttaactcccatgtgtagctatacacagaatgggattttacatatgctggacagaaataagagaatcaagccccggccagaaagattccagaactgcaaagacctgtttgatctgatcctcacttgcgaagagagagtgtatgaccaggtggtggaagatctgaattccagagaacaggagacctgccagcctgtgcacgtggtcaatgtggacatccaggacaaccacgaggaggccaccctgggggcgtttctcatctgtgagctctgccagtgtatccagcacacggaagacatggagaacgagatcgacgagctgctgcaggagttcgaggagaagagtggccgcacctttctgcacaccgtctgcttctactgagcccagcgcccgcatggagccgcctctggagcttcctgttgttcatactttttccttcctgacatttgtttttacttacaggtgttctgctggtgacggtagcattacccaaataaactgtgcatatgaaatgggagaggagatgccaaaacgccagatgaaagcaatcaagtttcttcttttccacttttacttatgagcaggatattgattacaaagtttttcttctttaaccaaaaaggaaagacaacggtttgtgtgcacttcccgacatacctgtgtcttcgtgtgcctgccttccctccctcctccccaccgggccggactgtacagagccctgctgcggcgtgttaggaatgacctggaattgtcaataaacagatgctgctgtc

SEQ ID NO: 534 - DNA, 2068 bp, Homo sapiens
agataatgctgtgcggagctgctgtcgctgctcccactgctcccacgatgcactgcttatagcagctgtcaaagatactgaggaatccacggtggaaaaaagacttttacaactggctggaagaaaggggtgtgagggaggagacatttctgtgcagagctgaccaaaggaaagagtaggcatcagtgcagtatgaatgcatacctcaccaagcaacacagctgcagccgggggtccgatgggatggatgccgtcaggagtgcgcccaccctgatcagggatgcccactgtgcttgtggctggcagaggaactgtcaggggctcgggtacagttctcagaccatgccctcctcaggaccagggggcccagcttcaaacaggaccggggggtccagcttcaacaggaccttgtgggacagtgtgcggaaaagcccccacaagacgagcaccaagggcaaagggacttgtggggagcattgtacctgcccacatggttggttcagcccagcacaggccagtcctgctcctataattgtcaacacagatactttggacacaattccttatgtcaatgggacagaaattgaatatgaatttgaagaaattacactggagagggggaattctggcctgggattcagtattgctggggggacagataatccccacattggagatgaccctggcatatttattacgaagattataccaggaggtgctgcagcagaggatggcagactcagggtcaatgattgtatcttgcgggtgaatgaggttgatgtgtcagaggtttcccacagtaaagcggtggaagccctgaaggaagcagggtctatcgttcggctgtatgtgcgtagaagacgacctattttggagaccgttgtggaaatcaaactgttcaaaggccctaaaggtttaggcttcagtattgcaggaggtgtggggaaccaacacattcctggagacaacagcatttatgtaactaaaattatagatggaggagctgcacaaaaagatggaaggttgcaagtaggagatagactactaatggtaaacaactacagtttagaagaagtaacacacgaagaggcagtagcaatattaaagaacacatcagaggtagtttatttaaaagttggcaaacccactaccatttatatgactgatccttatggtccacctgatattactcactcttattctccaccaatggaaaaccatctactctctggcaacaatggcactttagaatataaaacctccctgccacccatctctccaggaaggtactcaccaattccaaagcacatgcttgttgacgacgactacaccaggcctccggaacctgtttacagcactgtgaacaaactatgtgataagcctgcttctcccaggcactattcccctgttgagtgtgacaaaagcttcctcctctcagctccctattcccactaccacctaggcctgctacctgactctgagatgaccagtcattcccaacatagcaccgcaactcgtcagccttcaatgactctccaacgggccgtctccctggaaggagagcctcgcaaggtagtcctgcacaaaggctccactggcctgggcttcaacattgtcggtggggaagatggagaaggtatttttgtgtccttcattctggctggtggaccagcagacctaagtggggagctccagagaggagaccagatcctatcggtgaatggcattgacctccgtggcgcatcccacgagcaggcagctgctgcactaaagggggctggacagacagtgacgattatagcacaatatcaacctgaaggtcagtcagaactcaaactaataatgttctgatatgtctctgtgtggatctgtaccctcattactaataatttttattaactagagtcaccatcattggtgttttgtaaacctacctatagtgaaaaattgatggttcatgtccaaagaacgtgaaccgtggctttgttacctctaatcttccaggaaaatatcaagcagttagaaaggcctatgaaaatatgaattcaaataaatagcaaccagcatc

SEQ ID NO: 535 - DNA, 2511 bp, Homo sapiens
ttcccagtgaagaaaagacacagctgccacttgtacccagattgtctggatcctaaaatcaatagcctaaaaagataataatttgcctcttacaccccaccaagaaattctgttcaattctgttgagctgagagagaagaacagggagactggaaatatgaagaaaggggaatggccccagaggatttccctgtgtgaattcaatttacctttattcaggtgggagattataggttatataaccacccccaatataaagcaatctcttccccgatgacactcaaacccggaaaacttgaatcccagggtgttcagattttggtataagctgatctcccaggacctacttaggcaggatctggtgcccaggacagaacctgttgacctggcaccatggagctgggaggggctgtcaccatctttctggcactccgcttgtcttgcctgctcatcctcattgcctggaaacgaatggataaggcaggaaagctgcccccaggtcccacaccaattcttttcctggggcacctgctgcaagttcgaactgatgctacgtttcagtctttcatgaaggtgagtctgtctgtctcctttaatagggctaaaagcaactaatcctatagccagattcacatagaaacttatgacttctaaaagatagactctcagaaacacagactttgcaaatcttggaattctgaaattccagaatcctaaaatgttggaaacacacattctcagtgcattgaaataagattttcatgatctcaggactttggaatcacagtacattatatttttaaacacaggattctttgactcagcttgtcttagcactttgagacttggtatcatgaagtcttaagattctagaaatttaacatttcagagagagaagtatgaatcttggaatttatcgaatccaggtccattattttggagatgcagacagtaactcttgtgggaagggatgagcttttgccgagaatgacagaagccaagacttccgtgcctctttcccagtattccttccaagcccagatttaccttggttccttagtaccatgtttatatcactctaaaatcgccatcctctaaaatcctcaactggcctatgcttggtactccagtcagcccctcctcttgtgttttccttcactccaagctcagggagaaatacagccctgtgttcactgtgtacatgggtcccggccagtggtgggtttatgtggacacgaagcagtgaaggaagccttggtagaccaagcggatgagttcagtggccgtggagaactggcttcaataaagcaaaacttccaaggtcatggatcctgcagagagggaaccttactctcttgattgagtcttgaaggttgaggatggcttcctggacagcagagtctagagctttcataatctttccccatcactgcctaagcacagagctgaacacagcaaggggagggaggcagaagcctgagactgagatcttggcaggtgtagctctggccaatggagaacgatggaggattctccgacgcttctccctgaccatccttcgggacttcgggatgggaaagcagagcattaaggagcgaattcaggaggaggccagctacctactggaggagttccggaagaccaagctaagattcacgaagagattaaccaggtgattggaccacaccggctcccaagggtggatgaccgggtcaagatgccctacacagatgtcgttatccatgaaatacagagactggtagacatcgtgcccatgggtgtcccccacaacatcatccaggacactcagtttcgaggttaccttctgcccaagggcacagacgtatttcccctgcttggctctgtcctcaaagaccccaaatacttccgctacccagatgccttctatccccagcactttctggatgagcagggccgcttcaagaagaatgaagcctttgtgcctttttcctctggaaagcgcatctgcttgggcgaggccatggcccgcatggaactctttctctacttcacctccacccttcagaacttctctctatgctcgctggtgccacttgtggacatcgatatcacccccaagctctcaggctttggcaacatcaccccgacctatgagctctgccttgtggcccgctgagccacacctcctgcggggcaaggaggaagtggtgaagaatgcagctctcctctcgtgttcaggagcaccccctcttcctcatcttactaatcctcaagcatccctaagaggaggcactatgattacagagtcagccagggtcacctgagaatgtacagctgcgtgtcttcctctcccgtagaagagcaacgccctgtgcaagatttgcacctctgcctgcaggtttcatggtcacatggtcaccgttgcttaggtttctggctgcatcaaattattactgcagtccctgtgtcttcatgttgtccctttttgtgtgtgctctgattttgaccaaaatgtagtctaaaatcttt

SEQ ID NO: 536 - DNA, 2036 bp, Homo sapiens
agacaccgagtctcgccttctgagattggcaggtaacctagcaacgcagggaccgcggcggtaactgtggctagggaaacctggagcggtcagagcaggatggccagagacaataaaagcacgagacccaagtagtctaccgaagtctccatctctgtggacctacagaggcacagagggctgctcacaagatggctttagacattctcgccatggcccctttgtatcaggcccctgccatcaacagaatagggccaaagacagacccatctaaaaggccagctgatccactaaaacccttggttctctctaggaccaaactcaccaccattgaggccaaaaggatcatgtccatcctggatgaggcgatctacaaggtggagctggtgaccttgctgtcgtatgtggcatccaacagagaggatatggaggggatgctgggggaggacgtcatgagggcagtgagagagcatgaggatctctgccaggtcctccttgaaaacgtcaggtgcctgaaagagaaagaaaggcaattgcaggagcagaaagaggctgaggaggaagggtggctcagagaccgcctcctttccatagagctgcagaaatccagcctctcaccacttatgcagcagatcaaagactccaccaagaacgtccttagactcttgctcagcaacccccaggctgctaggctcctgcagatgcagacacagggtagaagtgcagaagcccagaattttattgacagcctgatagagctccgtggtttcctgtttgaaaaactactcactagtcccatggaagcgagggataaggcccagttcttacaggatatcagtagacagaatagtaataaccaacaaatcattgatactcttgaaaaggaattggcggagagaatgaagaacaggaatgcagaggtattgtttcatagtattgctgaaattactgaagaagccacacaaatcttttgttggttgggtttttcctcaatgattgattttttttttaagatggagtctcgctctgttgtccagactagagtgcagtggtgtaatctcgactcactgcaacctctgcctcccaggttcaagcgattctcccaccacagcctcccaagtagttgggattacaggcgtatgccaccgcgcccggctaattttttgtatttttagtagagacagggtcacaccattctcctgcctcagcctcccgagtagctgggactacaggtgcccaccactgtactccagcctggctgcagagcaagaccctgtctcaaaaaaaaaaaaaaagggaaacagtagcatgatcccaaaccctaataataattgtcatattgcacacatacagtgtatttagtttaacatacattttctctctaaatctttacaaaaaccctgtgagatggtgtatgagtacagatttggctgctataacagagacacccgaaatagctgtggcttagtcaagatggcagtgtatttctctgtagtggaaacaccggagctggtgtggcatctctgctccccaacttgtcagaggtctggtttcttctatgtgacttccctgctgtccccaacatgggacttctgcttgtgggccaagatggctgctccagctttccccatcatgtggcccccagtctagccagcaggaaggaggaaaggggaggagagggcttggttctgccccttaaggacacgtgtggaggtggcacacagaacttccatgcatatcttgtagccacacccagcagagagaagtgctaggaaggaccgaccacccgtcactggggctgtgttatgctccacattctaccccacagcctctctggggagagcagacatgggggtagccaggctgcactgccacaggcccttctgtttctatcccccaccactgatgaaagattcaaggccctgggaaactattcacagccccctccctggtgctgggttgggcacttctcactgaatttgtcctttaaagcattcacctgactttgtggataacattcacctgactttgtggat

SEQ ID NO: 537 - DNA, 1981 bp, Homo sapiens
ttttcccttcgtttcttgaagtaggaatttagagaagcgatttgagatctttctcctttcctgatacaggcattgagtgctgtccgtttccctctaagcactgccttgggtgcgtctggcaaatttcattatgctgtattcttgtttccattctgttctcttttttatttccttcgaggcatcccatttgactcgtggattacttagaagtgtgctgtttaatttccaggcacttacagttttcctgttgtctttctctgactggtttctggttttgatgtccactggtgtggcctccacctcttcacgccaccccacagatgaacagcattcacataacttcccagtatctcgaagtagcatcgtttccatttcctgcgtgtcttctcattttactgcattatttcagctttccttgtttgagccaggattcagggcttccttcattccatctctagcttcctcccctcgagtttcccagttcatggagtttctcttggaccctcagcagcagggggtcttgttcttgacaggaatccctcacacttcccccttggcctccgagccccaccacatcctgcggttggtggtgtgtggagaaagtggtgtgtggagagagttggtggtgtgcgctgtctctgctctccaagccctttgtcagcccccacccctccctcactccgtgcctcttgtccgtgcccgctgggacaccatggggctcggctcaggggatggtgggaccagcgcttagtaagactagtcagccctaggcaccgagtgagcactgctcacgtggcagagctggaatgggggccgggcacacaatccctggcccacgtgttccacggacatgctgcagaggtccccggccctccagggcaggccctctctgcttccagaggggcaggtgagccccaggccaggccagcgagggtctggactagagtgcagtggccacaatggacgccgcgagtgtcttcattaagagtgagtgtctcagtctcccccagggcgcccgccagccacagggccgctatgtgcgcagactagacaggtggcagctcgggccggccaggcagagggagaggaagccagagcctgcgcgcaggcagcctcagaagtatttccagccacagccaacgtgtcttactggcaatttgctttttaaaaaattgcagtttaattttaagtgagcagcccgtaattacagtgatttacgaggtacctggggactgtgtgatatttgaacatggcagagggctgagcagcgatggcagagatggatgggcccggcgccactcattcagcaggtcctgctaatgccggagcgttagaccgaggtggagcctcccaatgtggctgggtacgctgggggaaacggagtcagaggtgggctgcacagcaggtcgacttgttcaccgggggctggtgttttgcaaacgctgggtctgccttcgtgtggggtttgagctgggagagtagcactggttactcctgcctgtctccgtccacccccacccccacctggagggcagcgcggtatattagggcatcattcttccagagccgcctgaggccggcagagaggaggtgctgtaggagccgtgagtgggttgcccggcctaccattgggagcagctgtcttgctgacgctggcggggtgcacctgtttcaaataaagaatgatcagagctcacgcctgtaatcctcacgtcgtgggcagctgaggcaggaggatcacgtcaggccaggagtttgagaccagccaggccaggagtttgagaccagcctgggcaaaatagctaaagtctatctatctctcaaaaaaatttaaaaattagccaggtgtgctggcacatgcctgtcattccaactgctcaggaggctgaggtggatcacttgagtccgggagctcgaggctgagtgacccgttatcatgccactgcactccagcctgggtgacagagtgagactcgtctct

SEQ ID NO: 538 - DNA, 2745 bp, Homo sapiens
agtgtgaagattcccccttcactcaccagatcatctccatggcaacagcttgcagcctgctcttggagtgctttgttttggcagcttctctgctagtttgtgtatggagtgaatggaggaggtaaatccacagattaagaatatgctgtcaggagtcaggcagccaaggtcagaagccagctctgcttctcagtggctctgacagccaggccagtgatgatgaggtccatcttcctgccacaccgaaagctcatctgcagtcggagaggccatctagaccccagaggttgggaagaagatgagaaaatcttggtacctgatgccattcccactcttcctccttatgtattcatcaggacggaccaggcttgtgttaaggtgtacccgggatttgttttaatcaggaatggcaagactcacaggcacagaggtgattgtcatgaggaagaagtctgtgctcacagaaccctagaaacaggaggcatggcatgccacgtagggccacatggggaaggaccatctctctggggcttttggggaagttggaaacaggtgctctttttccttcccgttgatcattaaacattgagtccctcgtctctagggaggggacttcttatttacccctgggttgggaaataaatcatgacagcagcaatcagacaacagcagagaagtgtgtgatctgaacatctgtgggatgccgtgatccctggaggagcccttcacactgatcccatgaatggccctcaacacatgcacgagcaaggagcaagcgttccgacaagtgctctcgcagtactccaaggaagaggctgaaatttgactcagcaaagcccagagggaaaagggaaagtggtttatgagtgtcctcaggagctatcacatcctagacactaggcactttcatctaaatgactctgatgaccccagtgttgtcagtgctcctcagtcagtggatcagacttgcccttggcatgaggaggatagtcagtcactcctggtccccttcagagggaccttttgagaaaaaaatatagccaattacttatgtaaccccaggcactctgtcctgaatcctgggcattccaccaccgtggagaaataggttagtcccagacacatgacaccagcctatgaggcagctccgggactcagctgctcgaacgagcgtcgcaatttcaagttgggaattaacggcaacacctgacaacacaacacaatgcagtagccatcaagcaggaagcccgagcactccactctcagctgtaccttgccaagcagtggctgctgtctgtcgggagcaggtagcaagtcaagatcagtctaaggacattccatgtccatctggcatcaaaccaccctgctacctatgccagttgttctcaggatttgttttaatcaggaatggtaagacataaggcacacagacgtggaaatgattatcatgaaggaagaagtttgtgctcatagagctctagaagcaggaggtgtggcacacggggccacatggttcggaaggataagtgttggtcaggaggcagggagaggggagagcatggccccaagcctttattggggttttcataggaaggaatggttaagacaaggtacatatgctggctaagtttagggttggatagtttgaataatttggatgggttcagggccatagggatggtcccgagttgtctgaccctagggtgacttagggcagagagaatattggcttggtgtgtgagagtttggttttaaaaagaagaagatggttgggagtgtgggctccagattagctggtttgtacatcaaaggcacgctcccaggagaattgtttgccaccccgcccccgacccgtgtgtctctctctctctctctctctctctctctctctaggaatttgctagccctgaatggggtgacctctttggatcaaggacccaaatgttagcgcatgaagaatacagaaaataagaacatatactcaatacaaggttatgctgcagtaacaaacaatcccaaggttgcagtggctttttacacaactaaagtttctttgccaatgctgcacattcactgcaggttggaggaggagggcgggtagtctgctcactgtaatcactaagggcccaggatgatggaagtttcatctcaacacatgcctccacaatcaccaaggcagggaaagggactatggcaaattgcacctgtgatcttaaagctcctgcccagaagtaacagtcaaatcatatgggcacacctaaccatgaaagggcagagaagctgaatcctaccatgtgccaggatggaagagaagtgggatatttgtgattagttctgatgactactgacacctgtcattggaaccaaaagattcctcttttgcttaagcaaaaggaagaagaattgttcaaaagaattgtggccaggtgcagtggcttgcgcctgcaatcctagcactttgggaggccaaggcgggcagatcacttgaggccaagcgtttgagactggcctgggcaagatggtgaaactctgtcgctacataaaatacaaatatcagctgggcatgctggtgtatgcctgtagtcccagctattcaggaggctgaggtgggaggacttcttgagcttgactgaggtggcagtgagctgagatcgcaccactgctctccagcctaggtgacagagtgagactctgtctcaaaataaaaataaaaaagaattgtaataatacatgccccaacacccc

SEQ ID NO: 539 - DNA, 1908 bp, Homo sapiens
acctcttcgaggccccgctgcgggcgtccagagctggggactgtgggtctgactcctgcgttccagccgtgggtgccacctcttgcgggaagcagggcaaaaccactttggtcaggcgctcctcgtgcctttctcccttcgtaggtgaccagcatctcgtaagaatgataaccatcagtaaccgggaccccaaaccttctcatcaaggcacctctcgggtcaccattactttaactttgaatttgggtctccttcatttttccgctggatgcgttaatgtgcgcgacccacagctccaggcggcggtttcctggcggaactggaccaccgccacaggctgggggtctgcagtgggggatgggaccggccgcggccgccggccccttccgcgtccactgagccggcgctggttcggcactgggatcctgcaccgggcctctctgcttggtgctgcgcgtctgcctgagagtaggaggttgctcccagctgtgccggccccagcagaaggctgctggtggtggtgctggggcaggtcggccttgaatccatgcgacaggaagggacgttaccagaagagattcatcgctttctcttggtctgggcagcccgggccttttgagggtgggaccgctgctacccccacccccaggttctttgcctgcctgttgactgccggtgtttcatgttttgtttctctgtttcactattttttattttttgccttaaaaaaaaaagtattaccatgcagcagttgcccatttattttaatttactattaatagtgtgattgctgtgtttcttcctacaaacactgaagcctgaaatccgcccgagtccggattctcgcctgccaaaagggaattggccccgcaacctccagcttagactcccaactcttctttctttccattggcagctgctgcaggcaggacaaggggctccccttctctccagtggggccttcacctctccctgctgcacaattcttcctccttcccagtccctagggagagaagtatattcgtggacgcattttccaaagcaaaagtagcacgcccatcagctggccattctaagtgcctctggaaaggggccaggcatttgaaatgagaaaaccccactgtgcctctgtgagctgccagcccggacggctgcaaccaaggtgccattgtgtcgggtccccagggcagcatctctctggacacaatgggctgtgggactttaggagcccaggtcctcatccaccttgggcatctcatagctcgttagttggacctgctggcctctgagaggacatcttcttcctccccaggagaccgtcctgggaacaagccttaaagcaaggtggccacaggaagccgcagcctgaagagaggtgagatgaccctcaggcagtccagcgaaagctgcttggagatttcctatcagcacatactaattaagaacaagaagatcctatcaactcctaataatgtccttacctggcctggagggcttttgtttgtggtttggtttggtgatttcctacttatttcaagcctttgttgctaactcattcctacttgggcctgagcctttggggaaagctcgctcccaggggcaactcagtggagctcagcagtcccagccctcctttgataaggcagaggggcagcaatctctgaaagaggcttcagaggatgaggaaggcagcccggccagggtcaagggggtttgtccctatctctgtgaccccctcctcccacctggagttctccgctcgacgttcatcttcctgaccagactctaccctcggcagggcatcctccagccacccccatctgcccctctccttccccaccctagcatatgctcagcacccaagcagagcccagcctctggtgagtgctcattaaaccttagccaatg

SEQ ID NO: 540 - DNA, 1931 bp, Homo sapiens
cggattgatgccagccagttccgggaactctttgccagcctgacaccctgggcctgtggctcccacacacctctgctggcagggcgcatgttcaggctcctggacgaaaacaaggactcgctgatcaacttcaaggagttcgtgacagggatgagcgggatgtaccacggggacctgacagagaagctcaaggtgctctacaagctacaccttcccccaggtgagagcctcctgcccactccccagccagggtctcccacttgtccagaagttcagctgcagaggacaggcctctgtgagactgtggggcctcgagggggcacagcagcgtcgcaggctggaggttcacattggaggagagggagcgggagcttgagcacttcacagaggtctgagagcagggccttggcctgggaagggacgtggaggagaatcccatgggtgaccgggcactgctgggtacagaactcccaccgaggaggcagctggacccaaaacccactaggagggccatgagtggagcttcagggctggaacctaaactgctgcatttatctgtcaagtttcttaagggtttattcccagagtttcagctagagaatcctgtcacatggccatgaggaggggccacttctctctggcctctcagtggtgctgtagcctagtggggctgcactggcgacaggctgtctgtgcagggggcagggctcagcaggagtggctgcatggacaatgctccaaggaggggtcatctccctcatcacagaaggaaacaaaggcgcaggcaggtggaaatcctgggctgggcactctgctgtggctggacctgccccaggtccctgctgtcgctttgccatctgaggttagcagctgccctcagaaccgaccccggggatgtttagaatactggggctgagcttcacccgaggagattctcacttgattgcctgtgatggggcccagacctgtggtttttaaagctggcaggccattgctctgtgcctccagagctgaaggctcttgacatagctgttctcgtttgtggctggctcaccagagaggccgtggtaggacagaccccactgggcctggtcccagggttgagagcatgcggggctaccctgagactcctgagcctcctcagcctgccctgccctgtcctgtccagacacagagaacacttgggctctgctgggcttgtggcccatgcccgctacactcacccaggaccatgcgatccgcaaccctgggtactgcttggtgacctccagcaaagactgcactgaatgaggccggccagcacgcacaacgcggcccgacctctgagctacccaaagggagagcagcaagttgcctgtgcgtggctggttcctgtgcgcccataggagcatgaaacgcccccaaagggcccactggccagatggtcactggggcaggcgggcagctgccattcactggactcctaattgtgttgattggatttttacctgggacatgtatttccttttcaaacacaatgtcaaagtcaggaaagcggctggatgcagtaggaggcccaggcgggtggatcacttgaagtcaggagttggagaccagcctggccaacacgatgaaacctgtctctactaaaaatacaaaaattagctgggcgtggtggtgtgtgcttgtagtcccagctacttgggaggctgaggcgggagaatcacctgaacccggtaggtggaggttgcagtgagccgagatcgtgccattgaactccagcctgggcaacaagagcaaaactccaggctgggtgcggtggctcacgcctgtaatcccagcactttgggaggctgaggtgggagaatcactgtagcccagtaggcggagcttgcagtgagctgagatcatgtgactgcactgcagcatgggtgataaagtgagagtccatt

SEQ ID NO: 541 - DNA, 2387 bp, Homo sapiens
cctggaggcaccctggtgtgggctgtgggcctgggggtccttggcactgtccagtatgcggacgtggcagcagcccacatttcccccagtgaccaccaggctgtgccctggacgtggccgcctgagcacggcatgtcctggggccccgtctggtggtcaggctcagtacgagcccatcaggggtactctgcccgcctgggaagacagtgtggcttctgggggctcctccagggaggctctggaccaggctgcagaggatgccaacctgccacaggctggcctggccgctcatggacatggcggctcctggcccagggtctctcccccgggaacccaggcgtgctcgcggccctctggaatgcaggcgctggggctgtggggggccgcctggcgcctggcatcttgttataaaaagctctggcgcaggctgctctcagtggctgcaggatggttgtggctttggaagggcagcccccaggggccttggtcagccacctgtgggccccactgccgagccgtggtcagccctcactggctgccctgccatgacgctgctgaggtcagtgcagctcccgccagactcccgtgacaagtcataacagagccacatgctgggtggctgcagggccctgtcgcccacagcagtcgaggtctcaggtgtgtccggagggcagccctggagacacctgggacaggcgtacctctggcaggcgcaccctggctgtcacccagtgtgggcatggtgggggtgctggaatgctgtgtagggcaggaggcagcagcccgtggctgggtgggagactgcagggtagacgggacgggaccaggagggttgttcgcagggactgccaagccatccccaggtgtcgagagtgtgaggtaggagtgggagcccagagccggctccaggccaccccaactcccgacagctctcggctgttctgtgtgaggggggacggggccgagtgtgggtcggcgcagtgctgaggtgtcccacgtaccccagcactgtgctgaatgcattgaaatcactgcccagggctccgcgagctgcacggcccggctttgtcaatttcattgctgttgatgccaattaggggtgacgctgtccctcccgcatcccagggtgggcagagggaggggccggcttgttccctgggggcaggcgtgcatggagtcagcctggccatggagctgtagccaagagggcagcgggggcagctggactggggtttttgccgacgctctaatttggcggctgtcgccacccctcccccccatggagaccctgacgtggcctgagccagactccaggggccatgtgccctgctggggagcaggggctcagcatcaggtctggtgcactgactgggagaggggggtctccagccctggacaggctctgagtggggtggggtcccccagctgctgtgcccagccctgcccccaggacctggccttggccctgcgctggccggggccagggagggagtgggcccagctcccaagtctgtgtgaccacctcggctggggcactgacagcccggggtgcggagggcccagcccgtgacacccgccgtcagccgcgccctctgcctccagcccgtggaccgggagcccgtggaccgggagccggtggtgtgccaccccgacctggaggagcggctgcaggcctggccagcggagctgcctgatgagttctttgagctgacggtggacgacgtgagaagacgcttggcccagctcaagagtgagcggaagcgcctggaagaagcccccttggtgaccaaggccttcagggaggcgcagataaaggagaagctggagcgctacccaaaggtggctctgagggtcctgttccccgaccgctacgtcctacagggcttcttccgccccagcgagacagtgggggacttgcgagacttcgtgaggagccacctggggaaccccgagctgtcattttacctgttcatcacccctccaaaaacagtcctggacgaccacacgcagaccctctttcaggcgaacctcttcccggccgctctggtgcacttgggagccgaggagccggcaggtgtctacctggagcctggcctgctggagcatgccatctccccatctgcggccgacgtgctggtggccaggtacatgtccagggccgccgggtccccttccccattgccagcccctgaccctgcacctaagtctgagccagctgctgaggagggggcgctggtcccccctgagcccatcccagggacggcccagcccgtgaagaggagcctgggcaagccagcaagaggtgagagctgccagcctggggtgcccactccgccagccacaggaccacctcctctgccagcaggaataaagacttgtgcatccct

SEQ ID NO: 542 - DNA, 1839 bp, Homo sapiens
aggcccaggtccccatccaggccaactttgatgccagccaggtgtgcccagccctgtttcctcctcatctccaatgagtcctcccggctttggtgctgcaccccgggtccctgtccacaccctctttgatccaggctcagcagggctaggggcaggggaaacccccacctcacccgctccgtctgactggagtaggggttggctggggaagactgcagcctccatcctaccttttcagttgcatcccccaacactccccagggcccaaaatagggacaagttggttgcctgtgcctcactgtcccccacccaccccacaaagacctgtgaccttgccacagccccacccatccagccgtaccccctgggtgccagctgcagacaggccggtgctgggctggtgggggccagttgctcatgtactgaggcccccctccctcagttctgcatcggggtcgagatgtgtacagcagcccctgccgtggccaggaagcagctgtgtcggggcagaatgtggtgggctcaggcccagggcacaggggcggcctcccagccttccctgcacttgccctgcagttccagggcacctggtacatggtcggggtggtgtcagatgaccaggacttcctggactccaaggacaccatgaagatggctgtggtcttagtgacccccttggggaatggtgacctggccctcaagtttggataccccacgccccatggcgggtgccagaaaatggacacgaccttcaccgagggtgctgtaccggggcagttcagcaacccagccatgaccctgagtgacatccgagtggccttctccgactaccagcactttgccttgctgtacttggagatgcggaaagggggcctgcggaaccagtggctgcagctctacggtgggcgggctgcggggcggagacccagacacccccgcttcgggtctgggatgtcacccctgtgcctgcaccagccctttctgcacgcggaaggtggaaccgctggctcctggtgtctgtggccgcgggtcccggcccctccctgcccctctctccctctcttcgcccctccagccccttccctttagcttacccgccctccccaccttcagctcgagcgcccgagctgtttcccgaaggcgcccagaagatgcagctactggcgccccaagtgggcctgagccccagccagggcgtcctgctgccgaagtcgggtgagcggtgccggcagccctgctgggagggccaggccccgggtcacacccctgctggaagggccaggccctggtcactccactgatctcagattcgggacagaagtgcccggggcagacccagcctgtctgggtcgggggagggcgagacgttgcccaggccggtgttcccaggaggagatcgccttggggcaggtcgggggcctccgtcccagggaagggggcgcggggtggcgcctcaggctcgatctctctgcagaccagtgtgcgggcgcgctctcccgggtgagtagaccatggccatgcggagccgcggaccatgggccctcccagctcggtgggctgcaccgcggggccctctaccttcggggcagctagggacgacagcgggggtgatggggcacccgggcggatccgagccgcagcagcctggggaaccgcggggctgcgcgtcgggagggggcggaggcaggggacgccgcccacctgctccttgttttgcagtgaggggtccagcccctgagtgcccgcaggggtcagctgctccgtgcgcccagccctgcccaaagagccccctccctccacaccctggccccaagcgcaataaacaccctgaatgcctgt

SEQ ID NO: 543 - DNA, 2761 bp, Homo sapiens
gttccaccatcgctgctggagcagctgccttcaggccctgcgccgcctccggagtccatggccggcacgcgctgggtactcggggcgctgctccggggctgcggctgtaactgcagcagctgccggcgcaccggcgccgcctgcctgcccttctactccgccgctggctctatcccgtcgggcgtctcgggccgccgccgcctgctgctgctgctcggggccgcggccgccgcgtcctaccctgccctccgtgcctctctgctgccgcagtcgctggcggcggcggccgccgtcccgacgcgcagctacagccaggagtccaaaactacttacctggaagaccttccaccaccccctgagtatgaattggccccgtccaagttagaagaggaagtggatgatgtctttctcattcgagctcaaggactgccctggtcatgcactatggaagatgtgcttaactttttttcagactgcagaatccgcaacggtgagaatggaatacattttctcctaaacagagatgggaaacgaaggggtgatgccttaattgaaatggagtcagagcaggatgtgcagaaagccttagagaagcaccgcatgtacatgggccagcggtatgtggaagtatatgagataaacaatgaagatgtggatgccttaatgaagagcttgcaggtcaaatcttcgcctgtggtaaatgatggtgtggttcgtttgagaggacttccttatagttgcaatgaggaagacattgtagacttctttgcaggactgaatatagttgacattacttttgtgatggactatagagggaggcgaaaaacaggggaagcctatgtgcaatttgaagaaccagaaatggccaaccaagccctgttgaaacacagggaagaaattggtaatcgatacatcgagatatttccaagcagaaggaatgaagttcgaacacatgtcggttcttataagggaaagaaaatcgcatcttttcctactgctaagtatataactgagccagaaatggtctttgaagaacatgaagtaaatgaggatattcaacccatgacagcttttgaaagtgagaaggaaatagaattgcctaaggaggtgccagaaaagcttccagaggctgctgattttggaactacgtcttctctgcattttgtccacatgagaggattacctttccaagccaatgcccaagacattataaacttttttgctccactcaagcctgttagaatcaccatggaatacagctccagtgggaaggccactggagaagctgatgtgcactttgagacccatgaggatgctgttgcagcgatgctcaaggatcggtcccacgttcatcataggtatattgaactgttcctgaattcatgtccaaaaggaaaataagactctaggggctccagataataagggtgaagcaagaagcatttcatttgcacatctttcttggacttgggatatacagttccagtttattagcagcaactgctagggaaatgattttggtgttttgggttaattgcttctaagaaaagtttcatagtggactgtttagaagaagaaatgaaagatccagtttgggattatgaaataaaccacaaattaaaatttttgtttaaactgtccaggatctgatttaaaaatatggtctttgttttatatgattaaatggtttgttttcatagatgatatgttactcattgtaaagaccacatatttttattcagcagtgttctttaaacgctttcatttaaaaagtaactttttttttttgcctgtgaattgagtgctctgatgtaaaacttctcatggagtgaaacagtgatttattttaaccaaacattcaccaaagcaaagaacggtttcagacctttgaactggtatggtttggcagaatagttttaaattttgctgtatttgattacttagagataggaatttttaaaaatcaaaacaaaaaataccacagcttagtgtaaatgacaatttggcggttttatgtctttagaaatgttttgcctttctaagccttgtgctaaaggcgtataacggtggtgcctatctacttaagggggcattctagtcttaacttaaaagttgtctaaactgtccctccctggctttttttggtttggggtagacctaagggtgtttgttagtctcaaaactgtgaggtgacatgtcagaacagtccagactggtaagaaaattaatggcttcacttgaatttaaaccagctctagataggaaaaaaatcagtctcctcatttgctttttaaatggagtagtacatcccatattttagaacaagtaggggtgccttgcttaaataaaaatagcatttaatgtataattgtgtgaagggtttatggataaagctgtacttctgtcacaatgtggcagtactttctgctttaatattaaacagcttgttatttaaatattggacaaaatggctggcttcaaaatatagtcattaataaactaactttatgtgcacctgtgtaggagaatcaaaatcctgtatgctttctttgccttgttcctgttctcagggtgacgactgccaccaggagatgcagttctagttcttaaaattaaatttgcccaggtttctgacaggtgatacctggaagagagactatgtcttctcttacttaatacataaccatctttgattaccagctaagatgcgaaatcactgtactgtagtcaataaatgaagacttgtttcaggctgaagatt

SEQ ID NO: 544 - DNA, 2445 bp, Homo sapiens
gcataaaactatctgtagtaatatgggtacattgtgggagtggccaagaaagctgtcgtagacagtcaaggggcctttgaggagggagaattcgggggtgttttggagctaaggactatgtttccatcggtatggcacatctcgggagaacattctgaagccctttactagagacaccctggacaggaggatatcctaatgattgttagttggggaatcagtcccagagtgagtgaccagcaagttagaggccgacctgggactaaggtccaggtccagcatgttttgatattctgctttccctttataccacaggatccagtgctgcctccttgtaccctgtgctcaactttctactctacgtgcctgagcttgcacactcaccgctgtacattcaggacaaggatggcgctccagtggccaccaatgccttccatagtccccgctggggtggcattatggtaatagtcacactacgcagaccccagagcccatgcttctgggacaggcaggtgtccctgaaactgtgttccttctgttttccttctggtgtcctccatggcccagcctgtgggaggggcaggcaccaggaaggtgagggtgctatgtgctcatgcccctcttctgccggccccacttttgtttccgccagtgttttctatactgtgaccctttgcccttacctaggatcattctgtgtccatcttagatcttcgccttatttgtgggagtcttgcaaggttgggagccttgtctcccttgttagactggaagtttctcatgggggagaattctaaaatgggataagaaaaaaatatgttctacaggactttcaagggggtaattgggataatgtatttaatgctctccgtagtaggtactcaaaaaatattagctataccatgaggtttatagcttctaaagagcacagaatatgttttccttttctctccagagtgcctagggcagagctgtgcaagggcctggtatgacgttgtggcaatctcattccccctttcaggtatataatgttgactccaaaacctataatgcctcagtgctgccagtgagagtcgaggtggacatggtgcgagtgatggaggtgttcctggcacagttgcggttgctctttgggattgctcagccccagctgcctccaaaatgcctgctttcagggcctacgagtgaagggctaatgacctgggagctagacccgctgctctgggctcggtcagtggagaacctggccacagccaccaccacccttacctccctggcgcagcttctgggcaagatcagcaacattgtcattaaggacgacgtggcatctgaggtgtacaaggctgtagctgccgtccagaagtcggcagaagagttggcgtctgggcacctggcatctgcctttgtcgccagccaggaagctgtgacatcctctgagcttgccttctttgacccgtcactcctccacctcctttatttccctgatgaccagaagtttgccatctacatcccactcttcctgcctatggctgtgcccatcctcctgtccctggtcaagatcttcctggagacccgcaagtcctggagaaagcctgagaagacagactgagcagggcagcacctccataggaagccttcctttctggccaaggtgggcggtgttagattgtgaggcacgtacatggggcctgccggaatgacttaaatatttgtctccagtctccactgttggctctccagcaaccaaagtacaacactccaagatgggttcatcttttcttcctttcccattcacctggctcaatcctcctccaccaccaggggcctcaaaaggcacatcatccgggtctccttatcttgtttgataaggctgctgcctgtctccctctgtggcaaggactgtttgttcttttgccccatttctcaacatagcacacttgtgcactgagaggagggagcattatgggaaagtccctgccttccacacctctctctagtccctgtgggacagccctagcccctgctgtcatgaaggggccaggcattggtcacctgtgggaccttctccctcactcccctccctcctagttggctttgtctgtcaggtgcagtctggcgggagtccaggaggcagcagctcaggacatggtgctgtgtgtgtgtgtgtgtgtgtgtgtgtgtgtgtgtgtgtgtcagaggttccagagagttccagatttggaatcaaacagtcctgaattcaaatccttgtttttgcacttattgtctggagagctttggataaggtattgaatctctctgagcctcagtttttcatttgttcaaatggcactgatgatgtctcccttacaagatggttgtgaggagtaaatgtgatcagcatgtaaagtgtctggcgtgtagtaggctcttaataaacactggctgaacatgaattggaatgat

SEQ ID NO: 545 - DNA, 3092 bp, Homo sapiens
gctgtggtggccccgagcgcgagtgtgtaggtgacaggacagcggccaggcccgcccctcccctcgtgatggtcattgtcctccagagcagtgatggaggaaataccagcccaggaagcagcagggtcaccaagggtccagtttcagtctttggagacccagtctgagtgtctgtccccagagcctcagtttgtgcaggacaccgacatggaacagggactcactgggggtctcagtggcccttagcagcagctccattcgtgtggccatgctggaggaaaatggggagtgcgtcctcatggaagggaagctcacccacaagatcaacactgagagttctctctggagtctcgagcccgggaagtgcgttttggtgaacctgagcaaggtgggcgagtattggtggaacgccatcctggagggagaagagcccatcgacattgacaagatcaacaaggagcgctccatggccaccgtggatgaggaggaacaggcggtgttggacaggcttacctttgactaccaccagaagctgcagggcaagccacagagccatgagctgaaagtccatgagatgctgaagaaggggtgggatgctgaaggttctcccttccgaggccagcgattcgaccctgccatgttcaacatctccccgggggctgtgcagttttaatgaccagaaggaaaggaaaccctcgccggtggggaggcagagccttatcctcggctgcccttcttggctccctgcattccagggacttgctcgtcttgtttacccctagccatcctttctttcaagggtgaaccaggccttccaccctgaccttgcatctccagactgttccagagaaggtgcggggccagctgctatgtggtggccgctgtggctgacactgagtgaaggtgtttgaaatgcaggagaggatatcccagcaaattgggatcacatgcttttgtctccacagcaaccagccactgcaggcagcatgtctttcctcccctgctctctgcttgctgttgttttgacgctattctgcttgcatgtcttctggttgggatgtggagttgttgctggactctcaggcgaagctgaagtcattgaagtgtgtgaagctctgtgcttgcatgagggcaagcaaggaatggctgtgcctgaggctgctctgggaaactccttgccccttgacctcttttgagagcattcacgtggtcttcttgctcatccccttataaatgtgctttgcctgcctcagcctcatggtcagagcagtggagactggagccctgtttgcacgttctggttgttcggagaaagcctaggttctgggctcaggtccagatgcagcggggattctgttctctgactgtggcgaccttgctttggttcttgttgaagtgaaccaagcccggccaccacgcatggcatgctgtgcttggctccccataagacgtcctctttgggtgcacggtgtcaaagtgtgggcaggagtggagagctggtgccctcaggaggagaccacagcatgtccatcagctcagcagagctcgacagccacaagtcctgagaagctttgaccttgaagggcttctgggagaggaggaatttctgcatggggcgtgaaggcacactgtcccaccacaactgaaccagaagagagtgaagactcccctcttcccatcctctgtgccaggtgccagactgtgctccttggaacttatggcccaatcttacctgttctccagggactggtcactgcctcaggacccccaagcctatgccctgagccatggctgctgactgactccagccaaggtgcaaagacgagattatgagacaggtcctcaggcctgtgttccaagtactcacaggggctctgggtgcccatcgccgggagtatggttcagctgccaccggcactgtccatttgcctgtctgtcaagctcagagcatggataagccacacagcagggcagtgcaccctggcaccatgcacggccagcaagaatcaaggcccgcagatgctaagagagcctattgtcaggggaaggtccccgctcctgcacactctctgtggatacttgggttgtgggggctctcttggagagtaagtttgtggtttgtttctggtttacagtggtggctgacaccccttgtaagaaagcattcctgggaagtcttctgtgggtccaaacatgttgctccgatcatcacaggagagcaaaaggccctagataccccctttggaatgtgagagtcttgttgtctgatatttgccactgagctggtgaagcccctctaaagagatctcgaccctggggagcagaattcttgtcatctatgaggggtcctgagaaagacttgtcattttttttcctggagttcttcccattgaggtcctaggatttgcacaccactgtcccacaagagctttcctgcctaatgaaaggaggtcttgtggtgtgtgtctcctctcttctctatagttcccgagttggcccccattgcagcccccaccctgtgggtagtcttccagaagtgatgcagtggtgtgagatgccctacaccttgttatttgggagactttgagagtcattcacttccatggtgactagtgtttgttttgcctgattttatattctgtgttgcatttctccccactccctgccctgctttaataaacagcaaaccaatatctaggaagaatgactgagggatagtattgggtattggccccatggcaggaacagccacttgcatctggtcccggtgccacactgcggtgcttggtgtggttgtggagcctgtccctgcgcgccttgctcccgttgagccacgctgtctggtgggtgattctctgccctgagccaccaccctggactggcccagtctccagagctggcacaccctgcctgttttctctttttagacacaacagccgcagtttggccagccactaagtcccaccagctgaggtccgaggaaagcggggtgactcatttcccttgtccagggcccgaggagagtgaggtgtccagcctgcaaagctattccagctcctaggtgttggtttgcaataaattggtatttaagc

SEQ ID NO: 546 - DNA, 2533 bp, Homo sapiens
tgtagatctcaattagctatacaggattataaaaagctagtcaggaaaaatttcctattgctgtaacaggttgtggatgaccttgtacttgtattttcaccagagggcacagtggttttagacagttgccatctctactaaaaggtgactcaggccttttccactgaagacacagaactgtttgtaatcccatagactctcatgtgtcttgcctgtttttgtttttgaatgtggctctgttgtccacgctagagtacagtggtgcaatctcagctcactgcaacctctgcctcccaggttcaagccatcttcccacctcagtctcctgaatagctgggactacaggcgtataccaccatacccagataatctttgtattttttggtagaggcagggttttgccatgttgcccaggctgatctcaaactcttggtctcaagcattctgcctgcctcggcctcccaaatgctgggattacaggtgtgagccaccatgcctgactgtcatctggcctctgttcaatgttttcgaccaggaaccttcctctgccccctctaggaagccttcctgacacccagtgccggattaggtacccctcctgtgtattctgcagtttctgattggctcatcatggcgtctgtaaatgttgatgacttttgcttctccatagaccctgcccaacatctctgacctgtgtttgagagatgtgcccccagtccctaccctggctgacatcgcctggattgctgcggatgaagaggagacatatgcccgggtcaggtagttgaggcagtagctggtctgctaaggaatggagaacttcccagaagaggtggcaggcagcaaggagagaggaatgagaactgtgggctcagagaggagcagaaccttactatactactctcacagaagtgggggaaggaaccttaggagcacagtggcctgctgtctctaactgatctacttggttttccctggtccaggagtgatacgcgccccctgaggcacacctggaaacccagccctctgattgtcatgcagcgcaatgcctctgttcccaacctgcgtgggtccgaggagaggcttctggccctgaagaagccagctctgccagccctaagccgcactactgagctgcaggacgagctgagccacttgcgcagccagattgcaaagatagtggcagctgatgcagcttcggcttcattaacgccagatttcttatctccaggaagttcaaatgtctcttctcccttaccttgttttggatcctcattccactctacaacttcctttgtcattagtgacatcaccgaggagacagaggtggaggtccctgagcttccatcagtccccctgctttgttctgccagccctgaatgttgcaaaccagaacacaaagctgcctgcagttcgtctgaagaggatgactgcgtctctttgtccaaggccagcagctttgcagacatgatgggtatcctgaaggactttcaccgaatgaaacagagtcaagatctgaaccggagtttattgaaggaggaagaccctgctgtgcttatctctgaggtcctaaggaggaagtttgctctaaaggaagaagatatcagtagaaaaggaaattgacaaccctcagctctgcaaactcagtctcatgctcctggaataccttcaatagctgccttcctcaccgcagatgtttctgcctcttaaggatagatcttctgcaacagtcttgctgacaagctagagcttggactgaaagagaagagctggattatatatttcccagacttcaaaccctagcagaagctaaggcttgtgatttgacctgagacatttgtttcaggtaatcgtgtagaatgaagtatcttagtttaaagggtaagagagaagttgtttctggtttttccttgcccctgtgtgaaaataggtcctaaatgactgacttcactgcattagaccctatagctggtctcacaagacactttgtgcccagctgtcactcactctcagcagcttccttgcagcagagcagggctgaggggaaggggctatgaatgtttgtatacgtgttcacagggcacggaaaatcttatgctgctccgtcataaacctacaccaatgcccagcaatcaccctcctcacttccttgtctagatgtagaggtcaggctgctgaaccagccaacacatgggctactgctgggaagcctgggctgttttttttcttaaacacattttatattactgaacaaccaaatctaccctccacggccctgaggccttatcagttccactgattaaaaactttctcttccacggactttaagcccggtaggaaagagagaggaggagggggaaagagcaaaccatctttcttccaggcccttgactgctcctttgggctgggccaaggtttgtatgtaccacaccatgcatgactcagatgccctcaggtccctttctctatggtatgtatactgcttgtgtttgggctgaagcactacctgacattaaaggaaggacttggagag

SEQ ID NO: 547 - DNA, 1781 bp, Homo sapiens
agtaataatagtacaagtttagcatctataattggaatcagagcaaaagtgccaatataggagttaatgtctctttcttggtgtagtccaaacgtaaacactattgggccaatatggcagctcccctgtcctagggacttgggtctgtcttgtcgctctcttctcctgaatgtgcagctttcttctcattataaatggctgtcccagctctcagcagtgacacatgacttgggtattggcacataccatttctacatctgcccattgaccagaatctagtcccgtggccatccaagttgcaggagaagctgggacattcatcttagcccagcagccgatgtctgtctctattactgtaaatgaagtaaagaatggatcaggaggggacaactatgaatctttgtgatacctactatgtttcagtcactgtgctaagtgctagggatatagagataagtaaagactgaatctggtggagaactgagtttagaatgaggacttggggtagatccctgttgtctgaagatacccttcttcgtatacactatagaaacacaatttgttctgtgtatattctatatgtaaccttctgtgcttttgcatcttctgcccattgcctgggatcctttctccctcgcactttccactgaatgcaattccgtccattctgcaaggccagcccaagtgtcctcatctttgtgaaggctctatttttccttccagggatcgttaggagttgttcccttggcgttcccattgctctgaaacactgtgttctctttcctctgttttttgagatggagtttccgtctgtcacccaggctggagtgcagtggcatgatctcggctcactgcggcctctgcctctcgggttcgagcggttctccttcctcagcctcccgagtagctgggattgcagacatgtgccaccctgcccagcagatttttgtgtttttagtagagacgaggtttcgtcatgttggtcaggctggtctcagacttctgacctcaggtgatctgcccacctgggcctcccaaagtgctgggattataggcgtgagccaccccgcccagcctcctcagttcttatatgtgcctagaggaatacatggattgtattttattcatttcatatccccagcaccttagcacagcactgagcaaacagaaggtgctctataaatgtttgccgaatcaaattagttagtgcttggaatccttttgtggattcttgaatgacaaggtgggtggaatatctaatgaatgggggaatctctctcatattgtgtataaaaatatcatagttaataaaatgttaagtgaattccaaatcaaattcagaatcatagaggggatagatcatttccccagtgttttcatcttattctaactttaagctaaatttttattctttattcagttattctagtaaaaatgtggtgatagaggtgatgaaggggccttaagaaaaaacttgaggccgggcacggtggctcacgcctgtaatcccagcactttgggaggccgaggcgggcggatcacgaggactggagtttgagaccagacttcctaccgtggtgaaaccccatctctactaaaaatacaaaaatttagccaggctggtagcgggcacctgtaatcccagctactcaggagcctgaggagggagaatcgcttgagcccgggaggtggaggttgcagtgagctgagatcgtgccactgcactcgagcctgggtgacaagagcgaaactctgtgtcaaaaacaaacaaacaagcaaac

SEQ ID NO: 548 - DNA, 2124 bp, Homo sapiens
agtgcgcgggctgacactcattcagccggggaaggtgaggcgagtagaggctggtgcggaacttgccgcccccagcagcgccggcgggctaagcccagggccgggcagacaaaagaggccgcccgcgtaggaaggcacggccggcggcggcggagcgcagcgatggccgagctgcgcgaggcgctcgtgtccgtgtggctgcagtgcaccgccatcagcaggatttacacggtggggcgcagcttcgagggccgggagctcctggtcatcgagctgtccgacaaccctggcgtccatgagcctggtgagcctgaatttaaatacattgggaatatgcatgggaatgaggctgttggacgagaactgctcattttcttggcccagtacctatgcaacgaataccagaaggggaacgagacaattgtcaacctgatccacagtacccgcattcacatcatgccttccctgaacccagatggctttgagaaggcagcgtctcagcctggtgaactcaaggactggtttgtgggtcgaagcaatgcccagggaatagatctgaaccggaactttccagacctggataggatagtgtacgtgaatgagaaagaaggtggtccaaataatcatctgttgaaaaatatgaagaaaattgtggatcaaaacacaaagcttgctcctgagaccaaggctgtcattcattggattatggatattccttttgtgctttctgccaatctccatggaggagaccttgtggccaattatccatatgatgagacgcggagtggtagtgctcatgaatacagctcctccccagatgacgccattttccaaagcttggcccgggcatactcttctttcaacccggccatgtctgaccccaatcggccaccatgtcgcaagaatgatgatgacagcagctttgtagatggaaccaccaacggtggtgcttggtacagcgtacctggagggatgcaagacttcaattaccttagcagcaactgttttgagatcaccgtggagcttagctgtgagaagttcccacctgaagagactctgaagacctactgggaggataacaaaaactccctcattagctaccttgagcagatacaccgaggagttaaaggatttgtccgagaccttcaaggtaacccaattgcgaatgccaccatctccgtggaaggaatagaccacgatgttacatccgcaaaggatggtgattactggagattgcttatacctggaaactataaacttacagcctcagctccaggctatctggcaataacaaagaaagtggcagttccttacagccctgctgctggggttgattttgaactggagtcattttctgaaaggaaagaagaggagaaggaagaattgatggaatggtggaaaatgatgtcagaaactttaaatttttaaaaaggcttctagttagctgctttaaatctatctatataatgtagtatgatgtaatgtggtcttttttttagattttgtgcagttaatacttaacattgatttattttttaatcatttaaatattaatcaactttccttaaaataaatagcctcttaggtaaaaatataagaacttgatatatttcattctcttatatagtattcattttcctacctatattacacaaaaaagtatagaaaagatttaagtaattttgccatcctaggcttaaatgcaatattcctggtattatttacaatgcagaattttttgagtaattctagctttcaaaaattagtgaagttcttttactgtaattggtgacaatgtcacataatgaatgctattgaaaaggttaacagatacagctcggagttgtgagcactctactgcaagacttaaatagttcagtataaattgtcgtttttttcttgtgctgactaactataagcatgatcttgttaatgcatttttgatgggaagaaaaggtacatgtttacaaagaggttttatgaaaagaataaaaattgacttcttgcttgtacatataggagcaatactattatattatgtagtccgttaacactacttaaaagtttagggttttctcttggttgtagagtggcccagaattgcattctgaatgaataaaggtt

SEQ ID NO: 549 - DNA, 1951 bp, Homo sapiens
agcatctccgagggccacctctctggcctgggccggggccgaagcggggtcggctgcgcaagaggcggcaactttggcttatactgactcagcccagcgccccctttttatcccacataaaaatggagaaatggcctccgggaggaagatgtgaagcggcacgctctatctctactgatcttcactcaaaagcagccgcaggagctgttgctatctcgctgtggtgcagcgcttttccctcctccctcactttcccacatgcccagaggcaaagtgtctggccgacgtctgaggagtgaagaagccactgggagccactccctctcactcaccgaactatgggagtaaagaagctgcaacatttctggaggctcgtccaggtcttcagaaggatgggtaacaaactattttcagcctgcactcctctagagtgcatcctgaatcactgggaatcctttgacctgcagattctgaagagaaaatgctgtatattcctttgcacaagggcttggccaggttataagcagcaggatggagaagcctggcctctggagggaagtatcaactttaatgctaacctgcagctggaccgtttctgtaaacatggaggcaaatggtctgaggtctcatacatgcaggttttctttgccttgcaggataatctggacctttgctgatattgtaggatagatccagcctgcctagcagtcatctcaggagaggctgcaaaggacagtcccagggaagtaaaccccagggaagtaaattccagggaagtaaaccccagaggtgcctccagcagggggatcagacccctccagtcctactcctggtccatcatgtcctccctatccaggttctctctcaagcttgtcctctcctaggaatcctcgtttcaggcaggtcccagcctcactcatggccctacaagagatgccttgtgaatatggccccattaaggtatagacgtgtttactcatgtcttttttctacaggacttaagacaaattaggggggatcttggtaagttttcagatgaccctgaagggtatacagaggctttccagaatttaaaccaagtatttgaactctcctggaaggatgttatgttacttttgaatcaaactttggctaccactgagaagcaaacagccctgcaagcagcagagaagtttgtggatgagctttgtatctcatacagtgccaagaaagggagaggatatgcaagaaaaagacagaaaaatctattggccaccctgcaggcttacaaaccccagaatcccaaagatgcacctgttaactgcgacaaatgtggcaaaccagggaatgttaaaaacgactgcccaggcagcatgaggaagccagctcgaccctgtccaatctgtggtggggaccactggagggtggactgtccccagagatgcaggtcactgggtccaaagccagtctcacaagtgtctaacaggattgatgggccccagggctcctgtccctggctctgacagctcagactgccattaccatccaggagccctgaatgattctggaggtcaaagggaggaaggtgaacttcttcctggatagcagagcagccatttctattctcctctccaatccaggcctccctccttcccttagcatgaccatgaagggtgtctcaggaaagcttttaacctgatatttttccaaccccttagttgtagttggggagacctcgtttttactcatgtctttttaatcatgcccgaaagcccaattcctctgggaggcagggatagtttagcttatatgtgaaccaccatccttatggctccaggacacactccttgcctccccctggtggagactgatatcaatccagaaatttgggcaattcaagggaaaattggctgagccacaaccaccatactgatctggatccaccttaaggatcccacctccttccctaacc

SEQ ID NO: 550 - DNA, 2435 bp, Homo sapiens
agcatcaccaggagggcttgttagaacactatttgtgacccgtcttggtaacatagtgaaacctggtctctacaaaacaaaacaaacaaaaaacactatttgctaggctccaccccagaattgctgattcagtaggtctaggcagggcctgagaatttatgtttatttctctttctttctttctttttttttttttgggacagtcttgctctgtcacccaggccggagtgccggagtgcaatggcacgatctcggctcactgcaacctctgcctcttgggttcgggcgattctcatggctcagccacctgagtggctgggactgcaggtgtgtgccaccacgcctggctaatttttgtagtttagttagagacggggtttcgccatgttggccgggttggtcttgaattcctgacctcaggtgagctgcccaccttggcctcccaaagtgttgggattgcaggcgtgagccaccacacccagcaaaatttctaacaagctctcaaatgatgctgatgttgctggttggggtggaggtggggcataccttgagagccactagattagaccaggggttggcgtattatggcagggccagtcactgtgttttataaaattctattggtacatagtttctgctgtctctttaaatattgtctgtggctgtttttggcagagttgagcattagagacagattacatgggccccaaacttaaaatatttactgtttgaccattttaagaaaaagtttatttaaccttatcccctttttctttctctctctctctctctctttccttccttccttccttccttccttcttttttttttctgagacggagtcttactctgtgcccaggctagagtgcagtggcatgatctcggctcactgcaacctccacctcccgggttcaagcgattctcctgcctcagcctctcaagtagctgggattacaggccggctgcctaccctccagactgtccgctatggctccaaggctgttacccgccaccgtcgcgtgatgcactttcagcggcagaagctgatggctgtgactgaatatatccccccgaaaccagccatccacccatcatgcctgccatctcctcccagccccccacaggaggagataggcctcatcaggcttctccgccgggagatagcagcagttttccaggacaaccgaatgatagccgtctgccagaatgtggctctgagtgcagaggacaagcttcttatgcgacaccagctgcggaaacacaagatcctgatgaaggtcttccccaaccaggtcctgaagcccttcctggaggattccaagtaccaaaatctgctgcccctttttgtggggcacaacatgctgctggtcagtgaagagcccaaggtcaaggagatggtacggatcttaaggactgtgccattcctgccgctgctaggtggctgcattgatgacaccatcctcagcaggcagggctttatcaactactccaagctccccagcctgcccctggtgcagggggagcttgtaggaggcctcacctgcctcacagcccagacccactccctgctccagcaccagcccctccagctgaccaccctgttggaccagtacatcagagagcaacgcgagaaggattctgtcatgtcggccaatgggaagccagatcctgacactgttccggactcgtagccagcctgtttagccagccctgcgcataaatacactctgcgttattggctgtgctctcctcaatgggacatgtggaagaacttggggtcgaggagtgtgtttgtcacttggttttcactagtaatgatattgtcaggtatagggccacttggagatgcagaggattccatttcagatgtcagtcaccggcttcgtccttagttttcccaacttgggacgtgataggagcaaagtctctccattctccaggtccaaggcagagatcctgaaaagatagggctattgtcccctgcctccttggtcactgcctcttgctgcacgggctcctgagcccacccccttggggcacaacctgccactgccacagtagctcaaccaagcagttgtgctgagaatggcacctggtgagagcctgctgtgtgccaggctttgtgctgagtgctgtacatgtattagttcctttactgctgaccacattgtacccatttcacagagaaggagcagagaaattaagtggcttgctcaaggtcatgcagttagtaagtggcagaacagggacttgaaccaagccctctgctctgaagaccgcgtcctgaatttcttcactagagcttcctcatcaggttacccagaagtgggtcccatccaccatccaggtgtgcttggatgttagttctccaccctcgaggtgtacgctgtgaaaagtttgggagcactgctttataataaaatgaaatatattct

SEQ ID NO: 551 - DNA, 3342 bp, Homo sapiens
actgcaccgggaccagcgcctccccgcttcgcgctgccctcggcctcgccccgggcccgggtggatgagccgcgcgcccgggggacatggaagcgctgacgctgtggcttctcccctggatatgccagtgcgtgtcggtgcgggccgactccatcatccacatcggtgccatcttcgaggagaacgcggccaaggacgacagggtgttccagttggcggtatccgacctgagcctcaacgatgacatcctgcagagcgagaagatcacctactccatcaaggtcatcgaggccaacaacccattccaggctgtgcaggaagcctgtgacctcatgacccaggggattttggccttggtcacgtccactggctgtgcatctgccaatgccctgcagtccctcacggatgccatgcacatcccacacctctttgtccagcgcaacccgggagggtcgccacgcaccgcatgccacctgaaccccagccccgatggtgaggcctacacactggcttcgagaccacccgtccgcctcaatgatgtcatgctcaggctggtgacggagctgcgctggcagaagttcgtcatgttctacgacagcgagtatgatatccgtgggcttcaaagctttctggaccaggcctcgcggctgggccttgacgtctctttacaaaaggtggacaagaacattagccacgtattcaccagcctcttcaccacgatgaagacagaggagctgaatcgctaccgggacacgcttcgccgcgccatcctgctgctcagcccacagggagcccactccttcatcaacgaggccgtggagaccaacctggcttccaaggacagccactgggtctttgtgaatgaggaaatcagtgacccggagatcctggatctggtccatagtgcccttggaaggatgaccgtggtccggcaaatctttccgtctgcaaaggacaatcagaaatgcacgaggaacaaccaccgcatctcctccctgctctgcgacccccaggaaggctacctccagatgctgcagatctccaacctctatctgtatgacagtgttctgatgctggccaacgcctttcacaggaagctggaggaccggaagtggcatagcatggcgagcctcaactgcatacgaaaatccactaagccatggaatggtgggaggtccatgctggataccatcaaaaagggccacatcactggcctcactggggtgatggagtttcgggaggacagttcgaatccctatgtccagtttgaaatccttggcactacctatagtgagacttttggcaaagacatgcgcaagttggcgacatgggactcagagaagggcttgaatggcagcttgcaagagaggcccatgggcagccgcctccaaggattgactcttaaagtggtgactgtcttggaagagcctttcgtgatggtggctgagaacatcctaggacagcccaagcgctacaaagggttctccatagatgtcctggatgcactggccaaggctctgggctttaaatatgagatttaccaagcccctgatggcaggtacggtcaccagctccataacacctcctggaacgggatgatcggggagctcatcagcaagagagcagacttggccatctctgccatcaccatcaccccagagagggagagcgttgtggacttcagcaagcggtacatggactattcagtggggattctaattaagaagcccgaggagaaaatcagcatcttctccctctttgctccatttgatttcgctgtgtgggcctgcattgcagcagccatccctgtggttggtgtgctgatatttgtgttgaacaggatacaggctgtgagggctcagagtgctgcccagcccaggccgtcagcttctgccactctgcacagcgccatctggattgtctatggagccttcgtacagcaaggtggcgaatcttccgtgaactccatggccatgcgcatcgtgatgggcagctggtggctcttcacgctcattgtgtgctcctcctacacagccaaccttgctgccttcctcacagtgtccaggatggacaaccccataaggactttccaggacctgtccaaacaagtggaaatgtcttatggcactgtccgggattctgctgtatatgagtacttccgagccaagggcaccaaccccctggagcaggacagcacgtttgctgaactctggcggaccatcagcaagaacggaggggctgacaactgcgtgtccagtccttcagaaggcatcaggaaggcaaagaaggggaactacgccttcctgtgggatgtggccgtggtggaatacgcagccctgacggatgacgactgctcggtgactgtcatcggcaacagcatcagcagcaagggttacgggattgccctgcagcatggcagcccctacagggacctcttctcccagaggatcctggagctgcaggacacaggggacctggatgtgctgaagcagaagtggtggccgcacatgggccgctgtgacctcaccagccatgccagcgcccaggccgacggcaaatccctcaagctgcacagcttcgccggggtcttctgcatcctggccattggcctgctcctggcctgcctggtggctgccctggagttgtggtggaacagcaaccggtgccaccaggagacccccaaggaggacaaagaagtgaacttggagcaggtccaccggcgcatgaacagcctcatggatgaagacattgctcacaagcagatttccccagcgtcgattgagctctcggccctggagatggggggcctggctcccacccagaccttggagccgacacgggagtaccagaacacccagctctcggtcagcacctttctgccagagcagagcagccatggcaccagccggacactctcatcagggcccagcagcaacctgccgctgccgctgagcagctcggcgaccatgccctccatgcagtgcaaacacaggtcacccaacggggggctgttccggcagagcccggtgaagacccccatccccatgtccttccagcccgtgcctggaggcgtccttccagaggctctggacacctcccacgggacctccatctgactgcgccgcctgccctcctgcccaccctcccacccacccgaccagcagagctttttaatacaagaaaacaacaacacaaaccacacacactcgcacacacacacatacacagagactctttcatttttcttgtacatatgtgtaaataatgacagaatggagtggggtaaaagtgtattttgaatattcccaattttcgaggtcagtaaaaaaacacaaaaactgt

SEQ ID NO: 552 - DNA, 2670 bp, Homo sapiens
gttgcgccgttgctatggtaaccgaggaggccggggcccgggtgtggtatttttggagttaatggagtcagaaggacctccagagtcagagagttcagaatttttctcacagcaagaagaggaaaatgaagaagaagaagcccaagaaccagaggaaacaggccctaagaacccccttttacaacctgctctcacaggggatgtagagggtttgcagaagatatttgaggatcctgagaatcctcatcatgaacaggccatgcagcttctcttagaagaagacatcgttgggagaaatttgttgtatgcagcttgcatggctgggcaaagtgacgtgattagagctttggcaaaatatggtgtgaatctgaatgaaaaaaccaccagagggtacacactcttacattgtgctgcagcctggggtcgtttggaaactttgaaagcactggtagaactggatgttgatatagaagctttgaacttccgggaagaaagggctcgagatgttgctgctagatattctcagactgagtgtgttgaattcctggactgggcagatgcaaggctgactctgaaaaaatatattgcaaaagtctctttagctgttactgacacagaaaagggatcagggaaactccttaaggaagacaagaataccatcctcagtgcatgccgtgcaaaaaatgagtggttggaaacccatacagaagcttccattaatgagctttttgagcagagacaacaactggaagatattgtgactcctatcttcacaaaaatgactacaccatgtcaagtgaaaagtgccaaatctgtaacaagccatgaccagaagagaagtcaagatgatacctccaactgaacatacgttctgtaaaaggccacattttcttttagtatctgaaaggcaaacctattcatgccatttgaaatcgagaaaacagatgtgggtttctttaagtatttaagtacaacattacatcgcccttgttttgtttgacctgttcagcatgcttatgtccggactctggcctcgcctctgctcctccaagcacagccccatgtgagtttcacgtgctccttcaggaaagcacttgggtataaatcattcgtgaagaccatgtggaggctttaagaactactcagagaatctaataattttctgtgtaattgaggcattccatataaaaggacatatttggctatttccagagaaaaaatttgttctccctgcctaaaaaggaaatcttatggaatgacacttggagcaaggaaatattaagaccagcttggattaggagcctctgggtacaactatcactttttatgtccaaaattaaatttcacctgtgaggtggggtatacctctgagtaaaacccctctttatctttgacctccttctatctgtaaattaataaacacaaatctgtatagttttatacttagaagagttctcctattctgtaaggctggcaatacagatattgtaactggactgaagaccatttcccctcccattctgttttatatttcctaggttttaagtacgatagttggtttcatattggtggtttggaaagccttttttctaatttatttaatcaggcgcctcaaccttctcttacgttgtgactttatggaaaagttttatagaaaagaagatggtttttaaaaagcacttattgttcgttcttatggctttctcttctttgtcctgttctgaaagctagttttcccttatggggagaaggaaaaggaatgggtaattcagtaatactttgtcagttgacatttatttaaccatggttttgagataaccctgttttaaatgtctcccaaagtttttagttttttatccttttaatgtatgagcaattcagtttcaattttttaaagcaaaagaacactgcaataactttcagccacctttttggccgacccagtgggtgtttatggagcagtacaaagaagacctgtgtttgctcctttttttttttaccctccttctcccttctcccttttcccttcccttccccttctccttcctctcccttcctctcccttcccctcccttcccctcccttcccctcccttcctctcccttcctctcccctcccctcccttcctctcccctcccctcccttcctctcccctcccctccccctcctcttctctctcctcctcctcttccctctccaactccttcttctccctctcttatctctctctctctctccacccccgcaaccttcttgacagggtctgcctctcctgcccaggctggaatgcagtggagttatcatgatcatagctcactgtaacctgtaactcctgcactcaagtgatcctcccaccatgcttgggtaattgaaaaaataaacatttgcaggctgggtgctggctcacacctgtaatccaagaactttgggaggccaaggcaggcggatcacctgaggtcagcggtttgagacaagcctggccaacatggtgaaaccctgtctctactaaaaatacaaaaatttagctgtatgtggtggcacgtgcctgtaatcccagtgacttgggaggctgaggcaggagaatcacctgggcccgggaggtggaggttgcagtgagccgagatcgcaccactgcattccagcctgggtgacagagtgagactccatctc

SEQ ID NO: 553 - DNA, 1759 bp, Homo sapiens
ggcctttttttttttttttttagtagagacgtggtctctctatgttgtccaggcttgtcttgagctcctgggctcaggtgatcttcccacttcgacctctcaaagtgctgggattacagatgtgagccactacacttagccagattttacttttttaaaaaaatacgtagaataatccagtaatggtagcagaagctcagcactcattgagccctctctggatgtggctctacgtcgtgtgttggagtctagtcccttctctgtctcctttgctggaacttcttggactctttaaatattccctttcgcagggtcgagggccctggcctcaactctcttctctgctctgtgtcactcacttctccagtgaccttgaccagccccaaggttttaaatgagttctagaccagcactgcctgatggaactttctacagtgatggaaatgttcgtatctgcatgccccatgtggcagccactagccacccaaggctatggagcaccagaagtgtggctaatgcaactgggaaaaaaaagttttaatcgtattcaattttaattaattttaacgtaaatagctgcatgtgccctagcagctaggagctactacagcagctagacaacacatctaaacaatgagtcccaagtttacacccacatcagagacacatcctctgaactctgacttttgtaggcaaaggcttgcacgacactgcggccaaagtgttccactgacatctctgtcccagcatgtccaaaacagaagttgtgatttctcctccacctccaagcaccccatccccatcttggatgcaggctgttgccaaagttaagttcccaggactcatggctgtctctgctccttccctctcaccccacaccccacactcagccagtcccgtggctcaaccaatacagccactgctcaccgccctcaatgccagcctcaggtcacgccacactgtctttcttgtggacaccacaggaatccaccccacacacacacttactcttctctccctccaccctcaccgtcttgttgtccattctccccacatcccccagactcatgccttaaaaatgtggatcaggtcatcccccggctcataacccccacagagcttccatcacatttacgatgaaattcgccctcctcacccctgctcaccgtgggacctcactccctcctccatttcctccttagcgcttctccaatgcccagtgagtcatttccttgttagtgtcttatccctgccggcatctaagccccatgagggttctgctgctttggcgctgtgtcaccagcccccagcacagtactgaccatggaacgactccacagctctctgggctcacattggatgatgacctctttcagcttcatctctattgtctcctttaaccctcagacacccctgtgatgtggttacttttactggccccatgcacaagtgagaaactgagtctggggcgggttacccagctgtgatgaatatctggtaaatgtttacttttagcattcacggtctatctgcagtgagtgagagcttgctgtgtattggtgtattgtctcgtattattgttcctctcatctcctatttcccccataaatatatattacatctaaaataattcactctaggccaggtacagtggctcacacctgtaatcccagcactttgagaggccgaagagggtggatcacctgaggtcaggagttcgaggccagcctggctaacatggtgaaaccacgtctctact

SEQ ID NO: 554 - DNA, 2001 bp, Homo sapiens
aagcaccagccccagcccggctccctccagagcccacatttgggcccagccccgtccaaggctgcatcccggccctatcccgggtcacggagtgacccttcctcgtcccgatcaccccgcccggtccacccgccatgggcttcttagaggaggagggcagatggaacctgtccttctccggcgccggctacctgggcgcccaccacgtgggcgccaccgaatgcctgcgccagcgagccccgcgcctcctccagggcgcccgccgcatctacggttcctcgtctggggcgctcaacgcagtcagcatcgtctgcggcaagtcggtcgactgcccctccaccatcacggtgtcgcccttccatgggacagtggacatctgcccccagagcacctcccccaacctgcatgagctgaacgtcttcaacttcagcttccaaatctccactgagaacttcttcctggggctcatatgtctcataccccccagcctcgaggtagtggccgacaactgcagacaaggctacctggatgccctgaggttcctggagagacgtggactcaccaaggaaccagtgctatggacgctggtgtctaaggaacccccagccccggctgacggaaactgggatgctggctgtgaccaacgctggaaggggggcctgtctctcaactggaaagtgccccatgtgcaagtcaaggatgtacccaactttgagcagctctcaccagagctggaggctgcactggagaaagcatgtacgagggatcccagccggtgggcccgcttctggcactcggggcctggacaggtgctgacgtacctgctgctaccctgcacactgcccttcgagtacatctacttccgcagcagaaggttggtggtgtggctgcccgatgtgccggcggacttgtggtggatgcagggcctgctgaggaacatggccctcgaggttttctccaggaccaaggcccagctccttgggcccatcagccctccggccactcgcgtcctggaaacaagccccctccaaccccagatagctcctcatagagaggagctcgggcccacccaccaggcctgagggggccgagcagggccagcccagtgactggtgtcccttgattcctgctctggcctttgtcctgtgtgcccacatctgccccagcgggaagaggccctgccaatctccgtggagaccctgcagcttggagcccgttccttggggcgcagcctgtcagcatgtccccggtcactgtgtacccaggtcacctgccctccctcttgccccgtctcatcagggagagaaaggaggacagccacagagacacatgtcttactttcagaatttccacggggggactaggagggcagcattgctggggagaggggctcctgttctgccgtggagctgcccacggagcacctcacagaagattgagaaagtgcctgatgcccgcgtcagagaccagaggagccaactgagatgatggggtgggggtgctccccccagactttctcagtcctgcagcggcccttgggggtgacccccggcatctaccccactcaggaaaccttgacttctgacttcctatcaggtccagagggtggaaggccctggcaggaagcaggaggaggaggagaggggggtccgggtcttttcaggatcccagctgtgggtgcttctgttgggcccagtggcccctgctatccccacagcctcattcctgcagaaggtttgtgacgtagctgtgcctgtacctggggcagagaggatgccagggacaccaggcctctggcctctccacgagtcactgctctccccattggcagcacgggacccatgctgtgcccccggccaggccctgaggaaatgctcagcctcagtggagatggggaggttagagagatggaggcgtgagtgagaacgggaagcaaaggaatacacgtgggaactaaagagaaaaatgaccagcctgggcagcatagcaagaccctgtctc

SEQ ID NO: 555 - DNA, 2197 bp, Homo sapiens
gtgcgcgcagggcagacggtagagcggagacgacgctcccagactcctccggtctccccgggcagcatgaagaccgccgagaacatcagaggaaccggcagcgacgggccgcggaaacgaggcctctgcgtcctctgtggcctccccgcggcaggaaaatcgactttcgcgcgcgccctcgcccaccggctgcagcaggagcagggttgggccatcggtgttgtcgcgtatgatgacgtcatgcccgacgcgtttctcgccggggcaagagcgcgaccggcgccatcccaatggaaattgcttcgacaggaactgttgaagtacctggaatacttcttgatggctgtcattaatgggtgtcagatgtctgtcccacccaacaggactgaagccatgtgggaagattttataacctgcttaaaggatcaagatctgatattttctgcagcatttgaggcccagtcttgctacctcttaacaaaaactgctgtttctagacctttgtttttggttttggatgacaatttttattatcagagtatgagatatgaagtctaccagctggctcggaaatattcgttgggcttttgccagctctttttagattgtcctcttgagacctgtttacagaggaatggccagaggccacaggcactgcctcctgagaccatccacctgatgggaagaaagctagaaaagcccaaccctgagaaaaatgcttgggaacacaacagcctcacaattccgagtccagcatgtgcttcggaggccagcctggaagtgactgatttattgctcactgctttggaaaatccagtaaaatatgctgaggacaatatggaacaaaaggtaaacttccagtgtaaatttaatgtaaatgagaaggaacaactttttgtaggaagatcttttgagccgattataaaatgtgagtgaaacgggagatgcgttgtcattggcttggcctctcaccagcactcactgctgacagctcatgccggctgggcaaagccgattgttaaactttcaaaagtgttggagcctgttgatggtttgttggtaggaatgtttacatcacagaaattggcaaacactacagataggtctggggtttttttctgggagagtcaattattagacattcaccagcatatcaccgcctagctggaacccagtttaccactggatctgatttggttggactctcttgtagggaagaataacaaacagaaaagccgcttaaacttttcttttagtcctttcaaatacatgtgacctattctttagccatttattttataaaactatgtgacttctaataacaatgtctgtattaacataggacacagacagaattatttgttcaactaacattcttcataaaactgatcagacactccgaaggattgtatctcagacaatgaaggaagcaaaaggtatgatgtgtcagttatgtgttgagttggtatgattgtgactttctactgctactgttattcccgacactcagagtttattagttttcagtcataaaagttcacatcatgttttcaatttaattatgcaatttgactaaatgtaactaaaaattctacctctggaactgagtgttcatccatccaacaaatttttactgagttgccttactgtactaggccttactctagatgctggggaatcggcagggagcagaacattctaatgaggagacagacaaaacatgattacatgagtatatgcccatgctctgaagaaaatttaagtaaggtaaggcagtgtagtgatgggaggatttatttttaaaaaggtaatcaggaagccttctcagagatgacatttaagcaaagatgggtaagagcgaaccatgcagctatctggaggatcattctaggcaatgaacacatcaagtgcagaagcgcaaaggttggctggttgcagtgttgcagaatcgagaagaggccattgagcacggggtgagatgaacaagtgcttcctcacaacttgaagcttctagcagaagaacttaacaagctcaaagcagagtttttggaagacctaaaacaaggaaacaaaaaatatctgtgctttcagcaaaccattgacataccagatgtcatttctttttttcattatgagaaagataatattgtacagaagtatttttcaaagcagcattaaaatttctgaactgccaatc

SEQ ID NO: 556 - DNA, 2814 bp, Homo sapiens
agagagaaagaaagaaaatagggacagggtcttgctgtgttgaccaggttggttgtgaactcctggcctcaagcagtcctgcctcagcctcccaaagtacaggcgtgagccactgtactcggcccagcttttccttttaagcttttcggtaggtctattcctttccccacctgttatccactgcctcaggaagctgcaaagttagtcagttgcctgcaattacaccctgatgaaaagacttttcacaccaggcaaaggctgaaccaagtcaattacagccaaccttgcaagaggagccttatcagggaaccaccagaccggtcagataatgacagttctttgggcatgagacttgaaaggagctccagcctcattctgctccctcttgtggcgccaggctgctgtttttcatcaggagtgcagaatgtgaattttcaaggccaccacggaactgcagagtgtgcgatcttaactagggcaagtgaaaatgccactgttcttaccaagattctgctgtttttcttgaataaacattctcccgactgccctaagcctctggctaatttccagagttctgaaaaacttgattctgaccatttttgccagttttctcactgctattatggaggagagaatttttggaggtccttacttcacggattttgctgatggcacacctggaaaactgatttttgtttgtttgtttctttgagacagagtctcgctgtgtcacctaggccggagtttgcagtgagccgagatcgcaccactgcactccagcctgggcgacagagcgagactccgtctcaaaataaataaataaataaataaaataaaatgttcagtttctccttcacgctaatcacagttcacgtgcttgacattcacatgcggctagtggctaccatactgggcagtgctcggttaaagactgttttctacagttggactgtgggaaggataaaaattccagaggaaaagtatgggcaaaggcacagaggaggataagcaagcagctcgtccagatgagagtgagggaagaagagagagtgcaagttcgaggcactaggctgtctgggttcaaagacctgctcttccacatactgttgtgaactttgacaaattatttcacctttctatgcctcaggtttctcagctgtagaatagggatactaacccttgctgtgaaaattaagttcacacacacatggtacttctcttagaatgaggctttcaagtgccagtcagtgggccctagaggctggagcaattgccagggccctggtcataaaggttcagaaattaacgggtgacaggaagcgtggtgaggcagccggatgggaaggagaactcctcttctctggcaaaatgtctcagtctgtctcgtttctcccagcagttttgtcatagttacgaatggtgtttcttctctaggagggaaattccttctcatagctatctctgctcatatagatgtctgtaggcaatagggtgggctggcttccagtgtgggtgaagatggacaaggtcagaccaatccagggagcacgtctttcttgcaggtggacattgcatctgggatggccattgaagggatgtgctatgcccaggtatgtagcaaccagcccatgcctgcttgttaacataggctgggccaggctagagggactttgtatggtacatgaccaattttagaaggttcttctcaacacaaacagtctgaccgcatccatcgtccctcataagtcacctggagtggcttgaggagagccatagtgcttctctctgggacttttccctcaaccatctaatgtactggggttcatcctgcccacttaatgccgagaatcacagaacacaggtccttaagaggaagaaccacatcttttgcctctgtatcggatgccactgtaaagttcaggatggagttgggaggtcaagggcttggttgtagcctgcaggctgtgttcaatgtaggggctgtacacttgggactgacctattaaatctcttactcatgggtgagtaaaaaatgctaatctccacgttaacagatatccaaaatactcctaaggggtcctgggacttggagaaactagtgtgaacctggattcaaagccagatttcttactgcaaagaatttttttctctactgagcagcctcatgtcagaccactgcagacggcagctgagttctcaggaggcatgaaagcagtgtgcaagtggaggctaatgctgatggggcacagagaatacaaaggctggcctgtcttccccaggagacaaagcagccacggaggcttatacctttgcatgcctcaagatcagagtccagagacaatggaaacacttggaccctggccttgtcttgggctggacaagcttaagcaactctttttgggcctgtggccctgctcccccaaaactaatattttgtaccttgttgcagaatattccaacccgggaccggctagagggcatggcagccttcagggagaagcggactcccaaatttgttggcaaatgacccccattttaaccttcagcatgggagatgcatgccctgaagagcaggatccagaaggaagatttgtggccagattgccttcatcatttcacctctccagacttccatttcttcacaaggatgatgatggaaataaaatgactggcgtgatgcctggaaccaaggtgctgatcctaccacctactgctaccttccttagcttcaccctggctagaaataatcacgagggttgggtttgctttggaaaatgcctgtctctctacctgaatgataaagaattaaattag

SEQ ID NO: 557 - DNA, 3420 bp, Homo sapiens
gtcgcagccccggaggagcgcgcgagcagcccgggatggtgcgcgctgccccgacagccgccgccccggggccccgagccgccgccccgtgctccggggacagggctccccgcgccccgcgcagctgagcgctgccgccgccgcagcagacaggatctctctcagttacccaggccggagtgcagtggcgtgatcctagctcactgcagccttgaacccctgggctcaagtgattctcctgccttggcctcctgaatagctagaactacagatcaacagtacaaattctgaagtttgtaaacttgctgatggtggtggtaagccatggcagatgataaagttgctatcttaacggatgatgaagaggaacagaagagaaagtatgtgcttgcagatccctttaatggtatttccagggaaccagaaccaccttcgaatgaaacaccttcctccacagaaacatctgctattcctgaggaggaaatagactggatagagaaacattgtgttaagataaacaacgatcttctaatttccaaggtcttttattttttcttttactctgcctatggctctctctatccccttttgcctgtgtattacaaacagctgggaatgtctccaagccagagtggactactagtaggtattcgttacttcattgaattctgcagtgcccccttttggggtgtagttgcagaccgctttaaaaaaggcaaaattgtcctcctcttttctcttttgtgttgggttttattcaacctgggcattggatttgtcaaacctgctaccttgagatgtgtaccaaagattcgcccaacaactcaccccaccaatgcaagtcaccagttaactatcctgccaacaaattcttcctttacctctttcctcaccatatcaccaaaaatgcgtgagaaaagaaaccttttggaaacagggctcaatgtctcagacaccgttactttgccaacagctccaaacatgaacagtgaacccactctgcagccccagacaggtgaaattactaaccgtatgatggacttgactttgaactcaagcacagcaacccctgtctccccagggagcgtaaccaaggagacaaccactgttattgttaccaccaccaaatctttaccttctgaccaagtcatgcttgtttatgatcaacaagaagttgaagctatattcttggtgatcttggtagttgtcataataggagaatttttcagtgcctcttctgtcacaatcgtagacacggtcacactccagtatctgggaaaacacagagatcgctatgggttgcagcgcatgtggggctccctgggctggggcctggcgatgctgtctgtgggcatcgggatcgactacacccacatcgaagtgctcatcgatggaaaggggtgtaagccccccgagtacaggaattaccagatcgtcttcatcgtcttcggcgttctcatgaccatggccttgatcgttgccactcagttccggttccgctacaaccatttcaaaaacgatgattctaaagggaaagaggtggagatcccgcaggtggaaaggaacaactctacagagtcctctgaggagacaccaaccaccacaagccactcgcaggccttcaacttttgggacttaatcaagctgctctgcagcgtgcagtatggctcagtgctgtttgtggcttggttcatgggttttggatatggcttcgtgttcacctttctctactggcatttggaagacctcaatggaactacaaccctctttggggtctgttcagtcctgagtcatgtgtctgagctgacagcatatttttttagtcacaagcttattgaattgatcggccacatcagggttctgtacattggcctggcctgcaatacggctcgctatatttatatttcctacctggagaatgcctggactgttctccccatggaagttcttcaaggagtgacacacgcggccatctgggcagcatgcatttcttacctcagtgcagccgttccccctgagctgaggacatctgctcagggcatcctgcagggccttcacctgggtttgggaagaggatgtggtgccatgatcggaggcgtgttagtcaattattttggggctgctgcaaccttccgaggaattggcatggcctgcttggtgatcctactgctctttgccctgatccagtggctggcagtgccagatgaggaagaagacaagacaatgttggcagaaagaattcctgttccctccagtcccgttcctatagcaaccatcgacttggtacagcaacagacagaagatgtcatgccacgcattgagcccagacttccacccaagaaaactaagcaccaggaagaacaggaagatgtgaacaaaccagcctggggagtcagctcttctccctgggtgacctttgtctatgcactctaccaaattaaagagatgatgcaactcacaagagacaaccgtgcttctgagatacagcctttacaggggaccaatgagaatagggaaaattctcctgctggtagagcccagcctgtcccatgtgagactcactctgacccatctagaaaccagccatcccctgacgcagcagcatctcagacgcagaccagccccgctcaccccagtgtggacccgtgcacagaggagagtgaagagcagcaggctcagctggccgcgggaggacactgagggcatcctgctcatctcacaccctgcatggaatcaggctcctcagccaggacacagggtgaggccccccagccaggatatgcctcccctggaggagcacagcactgcatatgcttctaaatatctaaactcattaacatggaaacacacacacaggagctacagtacatattggcaggaaaaggtaaactttcgtaatctcattggaattacaacagggaaatggagttcaatgaggactttcagttctttgcttggttaggttaaggatgatagaatttctctgccagtgcagtaagagttgaaaccggcagttacactaagtaagtggagggaatgaaagtgtttcgaggtgaatgtggatataatttccctcttctgattatttattcttatttggttcctaacacaaactgggaagagatagaattcatctatactttcttttttcttggagagaaccgtttaaaaaattacaagatatatttaaaaagtaaccagataaaagtagcacatgtgcttttgttaaaaataaagttaaaagttaaagttaaaaaatgaagttaaaagtttcatcagaaactttacatatctttagcaaatatatttttatatgtgtatggcatataatggaaataattctttgagcaacagaagctattattaactactgcaagctaagccgagcttaaaaatgccttttgttttaaatgggctttg

SEQ ID NO: 558 - DNA, 2710 bp, Homo sapiens
tgactcatcaagatgcagaagccatagtgacagacttctggttcagactcaccactttgtgtctctttttttctccatgctacccagcccttttctccatttaagaaatgttggcagggtaatttaaaaacactcacctagcttggattatttgcattttcaccaaaaatcctgcacttcagcattcatgtttatgggaatagtcgcagctactgatttcatttggttaaactgttataatattgattcattttgtttatttcagttcataaggatgcaatttatcctaattttgattttggttgtagaggttggcgatttgaaggagctgcagacactagacatttctaccaatcgtttgctaactttacccgagaggcttcacatgtgcctttctctgcagtacctcactgtggaccgaaatcgtctatggtatgtgccgcgccatctctgccagctgcccagcctcaatgagctctccatggctggaaaccgtcttgcatttttgccacttgatttaggtcgatctcgagaactacagtatgtatacgtggataacaacattcacctgaaaggcttgccatcttatctgtacaataaagtcatcgggtgcagtggctgtggtgctcccattcaagtttccgaggtgaagctgctttccttttcatcagggcagcgaaccgttttcctcccagctgaggtgaaggccatagggacggagcatgatcacgtcctccctctgcaggaattggctatgagagggctgtatcatacctaccacagcttgctgaaagatttgaactttctgtctccaatctcattacccagaagtctcctagagctgctgcactgccctctggggcactgtcatcggtgtagtgagcctatgtttaccatcgtctaccccaagctctttcccttgagagagacgccaatggcagggctgcaccagtggaagacaactgttagttttgtggcttactgctgctccacccagtgtctgcagacttttgacctgctgagttgataaacactcaagaacctcaggagcgctgccagcttgacactggggaatccagccagtccagcacactcttccatcctgtcctgtccaatgcgggggcactgcagaactctctagaaatgtcatgattgagcttcagagctaaaatgccttcacccttcccccaagttggaatatatcctcccccaaattaaggacccatttgtcttctgtgtttttcctttttatgtgagtgtgtcttttacagaaaccatttagattgatgggcctccccaaatctaatttaaagcaagtttccggtccttggagaacagtgacttgatcatctagccagattcccttttgaacacacataccttcagtgatgcttcctctcctctcccctcccttgctttccccagagagttatttccctgagaccatgttctccacagtgtctccagtggaaacttgtcagtttttgaggagtttcagcaaaccccgtggcctcaatggtcttgagtagcagggtggggcgcctgagttggcagtaaagtgaggctcccatggaggctcagtgagggtcccagagcacacaccctctggaaagttccagccttgtttatacgttctacagtgtagcaacagacttttgtgagggattttaaaaacaaaaatgtagattgtaatgaaatacacttcctgttttttaaaagtgtttgcagaaaatgatttttgaagtttttaaatttcctgataagattttttttatatgagaagaatttgaggaatatttgaagctttacaagatctgatttttttctttctcaatataaagtttccatacaatgagaaagggggagaaaacacacattgaaataagacctccgtgttcttttttgatgggtttatgattcagtttatactgactttgaaatatttttgtcacatgtgaaaggcttcagctacttccactactggttttttttgttgttgctgaggcaggagaattgcttgaacccggcaggaagaggttgcattgagctgagatcacgccattacactccagcctgggcaacggagcgagactccgtctcaaaaaaaaatcattcaagtttcactgtgcctacagtgaggagctacctccttgtgtcatcagctaatagatctgaaagtgatgccggtgtctctaggaaaggaattgatcatagccaagtgactgacattctctcggtcaggaaaagagcttgcttcacagcctttgaagtatgactgtatgtgtggtccccttgtactttggagacagaaggtactggcagcgagtgtggtggatgggcagaaggtgtagcattcggagattatttctgtatgtaattaagagactttcaagggttagccagacttttttccactcaagtgtggattatctttgctacctgtgttaaagaatatcaggttttgtttcttattgtgatttttgagtctaaatgatccaagatttttaaaatagatacataatgaaatccaggcctctgaaaaattatggcaacattcatttggagtatggctaaaaactcatactttatccaatttggttgcctctctcagttactgcagtttatagaataattgagcttgaaccatgtgaatgctcagaatgtcaatggtggagtatttattcaagagaaatggctgaatctcgatacg

SEQ ID NO: 559 - DNA, 2674 bp, Homo sapiens
gaaaatttatcagcctggccatgtaaaaagtgaaaaagcaaggatgtagcccagaggccatttgctaaagagattagcatggctagaagggatccaggtgctattcctcaagacaatggaagaaagacctcaaaggcatttcagagattttcaaggctgcccctcttatcacagacccagaggcctaggagggcagaatggtttcagggagcaagcccaggcactttctgtgggcttactgcccaagaccacctccagactctgtgccccagcacagtactctgaggacaccccagcaagaactcaagcaggccaaggtgtggctcatgctgcagatctggaagtgtaccacaacccagagtggagggaagttaacatcctatggggcaaccttcagctattggaagacaggagccaggggatagatagccctttactcccaagtgatctggagatgcatttcatccggcttctcagatggttttctgggactgaacaacccttcaccagcggagatggccaacttgacaagacctccttccattggatttccctcctgctttgctgtgctccctctgccttactccagctttctgaggtcatgctccccagtcaaatactatcacataaacctctgccttgacttctgctttctgaaaacacaggctaagctaactggcaccctcgacaggctctgggcccaaccacggaatcttatacggagctacggaaagagaactgcaggtagatgatcagcagcaggaccgtggcccaaaacaagcaccaggggatagagcagaagttccagcctgagcccgtctggtcctgcgacttggtggggctgggcgcccgggagaaggtgtaggtggtcgcctcctcctccagcagcttctcgctgggcttccagtgcacgatgccctcctggcaggcctcgcagaactctccgcggtgccgccggttgtcctggcggctggccacgtggatgcggtactggccgccacgctcgccgtagcactgctcgcgcaggctggtgatgaggttgtccaccaggccctcgatgttctcctccagcatgctggactcgtccagccgcgccgtgccgcactcatagcacagctgcttgaagacgcgcatgcgcaccgagcccgcccgctgggcgcggtccaggaacatgtggaagaggatgaccacgtagggcgactgccaggtgtgccagcaccaggagcagtggaacctgcggagacgggaggagagggaggaatagaagacgggcggaggtggtggaaacagccctaggaatggcgtgaggggacgtggaggctaagcagagcctggaggtggaggaagtgtgttgccggcgccctgggttcattagctttccccaggaagccactcagccttgcaagtgcccctaggactacagcaggttcctcaggatgtcaccgggcatccagcagtgctctacctcctcagtgctttccagaggcctaactcccaccaccccagcattgggcgtcattcttattcctcatgggcaaaatgcgcttggtgcactagagtgagagaggcatccatgtacacacagctagaggcagaaccggcgcccagcacgtaacaggtgcccagtaatgtttcctgaattgaagtgaattggctgaaccagggcaagcaggaaggccttgcttctgacttccaggctgcaccactcagcctccccatcttatgtctcaaagacggaaaaattgtgactcagagaggaagagtaacacaggtgatcagtagaagagctgaaatccaactcaagtgtcgtagttcccagttagggactctttctctgacttccagtctacgccagcctaatagtgagattgaagctaaacacttgggttctacgtaatcttcctctccttggaaggtgccccagagctagggacctaaaggcggcctgcagggatccaccttcctgggctactcacctgcctgaagcatgcaattccaggtactgcttccaaccagggctcagcacattgtgcttgaggttggggtctatgatgaggtcccagctgtcagccggctttgcctcctccatcttctcatagaagactttcttccactcatctgtggtcacgcttttacacatggtctcgtcagtagtgagggaaggcaatttccaccttagtgagaacacggagagtgagggtaggtgcagggcagggcagcgcagtctccacggtctaaaaatcctcatcgacaagaccaggaggaagcaggacccagctccctcctttgtccgcagtggaacctgtttccacggcaaccaggcaggttgccagaagacagagcttggggaggagggagtctctgaagaggtgtttcaaggccctgaactgagattgcagaggcagagtttgtgggtctaaatgatccaagacagagtgggggacctgaccagagattgagcttcagaccatctcaccctggcctggaaagagtatggggaggtgaggactgggaactggctcagtttcaccttgccgtcccctggaggcatcatcagcatctggctgctacggtaaccatgatgccttaggcagccaaggagaaatgagggatggggagatgtaaatttgttagtagatggagcaataataataaactctctctcggcttcccc

SEQ ID NO: 560 - DNA, 2333 bp, Homo sapiens
atgttatgaactttccaattatactttcagttatttttaaatatacaataaattattgtagtcatcctgttgtgctatcaaatactagatcctattcattctatctaactatatgtttgtacccattaaccatcccccacccctccactactacccttcccagccttgggtagccatccttctactctctgtctccatgagttcaattgttttgatttttagcccccacaaataagtgagaacatgagaagtttttctgtgcctggattatttcacataatatccttcagttccatccatgttgttgcaaatgataggatctcattcttttttatggcagaatggtttttcattgtgtatatgtaccacatttcctttatccattcatttgttgatggacacttaggttgcctccaaatcttggctgttgtgaacagtgctgtaataaacatgggagtgcagagatgtcttcaatatactgatttccattcttttaggtatatacttggtagtaggattgctggatcatatggtagctctattgttaggtttattttttatttaaaaaaacatttttttgagacagtctcactctgttgcctaggctggagtgcaatggcgcaatcttggctcactgtaacctctgcctcccaggttcaagtgattctcctacctcagcctcctgagtgcctgggattacaggtgtgtgccaccacacttggctaactttcgtatttttagtacagggtttcaccatgttggccaggctggtctcaaactcctgatctcaagtgatccacccgcctcagcttcccaaagtgctgggattacaggcgtgagccaccatgcccggtcctattgttagttttttgaggaacctccaaaccattctccatagtggttgtactaatttacattcccaacaacagcatacaagggttcccttttctccacatcctcgcccccattccttattgcctgtcttttggatagaagccattttaactggagtgagatgatatctcattgtggttttaatttgcatttctctgatgatcactgatgttgagccccttttcatatgcctgtttgctattttttttttttttttttcagaaatgtctattgagttctttttcctatggggactgttatgatttgcattcacagttgagggaactgagggctgggaatgttgagacttttcagaggtcctaaaagaatggacccctgagtcaatggcacacgaagctccctgtccagctttcttccacatggcaggacgtaggcctcagactggaaccctggcagtcatttttgccctgtgggtctctctgagccctgcccaccagaagcagctgcagatcccatggcccaggtcacattctcttgggggccacttctggggacacacaaggaagactgatgtgccagaaacattccagtggccccgggttcctattccaactctgcctgcactatcttcattcaatcattccttccagcctcaaccttctcatgggaaggacgcaaccacccaccacaaaactcactgtgagagtcttgtgatagtatagtatgttcatagcctagcgcctgggagagtgctcaagaatgggtagctgtgagcctggcaggtggtgcacacctgtggtcccagctactcaggaggctgaggcgggaggctcccttgagctaaggagttcaaagctgcagtgagctatgatcgtgccattgcgctccagcgtgagcaacagggtgagacactgtctcaaaaaaaaaaaaaaaaaaaaaaaaaagaaagaaatggtagttgctctgggtgaactccttcagaggatggatttgatttcattaccatctctaagccccagacaccctgcaggccttccatacagcacaggttggagctgaaggagtgcccaggctgcggatggaggaaggacgtgctcgggagaaggtgaagatgggagagaagcaagatcttctgtgtttggaccaaggacacatttccttactccatagcagctgtggtcagtggcttagctcggacaaggagatgagagcccatgtgttgtgagggttcttctgggaactctgagaaggcaggagccgcccccgcccttcactgcctctcttccattctgcagcatggaatatggatgtgtggtctggatgtacagacaccattttggaccataaagacaaggacgattgtctaaggatgacacagccagagcactgagagtggcgagaaggacaggggagctgctgtgccaagcaggactgtctctcttaagagaaaaataaaatttattggtgtttaaaccatt

SEQ ID NO: 561 - DNA, 2062 bp, Homo sapiens
aaaaatgagcaattcttgtgctccaggccctgggtgaggtgctgggattaaaacagtcaagaatggtcaccggccctgccttcgtgagtccagtctggtgggatcacaacaaagtgagactctgcttccccccaggcagagcccagggacggcagacacagcacaggcacatgctgcgcacttccaaggcacctttctcctagatgacgtgtgacacagcagccctggtgtgccttggccttgaacaattaggtagggcaccagtaggggcaggaagactgacagcatggaccactacttcctgcgtggctggggcaggaggccctgaaagaagcagctacagatcctgctttccaggtggtctcaccacaggcacagccagttgcctgcaactaagaacactgaagcccggcctgctttgggggcatttccagcatcccctcctatctggaatctcttcccaaaacatccctgtccccagggactgcatagctcctttcacctggtggcccagccctctctgtgtgccactggctccctgccctcctgggtcccaggacctgggctgagtgtgcaactttagcttccatctgcacagggccctctctgcgggctttgccctccctgatggcatgttcttctcctaacccactggagtgaggggcattcttatcgtctccacttacagaagagaagcctctcatacagaaagggtagtttccctttcaggctaaatcttctgattttacctcttatagtgtccattccagccctggcttctgaccagcgtgagtgcagctgaaagaggctaggatggtcagaagattttttttaaaagagaaagaatacttgttttggaccagacctgtagggtaacagcctggggtgcatgtaaacagaacttgggcctctccagggagcaagtgggtaggtggtgggggcagagcagttattagtggggcttcaggagtgagagggccagtctgggcatctgtgtgccagagggtcctctcctgccaaccaggtggacctggctctgctacactagtttctgggggtgcaggggaagcaggaagctggtggggggagagtggaccatctttggagtagggagacctatcctggctttgtggggttagaggggacgtgggaagggggtacctggtaggaacagcttcctgcttcctctctcatcacagttctgctacttggcaaataaggcctcattggagcagaggcccagagaggcgcaggagagggaatggcaaggagggatgtggagagacctttcactcacagctggagccagagacaaccccaagttcataggaagtgctgtgtgaccgctccacttgcatgtggctttctcccactttcacatctggcttctgacacccagagctgcgtgtgaggccagggagagggggccacctccctggcaccccagggccaggggtgtcagagctgcacaggaagtgaaggaatgctatcaggaagggggtgaggtggtgccattccaggaatgggaggggcagggcctggggccaccgactgtgcagagacaaagctgggccatccataccttctggattttcctgatcaggcccaactccaaacactctgtcctgttgcccccaggagtgtgtaagttgggagggtcatttgggggccaggctctgtgctgcgtccagggcaggggaaagcatgggaggggcaagagaggcaggacactgccctggagaagacaagtcccttgttggttttctcccagggctgacagcacagacctgacccaggctctgggtagaggaggcatgactggctagtggggctagcctttgccctataactgacctgatccgtaggtgtttcccagggggcctcggtgtctcagcctacaccaaggcactgaaggagagtctccctttcctttcctgaatgtatcggcaaagaaaaatgggcagaggcttctaagagcatccttgcaaaaggctcccaagggatgggctgtctatgtcttattgcaagagaaacattcctctgatttaggaggaactgcaag

SEQ ID NO: 562 - DNA, 2183 bp, Homo sapiens
gaaaggcggggcgggtctggccacggggcgaccgagatggcggcctccgggggcctagagggaccctgggcgtgcactcgcccttccggctcggcctttagttagtgaccagctcctcggcgttctgcagagcgtgggtttcagcgagttctacgtgccagctcttgaggatcttgcttgtccaaacccagaagacagtgcatgaagccaggggacatccgccatgctccaaacaacttggcctcaggagtcagtgacctttgaggatgtggctgtttacttcacccagaatcaatgggccagcctcgaccctgcgcagagggccctgtacggggaggtgatgctggagaattatgcaaatgtggcttctctggtagcgtttccattccccaaacctgctctgatctcccacctggagagaggggaagcaccatggggcccagatccctgggacaccgagattctgagaggcatcagtcaaggtggtgagtcctggatcaaaaatgaagggctagttataaagcaggaagcctctgaagaaacagagttgcacagaatgccagtaggaggacttctcaggaacgtttctcagcactttgattttaaaaggaaggcactgaagcagactttcaatctaaatccaaatctgatacttcgaggtggaatgaagttctatgaatgtaaagaatgtgggaaaatcttccgatataactcaaagcttattcggcatcagatgagtcatactggggaaaagccctttaagtgtaaggagtgtggcaaagctttcaagtccagctatgattgtattgtacatgagaaaaaccacattggagaagggccctatgaatgtaaggagtgtggcaaaggtttgagttccaacacagccttgactcaacatcagaggatccacactggagagaaaccctatgaatgtaaagagtgtggaaaggctttccgtaggagtgcggcatacctgcagcatcagagattacacacgggagagaaactctataaatgtaaggaatgttggaaagctttcggttgtaggtcactttttattgtccatcagagaattcatactggggagaaaccttatcaatgtaaggagtgtggcaaagccttcacccagaaaatagcctccattcagcatcagagagttcacactggggagaagccttatgaatgtaaggtgtgtgggaaagccttcaaatggtatggaagttttgttcagcatcagaaattgcaccctgtggagaagaagccagtcaaggtccttgggccatccctggtcagtccccagtgctcctctccagccatacctcctgttcttctccagggatcctgttctgcttcagccgtagctgtgccttcactgacctttccacatgctgtgctcattcctacctctgggaattttttcatgctgctgcctacatctggaataccttcttcatctgcccaaatagtgcgtgtcttccagggtcttactcccactgtgaaaccttccccagttattctcaccccttcttctcactcctcatgagctttatcttggcagtcttacggctcttatgcctagcaaatctccagcctaattttatatatttttttgagaaagggtcttgctctgtcacccaggctagagtgcggtggtgtgatcttggctcactgcaacctccccctcctgggttcaagcgattctcctccttcagactctcgaatagctgggattacaggcacgcctcaccacgcccagctaatttctgtatttttagaagagatggggtttcgccatcttggccaggctggtctcaaacacctgacctcaagtgatccgcctgccttggccccccaaagtgctgggattacaggagtgagccactgtgcccagcctccaacctaatttgagtttcatttgtatttttttcatcaccttacatgtgttaacagctgtttcaacataaactccattataatctacatacaagacctgtggctactggtagagaattggaataagcttccaacaatggactgtagagattaatggagattgtttagtgggcccatggctaggtggggtattaatacagttgaagttatgttgcccttggcacagatctttgagaatctcatacatctgtgaaaaagataatgtgaaataaacagtaaaaaaaaaaagt

SEQ ID NO: 563 - DNA, 2764 bp, Homo sapiens
agggtgcgtcaccggagcagatgcccggggcggttggaggctcccgggctcccgctgactcatcagaaaggcctgccgcgcggcccggggggcgggggaacgtgggggaccgcggggagctgccgggcaggcggcagccgaggtcgtttgaggcgcgcagagccggaaaaccccacggagacggctgggcgggggcggggcgatcggcactgaccaggtcacctgcagcgcgggctgacggcgggcgactgaaggagggagcaagtctcccacccccagcagccggcggccgcttccgaagtctgccccttccactgcggagcggcgccccgcgggcccccagccagcgcgcccgaggcgcccccgccccgtgtcgctcgcgctgcgttattgggagaaggcggttcctgagcaccagcacgggcctcggtgacaccggaggtcgctggggtcttccccttccccttaagactctgggtctgtctgtgggaagagctttcattccccaccccactctatgccgaccctctccgggggaggctccactggcactgtagacaccacgtgctgggtaaaaaggcctggtcccagcgcttccctgtcactgactgctaaccacaaggcgccgtggcactcaggaaatgcggcaggggggctggagaactatcaggaaggggtgtgggcagagaagaggcttccaccctgtcttggaacacggacacagtccatggcattcaaaagaggtgggaggctcctctgtgcacgtgccttccgcccccgggacaggtggaggaggggatttgactggtcctcaccctctgcatttatagtctgggcacaccttgggcagtgccgcaggagggcgctgtggagtacaggcacatgcagaaggtgtggcgagggcttcctggtggagctggcagtagggcagggaccttgaaaaggaatgatttgaacagatcggaaaagacattccagacagaaacaaatgcctgaaacccaaaccgagaagcaggaaagagcagactgcgttctcggaatggcagggagtccagtttgactggaagacctgaggctcagaggcgcatcacggcccagatgcagaccacagaggcaggcacagtggcccaggaggaccgaggacctggagtcacggggttccgcccgctgcccctggggaaccgagtcatgccagttcccagacagatgaattccttccaagaattccacagtcctgctcaatcctagccgccaagcctcctggccttggatggctgctgtctaatgcagatcctctttcatccagatttcaaatatttttcctattctgtcctttgatcactaacgtttatgtttatctacatcagcatccctcaatcctgacggcactctgaaattatctaggggtgctttaaaaaagaaaaatgttgatgcatggccctcctccaggaaatctgattttattggtctggggtggggcccaggcatcagcagacttttaatgagcagttagagaggagaaccactgatggagatggtcaccagggagtgtccaggtcagaccgccacagaagagtgcagcctcctggccttcagacccaactgggacaaaccctgagaacagccttggcagacctccaggggcagctggactccctgaggctggatgttgcagcctctcccaggcatccactctgcagctgaggccaaagtttccaacgggaagggagggagagtctccgagtctgggccttgccactcctcactcagcatctgaccatccccacctcctggatctacagggttcatagaggaggacccagaagagggaaagtcaggctgaggaacttggcctccctgctgcaagggaaatgacatcggttaccaaggaggtgaccagctatccttttccaagactgaaaagcagaaatacggccctgaggctagagggtctaagagaacaataggaagaatttcctgacaaaggacaatgttgcctaaaggactcaggaagctctgtgaaaacaggagactcccgagcaccagacccttttccaccaggcagtgtttttcccatatgacaggtgagaaaactgaggctgagagacatgtaataacttgctgaagcagcaaccagcacaccatatagctgaaatctgtagatcagcagttaaaagtggtagggcaagtcctctctgactttcagcgctaagagcctaggattctgtgtttttctgcttaagcctgggaatcagagtcctacaaaagccgcgcctaatcctgggggtgtgggctttaaacccagagagaaagcatgttattggaatactcctgcacttttctccctttgaatcccaccacggaaagaaaattctgtgacgtgtacccagtatttattggagggtatttcctagcaagaaaatgagggcgattgaccaggcacggtggctcacgcctgtaatcccagcactttgggaggtcaaggtgagtggatcacatgaggtcaggagttcgagaccagcctgaccaacatggagaaaccccgtctctactaaaaatacaaaattagccgggcgtggggtggcgcatgcctgtaattccagctactcctgaggctgtggcagcagaatcgcttgaacccgggagacagaggttgcagtgagttgagatcaagccatcgcactccagcctgggcaacagagtgagactctgtcaaaaaagaaagtgtggtacatctatactaatggagtactatttagccgtc

SEQ ID NO: 564 - DNA, 2491 bp, Homo sapiens
atgtgatgtcttgctgtgggcagtgccaggcctagtgggctggcaccagagcagcttggggttggggaagcaaccttccatgaagaccctgtttccaggtagatcccagccccttggccaagccctgctcctccgcttgggtctcagggatgccatccaccttctcttttgcttcttctattttcttggtgaaatagcggcagggccgcggggccgctggaggctaggggagggttgtctaggacagaggaagggcgggcaggcttactgggggccaaggtcccattgcagagggggcccctcggttgtgttcagctgctgggcgccggggtggaggagcagagtgcttttcttcaggcctggtgtttgccaggctggcaagcctctgtgggaagaggttcccctttgttttctgcagggtgcgtgggagctccccctgtggactgagggtggccacatcggaggtgggagtgaaggagctcagggacacacaggacatctggagtgttctcagtgaacccaggtaaatggcctcctgcttcctccacggctgtcctgagctgtaatacgatctcaggtggcaatgccaaggagcaggaggggagggggcatgaatgtccaggccctcaggctgtttgtccaagacccgatcttccacttgggaccactgtctgaacacagcactcactacccacaacctcaggctggagggcgaggtgccatgagcatcgcagatgctcacagggcatgtctgccatgcaccagacaggcaggggttcaggggcacataagtcaagaaaccccagtctgcagcaggtccactgaggcaggagaacagcaaggcagctcagaagtgacttcccattgagacctggggattaggatccattctggtttgtccttccccatgaaaatagacaatgggaaaaaaccagggaccaagaggtttgcaggctgagtttctgtctgtgctgtgggctgctctgacaggtgtgtcctcagagccttttatgggctacgcttgtgactcaggcagcacaagggactccccagttccctgcatgggaggtccctctgacgggaagtggtgcctggtatccagtttgctttcgtatcagttccttttgcatccaacgactccagtacctcaagatgtggcaggaaaagcccttcctagaaacttttggtgtgttgggcctttgctgctcagaccttgtggagtgcctgaggatcagtgggagaggggtgggtgcccctgagctggaaggcccccagccagtgctgaggaaatgtgggtgacacagaacaggcaggtaacaggccagtgccattctctgccggacttccacctccccgacgacagcagcactccgttgtgttagacgccaccaggcctccttgggaccctgccttggggtgctcacgtgggaggactcttgcctctgctgctgtcgaggggagccctcccctctgggtctgtaggctgcagaacacgccaaggggcactgcagcatggaggcaggctggaaggttggggagcagaggctgcagggagtggagggaaaaagatttaaaggagactgaagtaaaaggaagaaacctaattcagtagttctcaacagggggtgatagcaccccacgggggacactcgccaatgtctgggtgcatttttggttgtcacagctggtggttgctacaggcatctggtgggtcgaggccaggatcttgctcatcatcttacaatgcccagggcagccctgccacagagaatgacccagcccccaatgtccacagtgcccgggacgagagggactgattgggctccagggagtggctgaggctgggaggacacgggcctcatttacctccacttgagctctgcaggaaaactcctcctttgactgggtatttctgcagtggaaaagccccatttttaattttcttgagctgtgactagtggtgcacaatgtggccagttggcctttgggtgagtttggaaaatggaaaggctcatatctgggctctgggccctgactttaccttgtctatgtggagcactctcatgcttgcattccccaccctctcagctctcacggcagaagtggcatctcgccgcctgggagctgtccctcagggggttgggcccgcatgggctccttccagccttccatgggatctatgggtgggcagagcacaaaatagccaggtgaggctgggcgcggtggctcattcctgtaatcccagcactttgggtggccgaggagggcggatcatgaggtcgggagatcgagaccatcctggctaacacagtgaaaccctgtccctactaaaatacagaaaattagccggacgtggtggcgggcacctgtattcctagctacttgggaggctgaggtaggagaatggcgtgaatgcgggaggcggagcttgtagtgagccgagatcgtgccactgcactccagcctgggcaacagagcaagactctgtctc

SEQ ID NO: 565 - DNA, 2691 bp, Homo sapiens
aaaagagcccgggaccagcgcagagggcctgatgcctgatctgtcaagtctgtccgaccgtgcctgtctgctgtccccccagctgttccagtggtggattggcaggaccgggtgcctacccggtactccttaccaaaggagcccctggtagtgcccacctagcccaggacaaggagtggaacgggagctgcagctgcagtggtcacgaaggcagcctggaggaggtggccatggaggatagccttcgttatcgtcagcctctgccgcataaccgcgaatgaaccaaagagaacccgaagccggtgggaactcagcgcagtctcaccctgcccctcgggaaccgcttctcagcagcggcagccgaagtctgacgacgcttagcaaccgttaccttgacaacgcaatcctatcgcgcaccatggagtgcggcgcccctctgcatcccagaaggcaccgcgctgtccctaagccttccgcccctctccgtcccaacatgcaacgaggctcacagtcaatgaatcgtcatcaggtatgaacgaggctcggccaccaactacatcacccggaacaaagcccggaagaagctccagctgagcttggctgactttaggcggctgtgcattctgaagggcatttatccccatgaacccaaacacaagaagaaggttaacaagggttctacagcagcccgaacgttttaccttatcaaagacatcaggtttctcctccacgaacccattgtcaacaagttccgtgaatacaaggtgttcgtccggaagctccggaaggcttatgggaagagcgagtggaacactgtagagcgtttaaaggacaataagcccaactacaaactcgaccacatcatcaaggaacggtatcccacgttcatcgatgccctgcgggacctggacgatgccctctccatgtgcttcctgttttccaccttcccgcggactggcaagtgccacgtgcagaccattcagctgtgccgccggctcactgtggagttcatgcactacattatcgctgcccgtgccctgcgcaaggtcttcctgtccatcaaaggcatttactaccaggccgaggtactggggcagcccatcgtgtggatcactccctatgccttctcccatgaccacccgacagacgtggactacagggtcatggccaccttcaccgagttctacaccacgctgctgggctttgtcaacttccgcctttaccagttgctcaacctccactatcccccgaagctcgagggtcaggcccaagcagaggcaaaggccggtgagggcacctacgcgttggactccgagagttgtatggagaaactggcagccctcagtgccagcctggcccgcgtggtggtgcctgccacagaggaggaggccgaggtggatgagtttcccaccgatggggagatgtcagcgcaggaggaagaccgcaggaaggagctggaggcgcaggagaagcacaagaagctttttgagggcctgaagttcttcctgaaccgagaggtgccccgtgaggccctggccttcatcatcaggagttttggtggggaagtgtcctgggacaaatctttgtgcattggggccacctatgacgtcacagactcccgcatcacccatcagattgtcgaccggcctgggcagcagacctcagtcattggcaggtgctacgtgcagccccagtgggtgtttgactcagtgaacgccaggctccttctccccgtggcagagtacttctctggggtgcagctgcccccacacctttcaccctttgtgaccgagaaggaaggagattacgttccacctgagaagctgaagctgctggctctgcagcggggagaggacccaggaaacctgaatgagtcagaagaggaggaggaagaggacgacaacaacgaaggtgatggtgatgaagagggagaaaatgaggaggaggaggaagatgcagaggctggttcagaaaaggaggaagaggcccggctggcagccctggaagagcagaggatggaggggaagaagcccagggtgatggcaggcaccttgaagctggaggataagcagcggctggcccaggaggaggagagtgaggccaagcgcctggccattatgatgatgaagaagcgggagaagtacctgtaccagaagatcatgtttggcaagaggcgaaaaatccgagaggccaacaagctggcggagaagcggaaagcccacgatgaggcggtgaggtctgagaagaaggccaagaaggcaaggccggagtgagtgcctgcggcccctcacagggctgaggccagcccctagcagctggatgtggcagaggcaggccagaggacctaagtgtgatggaccagagtcacttctcctcctcctttctccagccagccctgacccctcatgctctctggctgggccagtgggcagccctcgcttcccttggatggagctgccctgctggtgcctggtcagagaagaggcctctgtgcccagcctgattctctgctcccaggagccagtgacatgaggtgcagaggcccacccagccccctacctactgcccccattcatcctggctttccacagccccctcccacacagttggacccgtgattctcagggtgctgtgatggggtgagggtagggggagcatttgttattaaatgactggactttcgtgccaatt

SEQ ID NO: 566 - DNA, 3204 bp, Homo sapiens
ctagtgctcaacgtcttctaacacatcagacagccccccacaaaaaagggtttcctagcctaaaatgtcactactgtgaggagaaaccctgctttagaaaatgtgtatatacacaccgatagaaaatgagtggtctgtaagttcaagttgggccttgggatcatggcccataggaggcctcagatggcaggcatggtggaagggatggaggcacgtgcctctctggaccaaggcacagacgaaaggcagcctctgggagcaggggttcagttcagctggttgccacaccagagagaagagtgggattagaattcaggccacaaacagagctgcagtgtggtcttcgaagacttgttgttgtagttctgcagcagttgctgctatgcatatgcttagggatatgccacctccttcagaaagtggccttaatcctccaaatgggagtgaatctccccacatcagtgctcaggctgtgggtctgaggcctttattatcttacccactaatacatcctgccattatgtcccagagtagacggtaagtttcctgaggatgagactcatgcattttcacctatctccatagtaccacggcatgtagcaatactgataaaatagttgctgaattgtcatcaatatttattcttcctcccaatattagaaattccatgtgcatacatttgaacaaaacatataaaatgttaaggtaaaaaggaagtaatctactattttcttctggaaaaatcatttagcaaagcccatcttcaaagatttgtttgtactttttttcaaagctaataatctgtttgactgccttccccacttctttaacgtttttagtagtttccagtggtaacatggttcatcttgaaatttaactactgcatttcataaatgggtcccaatttggttaatgtttttacacacaaatacctataatcaaagcatggagcaaattttgcctattctttgctatacaactcaaaaaagaattttttaagctctataattcattagtttgctaatggcttttccccataagagatagtttgaccctgctcaacttttagttacagcaaaaaaactcattcaggctttctctctgctcttcatattcaaaataaaccattctatagactgagaaggaatcaagcacttttggaataaaaggcaattttccatgataaaacattctgagcacgtttagtaccttcctattctttacattcctaaaatgtaagaaactcatctccagcaatccaaatatcttaaactccacttacaaaacaaatcaaagggttattcttcgccctacaaaagcacttatcaaaagattcaacccaagattattttcattcagcagcacctactctcaaacccatttcaatttagatagtatttacacagcttttcatgaaccagagctttctaagagctaagagggaatgatgaatgagttctgccccttaattctgcaagtgaggaaactgaggctcagaagaccatatgaactctccaagctgcaggataacagctgggacttatcaagggcccagggcttctcacatcttcaccacttccaccatgtcaaggccaccatcacgtcttgtttggaatgctataggaatctcctaggtcccatttttaccctccctcctatcatccaccctctctccaaaggccactccatacagcagcatgtggatgaatctacaatagaaggcaaactatgtccctcctttgctcagaaacttttaatatcttcctatttccccatgtaaaagccaatcctcaaccacagtgtagaagggctatccatttctagctacacatctcctcagtcactgcccccagccccagtacttggggactttgcccttgcagttccctgtgccagcaaactcttcctccagatgtccacatgactcacccccctccttcaggggtcttctcaaatgtcactttaccagaggtggcttccctgaccatcctgtataaatagcatcaccctacctcctatctctctctctactggctttttaattatttttattattattgagacaggttctcactctgtcacccaagctgcagtagagtggtgagatcacagctcactgcagccttgacctcctggcttcaagtgatcctcccacctcagcctcccaagtagctgggactacaggtgcacaccaccacacccagctaatttttttttttatttttgtagagacagagtctctctgtgttgcccaggcctgtctcaaactcttggcctcaagtgatcctcttgcctcagcctcctatattgctgggattataggcatgagccaccgcacctggccttattactttttcctaacacttttgtcacccgacatattttgtttattgatttcctttgcccactagaatgtaagctcagcaaaaaagtagcctgctggatccccagtgcctggtatacagcaggcactcagtattttggtataataagtgcttactatgtccccaatactgttttaaggaaggtatttacttaatcttcccaatatcctgagataggcattattatcatcattgtcatctctgagtcacagatgaagaaactaaggcacagagaagtttagtaatttttccaagatcacacagctagtgaatagtagagccaggatttgaacgcgagacaccggctctttaaccaccatcacatgtagtgtcacccttattgtgtcactcagttaatgataaagaactactgcactttaatgcttcttctctataccagactctcagaaattgatacatactaaagtatgctttcaaatgtcaatcatttcctataagtgcctaacattttaaagtaataaagtgtgattttgagctaagactggtaaacaaagtgtgctgcagccacaagcgtactgcgctttagcctctatctagttcaagaaccacttccagaggatatgagtgaggcttacaggcgtgtgcaggtaattctccctgctcaactgagattaccatcattagctctggtccataaagggaaaactaagacacaaaagccacattgatgttctaggccacacagccaattgcagtgactagaagaaagaagcctccccgggcggcgaaggttgcagtgagctgagatcgcgccactgcactccagcctgggccacagagggagactccgtctcaattt

SEQ ID NO: 567 - DNA, 2288 bp, Homo sapiens
tgccatagctcccttcaggagctcaagggttccaaatgatgacatggacattttctccaaagccccatttgtctccaagagcagtatggctccttcccagccagaggagtcagacgtgtttttgagagctcctttcactaagaagaaaagcatggaggagttaacagttatccaatgcacctcccaggagctgcctgcacagaccggtctcctcagtcagacaggtgatgtccccctgcccgcgggccgtgagagagctgtgtacacctctgtccaagctcagtattccacagctggttttgtgcaacagtctaacctcctgtcccattctgtacaagcagcagaccatctggacagcatctctcccaggggatcctgcctggaatctgggggtcattctaatgacagaaacaaaggacctcagctccagaaagaagctgtctcaggccccatggctggcaaaccattccgcccccagtccttatccaagtattcccgtcactatagcccagaagacgagccaagtccagaagcccagcccattgctgcctacaaaattgtttcacaaaccaacaagcagtcgatagctgggtctgtttctatcacatccctttcctccaggactacggagctgccagctgctgatccatttgctctagcacccttcccttcaaaatcaggcaagaaaccctaggagcaaaacctgagcctcaagcctcttgtctctatcccaccctcaatacccgccatggcactcccagcttagccttctgaagaagaaatattatcagttcttatatttcaattccctgcgtcagagcagaatttcttgagtcaacaaactcagttgcagtgatatttagttgaagcccctttaagttatgttcatttttgtttgtttgtttgtttgtttatattgatttctggacttggaggcattttcatctccttcacagaggtcatccacttccaccaagaactctgctttccccccgccccacccacagaaactgtttaaatcctgaaatacttcttcaccccaatcccaaaggggccctattgttgctagttttaattcctgtagctcctgttctaagtcatgcccatcgaagaatcaagattagtccctccactaaatcaagatttagtactcttgaaaaggggagatgtctggaaagaagagcaagataaaaaccctgcacatcaacaggaagtataatcctgcagttactaataattcctgtagaagcagcagctctaggagtctccagatctgattctcagtctgtgtgcaagccaggctggctctcgtgcatgactgtctatgggtgtggaatgtacgtcagagcctgtgtagagatacaggcagatgggctaactcctcatgtctagtcatgctggcagggctttccccacatccatgcttttgaaattagtgtgagtgtacaggtttgtgtgtgcatgtatacgtgtgtgtgcacaggaagcatttccacttgagggaaatcctgccccatcatgcctacctccacaatgaaatcactcgttttttggtgtttgctcgcctaactgacttgaaccccattttatttatttagtttttttctcatggcaaagtagaatacgttggaaggtgtagggaaatcctgctggaactggtgtttcagagtaaatcttttttctctccggaatttcttgttttgctattaacaaattatatttacctgattatgaaaaattaattttccttatacattttccccttacaacactagaaaagagcaccttgttacagttccggcctctcagtatgtgggctaaatgccagcattagggaattcattaatcatgagactaggctacaaactaggcttgcttgttttggggtggttttgttgttgttgttgttgttgttgttgttgtttccaaatctctactgccttttgaggaaatgtaaatctgagacatggaaataagtgtttgggagaatggaaaagagctgaatcaggtaggcatgaaaacttttacattctctatcctctttagatgttgaaataggccagacaggttaactgatgttttttaaaattgtcttttatttctggaaagatctgacttattcctagcttttttcataccctttattattagtgccttaaaataaagctggccaggtgcagtgccacacacctgtaataccagcattttggaaggctgaggcaggaggatcagttgagcccaggaagttcaagaccaactctggcaacacagcgagaccctgtcccttc

SEQ ID NO: 568 - DNA, 3179 bp, Homo sapiens
atctatggagacggcaatatggaggcgatcttacatttctttgatttcatctgaacgtccagttcacaattggagtgatgtttaccttaaccggttgtagactggtggagaaaacccagaaggtagagaatccatcagtctcatttgcctcttctttcccccttattcctcttctcctaagaggcaagagtgttcagaagaaacaagcagagagtaaaagccagataaagctccatactcagagtgctccctttggactgtgtcccaaggacctgatgctcacccaggctccaagctccgtcgtgaggtccaggaacagcaggaaccacaccgtgaactctggtggatcctgcctgagtgccagcacagtggccatccctgccatcaacgacagcagtgcagccatgagtgcctgcagcaccatcagcgcccagcccgcaagctccatggacactcagatgcgctccccaaagaagcaggagagagtgaacaagagggtcatctggggcattgaggtggctgaggagctgcattggaaaggctgggagctaggaaaggagaccacaaggaatctggttctgaaaaatcgatccttgaaactccagaagatgaagtacaggccccccaagaccaagttcttcttcacggtcatccctcagcccatcttcctgagcccaggcataaccctcacgctccccatcgtcttccggcctctggaggcgaaggagtacatggaccagctgtggtttgagaaagcggaggggatgttctgtgtcggcctacgggccaccctgccctgccacaggctgatctgccgcccaccatccctgcagctgcccatgtgtgctgtgggagatacgactgaggcctttttctgcctggataatgtgggggacctgcccaccttcttcacctgggagttctccagcccattccagatgctgcccgccacggggctcctggagccaggccaggcctctcagatcaaggtgacctttcaaccccttacagccgtcatctacgaggtgcaggccgcgtgctggtacggggcgggcagccggcagaggagcagcatccagctgcaggctgtggccaagtgcgcccagctgctggtgagcataaagcacaagtgcccggaggaccaggatgccgagggcttccagaagctgttgtactttggctctgttgctgtgggctgcacctcggagaggcagatcaggctacacaacccgtcggcggtaaatgcccccttcaggattgaaatttccccggatgaactggccgaagaccaggccttctcatgccccacggcccatggcatcgtgcttccgggagagaagaaatgtgtgtcggtgttcttccaccccaagactctggacaccagaactgtggactactgctccatcatgccttctggctgtgcctccaagaccctgcttaaagtcgttggtttctgtagaggccctgctgtgtccctgcagcactactgtgtcaacttcagctgggtcaaccttggggagcgctccgagcagcccctgtggattgagaaccaatcggactgcacggcccacttccagtttgccatcgactgcttggagagtgtctttaccatcaggcctgcctttgggacgctggtgggcaaggcccgtatgaccctgcactgtgccttccagcccactcaccccatcatctgctttcggcgtgtggcctgtctcatccaccaccaggacccactgttcctggacctgatggggacctgccactcggacagcaccaagccagccatcctgaagcctcagcacctcacctggtaccgcacacacctggcccggggcctgacgctctacccccctgacatcctggatgccatgctgaaggagaagaagctggcacaggaccagaacggggctctcatgattcccatccaggatctggaggacatgccggccccgcagtacccttatatcccccccatgaccgagttcttcttcgacggcaccagcgacataaccatcttccccccgcccatcagtgtagagcctgtcgaggtagacttcggtgcctgcccatggcctgaggcccccaaccctgtacccctgtgcctgatgaaccacaccaagggcaagatcatggtggtctggacgcgaaggtctgactgccccttctgggtgactccagagagctgcgacgtgcccccactcaagtccatggccatgcgcctgcacttccagccgcctcaccccaactgcctttacacggtggagctcgaagccttcgccatctataaggtcctgcagagctacagtaatattgaggaggactgcaccatgtgcccatcctggtgcctgacggtgcgggcacgaggccacagctatttcgctggctttgagcaccacatcccccagtattccctagatgtccccaagctatttccagcagtgtcctccggtgagcccacctaccgcagcctgctcctggtcaacaaagactgcaagctgctgaccttcagcctggccccccagagaggctcagacgtcatccttcggcccacttcgggccttgtggcacccggggcccaccagatcatcctcatctgcacctaccctgagggcagctcctggaagcagcacactttctatctgcagtgcaatgcttccccccagtatctcaaggaggtgagcatgtacagccgggaggagccactgcagctgaagctggacacccacaaaagcctctacttcaagcccacctgggtgggctgctcctccaccagccccttcaccttccgcaacccctcgcgtctgcccctgcagttcgagtggagggtctctgagcagcatcgaaagctgctggctgtccagccctccagggggctaatccagcccaacgagagacttacgctgacgtggaccttcagccctttggaggagaccaagtacctgttccaagtggggatgtgggtctgggaagccggcctgtccccaaatgccaaccccgctgccaccacccactacatgctccggctggtgggcgttgggctcaccagcagcctctctgcaaaggaaaaggagctggcctttgggaatgtgctggtgaacagcaagcagtccaggttccttgtcctcctgaatgacggcaactgcacccctctccaccgccagtaaaagcatctagtcttt

SEQ ID NO: 569 - DNA, 3446 bp, Homo sapiens
gggctgtcggggggtcgagacagtggagtgttcctgatgccagctcacggagggaatccagggaattaggtaatgaacggtctacccatgaaggggaccgattagtgcctctcgcctggtcctgaagacctttaaattattctttcagctgatgccaagagcctctttttggccagcacttactaagcaccagagacacagcgagaagcagaagcatacgagcacatcagtgtgattctgctgtgatgaagggcaagagagggctcactttccggcgtgacattcaagctagccccgaggcctgagcaggacccgcccaggggaagatctggaggaaagccatctgaacatacaacaagagcaaaggcctggtggagtcaagaccaccttggctgccaggtggaatggtggaataactcaggagtctgtcaggtctctgagatgtcaaacgggcttggcacacacccaggagctcaatgctgctgggagctgagcagctgggagcaaggagccctcatccccactgatgaagaggccagcccaggttctaggctaagcaggcctgtgattataaacagcagtgtctccctggacaagtttcttgaccctgagaagaatgttagaccatcaactttgtgaggggacaggcagtctccaacttttttcctgctcagtccttattgcatactcttggagaaggtctactgacttgttctcagatgccccacggctcagccaaccacccatccagcagagcattcaaaaggcatcgggaaggaatgagggcgaccgttctgccaggcccctattttttttgagaggagtctcactctgtcgcccaggctggagtgcaatggcatgacctctgctcactgcaagctctgcctcccaggttcaagcgattctcctgtctcagcctcccaagtagctggtactacaggcgtgcaccaccacacccagcaaattttttctatttttagtagagatggggtttctccatgttggccaggatggtctcaatctcttgacctcgtgatccacccgcctcagcctcccaaagtgctgggattacaggcgtgagccaccgcacctggcttttttttttttcttttagatggagtcttccttttgtcgcccaaggtggagtgcaatggcacgatctcagctcactgcaacctccacctcccaggttcaagcaattctcctgcatcagcctcctgtgtagctgggattataggcacctgccaccatgcccagttaatttttgtattttcagtagagacggggttttgccatgttggccaggatggtctcgaactcctgacctagggatctgcccgccttagcctcccaaagttctgggattacaggcgtgaggcactgcgcctggccattttgtttgtttgggtttgtttttgagatggagtcttgctctgttgcccaggctggagtgcagtggcatgatctcggcccattgcaagctccacctcccgggttcatgccattctcctgcctcagcctccagagtagctgggactacaggcgtgcgccaccatgcccagctaattttttgtattttttagtagagacggggtttcaccatgttagccaggatggtctggatttcctgacctcatgatccgcctgccttggcctcccaaagtgctgggattacaggcgtgagccaccacgcctggcctgtttgtttttttgagacacagtcttactctgttgcccaggctggagtgcagtgacgcgatctcggctcactgcaacctccacctcccaggttcaagcgattctcgtgtctcagcctcccaagtagctgggattataggtgcgcaccaccacgcccggcttattttttgtatttttagtgcagatggggtttcaccatattggccaggctggtcttgaactcctgacctcaggtgatccgcctgcctcagcttcccaaaatgctgggattacagcatgagtcaccacgcccggccaagaaagacccatattttgttttgttttcttttttgagatggagtcttgctctgtcgctcaggctggagtgcagtggcgcaatctctgctcactgcaacctccacctcctgggttcaagccattctcctgcctcagcctcccgagtagctgggactaccggcgcacaccaccacgcctggctaatttttgtatttttagtacagacagggccagactggtcacgaactcctgacctcaggcgatccacccgcctcagccttccaaagtgctggaattataggtgtgagccatcgcacctggccaccagacccccattaacttcagtagggatggcaccaggtttgagaggccaaaagagatccagagccagcaaacaagacttaggtttgattgaggggaatttgcatacagagcagtccagtggaggtgggctagataggagaactgccccacctgcagaaagtatgcagtatatatagcattttcacttaacaccctccccctaacaactttgatttaacccaaaacaaaggggctaaatcccctgtacatccacaggacagaatgggggctcagatattcctcatgggtaagtaatgaatctctggcttgtcctcacttggaactcctaacacattcaggtgcatctgccatacagggtcattctcagagtatgcttaagttattgctgtcaggtgcagctaccatacacaggtgtgtctgccatatagccacagaaagcaggagtcctacagctgctcctcatgggtctccatagactagtcttagagcaaggatgggcagccagcctccaggtttaacctggcactctcccccagcacttggtccccagagcaggggtgcatctctcccacttctggtcaacccttcagtaacaagtagagcccccagggtcttcatgaatatctagttgaactggctaaagaagagggccctgtaacaggacagaacaccaggagcctgaaccccgcatcttctacccttatcctgcatttatcctgcctgcattcaagcctgtccagctgcaccactggaggttaccatggcaactaaacccagaggcagccggtaactgagatacagctgccaagagcaactgatggtggaaaaggccaacagcagagactcttagaaggaagagaagtacacaggaggaggccccagaaccctgagggtgctacactcaaatctaatcctactcacaactcagcaggcagtcaacgtcttgcacaaactgccatatcaccaaccagaggcacagatatggacacaatggggccaatttgcagagatgtttgcaactatggatgcagagtagcacaggtgggacacatgttgtttagcccaaaagcaacgggtcttggtgaaaacgaaaatgggtagggtaccattgctgtttccaatgaaacaatgaattttgtgtgctcttg

SEQ ID NO: 570 - DNA, 2907 bp, Homo sapiens
agtgctgtcggagggttgctggggaaaggagattggctggcgaggaagatgaggaatgtgctgccaggagactgggatcacggccagatgctaattacgatggcctgggggtgctggtaccccctgtcagcatcatatcagcctctccacttcaaatcctgcccctctgatgttagaatctggctgcaaccatcccgtgattctgtggagcctcgtgccttacttctgctggcttctgtctgtcgtcacttccgttctccaccaccctggcctcaatcaaacacgttttctctgatgcaaaactcgaccttcatttacagaaagggttatctcaagaggcttgggatggttaaaccctgcacatctcagaggaaggactggctcttcacctgttcctgcaggataactgctaacggcttaaaatattctgcctgataagagggcttctgtatatctggggccttgggccatgccgggtagttgatgctaacaacatgatttatggtgggtgcctgcggtcatgctgtatcagcctgacctctggaggggctggacactgggtaactgatccccaagaaaagccatggacactaaggctcaggtgagttcccctggttggcagtgttttgcgtgtgttgtcacacatcattgctgggagacttaagcactgcacatatgactatctaggagggtacagctgcaagctcctgcctggattctgccctgagcacctttttcctttgctgattttgtttatctatttatttatttttgagatggagtctcgctctgtcaccaaggttggagtgcggtggctggatctcggctcattgcaacctccgcctcccgggttcacgtgattcttctgcttcagcctcccgaggagctgggattgcaggtgccaaccaccatgcctggctaattcttgtatgttagtagagacggggttttgccgtgttggccaggctggtctcgaactcctgagctcaagtgacaaggccgccggcctcgacctcccaaagtgctgggattacaggcatgagccaccgcgcctggcccctttgctgatttttaatccgcatccttccactgtgttaagctgtaactgtgaatacaacagcttttttgagttctgcgattctttgcagcaaatcgtcatacctgagcgtgtcttggggactccccgacacatcttcccactccctcttctgttttctcacttcctctggagtaaactgaaagaggcccctgcttgcctcttgcaaggcagttctgaacacactgagatcatttgtgatctcatatcctcttctaagcaattcatcaagaaatttctttcaaataaacccagtgctcttcatggaggtgatgctgatgaaaatgactttctccagcttattacacgtttgcagaagctcctgtttaagagtttgagcatgtatgtgtgtgtgcatatacaccagcacacacatgcatgcccacagctgtcatgccttcaccagaaccaggacgaggagttattctattgccagaattgaagaaccatttccacatattgtaaggtcagtgaaagtacaatgaaaaatacacctgctagcatgcctatgcatggcctctctgcaaataagatgaaggtcccttcaccacctgcttgcactgctaatggccctgtagattccactggatggatttgtaattttctcaaccatttcccctaatgctggatatttgggttatttccaacatttttacgcttccaaataaggcacccataatgattcttgcagagtaatcattaggctcttctataattatctaattatccttttttttttgtttttttctgaggcagggtcttgctctgacacccgggctggagtacagcggcacgatcatggctcactgcggcctcagcctcccacgctcaagtgattccacagtctcagcctcctgtgtagctgggatcgcaggtgtgcgccaccacgcctggctaactttttgtactttttatagagacggggagtttttttgtatttttttaaatagagacgatgtctcaccatgttgcttaggctgttctggaacttctggactccagtaatcctcctgcctcagcctcccaaggtgctgagactataggcatgagccaccgtgcccagccatataattatcttaagataaatttctatacatggaatttttatacgtggaatttctatacatgaattaaagagcacagatttttgtatgttggttgcttggtttttagaggcagtatctcactccattgcccaggttggagtgcagtggtgcaatcatagctcaccgcaccactgaattcctgggctctaggagtcctccttcctcagcctcctaagcaactaggactacagagtacatatgtttttaagatctttgatatcttataccttttggggactgtatcagttaaaaactctaccagtactgtagaaacatgatcgtgtctctgtttccttgccacactgggcattaattacttgatccattaatgagttaattgcaccctcaataagagtatggtaaagtgtgacacatttacactacagaatattatgctgtaaagaataaggatgtaggccaggtgaggtggctcatgcctgtaatcccagcactttgggaggccgaggcgggcggatgacgatgtgaagagatcgagaccatcctggccaacatgttgaaaccccgtctctactaacagtacaaaaattagctgggtgtggtggcaggtgcctgtggttccagctactcgggaggctgaggcagaggaatcgcttgagcctgggaggcggaggttgcagtgagccaaaatggcgctactgcactccagaccggggacagagtgagactctgtctccaaaacaaaac

SEQ ID NO: 571 - DNA, 3081 bp, Homo sapiens
atcataagaaactacctcgctattttctgccaccttaaaagttagtgtcttgcgtaagagtttttatttttccattttaggaaatgctaaactttttcctcacatagaaatggtcatttcattttaattatgctggatttctgccagggaaaagtaaaactaacctgggaatttgcatgtgccatgcaaaaagaattgattccatgggttagactggttagaacgatatgtgaaaatagactgaggggaaaaacagcaatgtttagcaagagtgtttggttacatgtggagaggtggaatggtgaacctctccaagcagaggtggcctttgggatgagccacagcttaaaaaccgtgagatctcaaacacatctctgtgtcaccctgagtttccattttttcaactctaaattgagcatctttcccctgctaggataatgtaagaatcagagacaacttctggaaagcatctagttggacacttggcacctaagcaggcacttaaaagagaagctgttaggttctggccaggtttgaaggcaggaacatgggccatgttttagataacaaatggaaagactttactatgaatttctacatagaactaaccccaaacatgctgtagaagtttaggatttagtcaacaggcattactgtactgggggtgccattaaagggctctccagcctctgcccaaggtagtggaaaccctgtcttctctcctctatcagggttggtgtttgccttgactgctgagtttattggatcctacttcctgtcccaccctgacggagcatgaactgtgaatgtttagattctgtcttcctctgagggagaccagaagggctcctaattttggtaaaacagtaaatttagtcattatagccatgtgcctggcatcatttaagaacctccttgtcagcaccccttaatttttccaatttgttagcctggaaaacacccctattagtatcaaacttaagtcttaatgaggggaaataagaatttacccctatcgttcccaaaatgaagacagagatctgtatctttttaaacataatgggaggtatctgtgttattgtttaaaatcaattatcctttattccatgctttttttttctattgtttattttatctgtcctgctttcccagaggggcagaattaaggcccctatttggtttttattattgtaatcagttaatagctgttctataatgccttacttattgtgttaattttctgtagttatatccagaggccgcttactggaagatcacattaaaaaaaaaaaaaatagaagatctaactccttctttaatgggtccagtttccatctatagtttcagctgaaattatcgaacacgattgaattacaagatcattgaaaaaatatataaactgtagctactattttaagtatatctgtggcgagtgcaaacattacattagtatgaggacagtccaaacattcgtcatagtatctctgttgaccacagcttatgataccacttcctcggatctgccccgagtctgtcagaggtatgagtgtgtgctattgccgggcacactgccaatcattgtagttccatcgcataggtgcctaaactctgggtcccaaggaccatcgtcctattgctgttggagattttaatgtgaatgtcttatgtagatgttggcatttaaagaactaattctcaagttagaatggagcttcaaagcagaccaaagggagaaacaaacttacctgaaagatgacaaagggcattagtataataaatgtgacagaatgggccccatgatagatgcattctgaattagatgaatgtactcaagtgacaagagcttcactggggggtcagcactgtgggttctaggcctacctctaacatgaactcactcttaagacctctgggggcctcagtgttctcttttgtaaaatgaggaggtgttgagatgaaagttctgtttcctctccacattcacactctgtgtgatgttcagccaggagtgattctgttaagcagttcagcgaggaagagccattagcaggtcaggattggatcagaattaaaatgcttctggttcattgtagagtctctgaagatgggcatggcacttggcataaaacaagggcccattcgcccctttgtaataagttagtgttgattgtgaagcctaattaaaactccagtttgagaactgttattcctatgatggctgagagaggaggtggagagagggctagaccacgaagtcacaggaaatggctgcatgaccctgggcaagtcacttcatttctcccagtcttttctcctttacttgtcacataaagagtttggaggagaattgtcaaagtagcttcttcttctttttttttttgaggtggagtctcactctgtcacccaggctggagtgcagtggtgccatctcggctcactgcaacccctgcctcccgggttcaagtctcagcctcccgagtagctgggattacagggacctgccaccacaaccagctaatttttgtatttttagtagagacggggtttcaccatcttggccaggctggtcttgaactcctgacctcatgatccacccaccttggcctcctaaggtgctgggattacaagcgtgagccattgcgctcagccccaaagtagcttctaattaagaaagtcaatgaccttatgagaatggtcaaccctgtaaagcaaataaaaaggttccgatgctttacaatatccagtgtccagagcaggtagagtacattatctgcgatttaatgcttgctgggaagaactttgcggggatgggctgagaagaagaggaaggaaaggggaactgtaccctcaagtttgactgggactttcatgcaacgaaggaaatgaggtctcctgcaattgcctcttattaaggtagagaatgtatcaaatgctgtgtttaaatcaattcaatgccgagttcttagcacagtgcaccacctgttttggctgtttccatatcctggccatagtggtgatgtgtgagagcttttcctttgggcaatgccatcagagaaggaaatgaatagcaacaacatattg

SEQ ID NO: 572 - DNA, 602 bp, Homo sapiens
actcacggattttcactcggcggtagtccaggcgcgcagcggcggcttgcagggcgtcgaggcggcggtgcagcgcggcggtgcggtggcccagcgcggccgcctggccctcgagctcgccgaagatgtccccggcgcagcgcgacagggtctcctatggacagaagtgcgggcaaggagctttgttcctccccgatgtcaccctcccacagcccacttgctagcaggcgagagaggggtggaggccggcagtaaggcatgtactgaactggacctctggtggaatggcgtcacccacgctgggcttggttccacatatggtatctgagactcacacagtgtggttggaagatagcaccgtgacctcccaggcacagccctctgccagccctccactggctgccctaggatgctggccttcctccgatgggagtcgggcccagtctgctgtgagccaggagaagccagcaagctccctgcgaggcctggaggagcccttctcactcagcttggtgttcgatgccagtgcccccgcccattgtggggtgagggtgggactctcagcacagccctgtccaaataaatcctctaaagccctcttc

SEQ ID NO: 573 - DNA, 4012 bp, Homo sapiens
gtgcgatgcgcgtcacggcgacgtgcggtcgtgggggcggggagacgcggcggcggctacaccgggcttggccccctccctcctccgttcccccctcctcccccctcccctcagcggtggctcccaagaagtccgagacacgcggtgaggcggcgacgggctccgggatcaactcactatcctgaaggtccattctcccaagaagaggggacagaaagacagatctatttgtaagaaaggcttgggtatcccatgaacgagccaacagaaaaccgattggggtgcagcaggactccagagccagatataaggctcagaaaagggcaccaactggatggtacacgaagaggtgataatgacagccaccaaggagatttggagcccattttagaggcatctgttctatcttcccatcataaaaaaagctctgaggaacatgaatacagtgatgaagctcctcaggaagatgagggctttatgggcatgtcccctctcttacaagcccatcatgctatggaaaaaatggaagaatttgtttgtaaggtatgggaaggtcggtggcgagtgatccctcatgatgtactaccagactggctcaaggataatgacttcctcttgcatggacaccggcctcctatgccttctttccgggcctgttttaagagcattttcagaatacacacagaaacaggcaacatttggacacatctcttaggttgtgtattcttcctgtgcctggggatcttttatatgtttcgcccaaatatctcctttgtggcccctctgcaagagaaggtggtctttggattatttttcttaggagccattctctgcctttctttttcatggctcttccacacagtctactgccactcagagggggtctctcggctcttctctaaactggattactctggtattgctcttctgattatgggaagttttgttccttggctttattattctttctactgtaatccacaaccttgcttcatctacttgattgtcatctgtgtgctgggcattgcagccattatagtctcccagtgggacatgtttgccacccctcagtatcggggagtaagagcaggagtgtttttgggcctaggcctgagtggaatcattcctaccttgcactatgtcatctcggaggggttccttaaggccgccaccatagggcagataggctggttgatgctgatggccagcctctacatcacaggagctgccctgtatgctgcccggatccccgaacgctttttccctggcaaatgtgacatctggtttcactctcatcagctgtttcatatctttgtggttgctggagcttttgttcacttccatggtgtctcaaacctccaggagtttcgtttcatgatcggcgggggctgcagtgaagaggatgcactgtgatacctaccagtctccagggactatgaccctaaaccagggcctgcggcacttgcgggcctccctgctggctactgatgccagtaccagaggagccccaaaactttgacagcctcgtgggctttgtgacggcccaggggctctgcgtggtacatgactgagaagagaaaaacaaaaataaatcatacctcaaaggatggagtgcatcaattgggagaaaaggagacatagcccaaaccctggcttattcttgggatctactgattgcgggctctgcaagacccttggcaaactggcttctgatccatatcatatttatttgtagaagatggcgaaacagtttagctggtggttctttcttctccctttctctctctctatgacaataatacaaaccaatttaagtgaacatttatatccgataaggggtgggagtgtgattttaaatgctcttttgggagaacaaagaaattaatgtaaataagatttctaactgtttaaataagactttatataaatgtttaaaacataggggtaagggagggagggagaatttttgtatagaatgaaacatgcaagtaccacacactgtttgaattttgcacaaaaagtgactgtaggatcaggtgatagccccggaatgtacagtgtcttggtgcaccaagatgccttctaaaggctgacataccttggaccctaatggggcagagagtatagccctagcccagtggtgacatgaccactccctttgggaggcctgaggtagaggggagtggtatgtgttttctcagtggaagcagcacatgagtgggtgacaggatgttagataaaggctctagttagggtgtcattgtcatttgagagactgacacactcctagcagctggtaaaggggtgctggaggccatggaggagctctagaaacattagcatgggctgatctgattacttcctggcatcccgctcacttttatgggaagtcttattagagggatgggacagttttccatatccttgctgtggagctctggaacactctctaaatttccctctattaaaaatcactgccctaactacacttcctccttgagggaatagaagtggacctttctctgacatagttcttggcatgggagccagccacaaatgagattctgacgtgtccaggtttctcctgagctcatctacatagattggtagacccttcctttggattaggaaagatgagttttacctctggtacactgtcttggtaagcctggatgtgacagacacctcggctctccttgaataagaaagccagcagaactcttaaagccagttgtagtacggagttgtcagcactcactgaacctcactttacagggataagagtggtgtggcattttaaatacaatggtatgttattgccagggagtgaggtacaagacgatggctcatgtcacaggcctacctgatacggtgtcagagaaagtggtggggaaaggatctggttcatggaattctgatcttggcccataggtgaaccaccaaaatagtgctcgagtcttaggttactgtcatcaaagacttgggatgactccattatatcctggggttgtgggtattagaactaaatatggaggtcctgagcatggggactggcgtcctcagtaggtgtttgggaatatgggaagggtctcctatttattcaatagagttttctcagttattttcctcctttgcccttgcaatctccagcaaaaggtgggatctaggaagaaagaatccagtgtagaagttgagaagaacttgaacgttttggttctggataaggtcactgtcctaggtgctaggtggaccgagcaaaagactcagtggatgaactggtgcagtgcctgacagaataaagaacagtattaatccctttgagaaagcatagtccagcaggacagtggccatttggacagaagcccacttagtttcttgggagcaacagcacgtatcagaagccagacttgctcttcggtcatgcactttgggatacagcgtataggtgcagccctgtcacaacaccaacagaagtagcagcctctgggtgcagtcacccacaccccaaagctggaaggatctggttcaacatagcacaaacccttaggaaaaatgaaattaacatcactgatgtgtaatccagtaaaatctccctttttcgggtgtgtatgtgggcatgtgcccatttctatgtgtgtgtctacgtgcagctcactaccaacagcctcatgtgcacttgacctgacagtgctcgctgagaactctcaccaggttggcgcctgaatgccttactctcagcagtcagaggcttgcttgctctgtgcagatttttaattttcttttttggccctaggctggttgggacctctacagcttcattctttcaccattaaatagtggcctttttcagtattttccctcttcccctttataaattatgctaaagccacaaagcacatttttggggatcatagaaggttggggttccagaaaggcatctgtgtgatggttccattgatgtgggatttccctacttgctgtattctcagtttctaataaaaagaaccaaatg

SEQ ID NO: 574 - DNA, 2298 bp, Homo sapiens
ctaaagtgttgggattacaggtgtgagccaacgcgcctggccagctaattgtctctgagcatttctgagtgtacccatgggtccagctatgtctcctccctgtgtctgggtgtctccaaggatctggctatacctctttgagtctctaggctgtatctgagagtgtggcttatgcctgtggttccagcactttggagggccgaggcggaggatcgcttgaactcaggagtttgagaccggcctgattagcacgatgaaaccccgtctctgccgaaatgcaagagttggcccagtgtggtggcatgccagctactctgcctgtggtcccagctactcgggaggctggggtgggaggatcgcttgagcctgggagtcgcagtgagctgagattgcgccactgcactccagcctgggtgacagagcgagaccctgtctcagaaaaaaaagaaaaaagacagcatggctgggcctcttccttcccgcatctgtctcagacgatctgtctggatgtcccctgcgggtgtccctgtgtctcctctgcgagtgtctggatctgtccatatttgtctgggtatgtttgagagtcgctgtgtcttccctgagtaggtctgggtgtgcctgatggcctaactgtgtctttttctgaggctttctggtgtatccaaagttctgaccgtgtctcctgctgtgcatcccagggcatctgagggcgtgactgggtctccccagagtctgggcctccctcctagggcatgtggttaaatccttgcctctgcagcctcttccctcctgcaaagagcatggtccccccacctgcatagtttgaggagtcctccggggtcaacttccccatctgacccccccatggccctgtccccagactgtgaagcacccctgaagaaggagggtggcctcccggaagggccggtcctcgaggctctactgtgtgcagagacgggggagaagaagattgagctgaaggaggaggagatcattatggactgtcagaaacagcagttgctggagtttccgcatgacctcgaggtggaagacttggaggatgacattcccaggaggaagaacagggccaaaggaaaggcatatggcatcgggggtctccggaaacgccaggacaccgcttccctggaggaccgagacaagccgtatgtctgtgatagtgagtccttctgaagagggggaaaggcagagagaggggggcccagagactccccacctcgtggccctctccctcccgttccagacccgggttgggaggctgctcaggtctctggctgaggggggaggtgtgatcctggaggccagggtggaggcggcaggggcccggaggggctgacaggccctcctggctcgctcgctccccagtctgtgggaaacggtataagaaccggccggggctcagctaccactacacccacacccacctggccgaggaggagggggaggagaacgccgaacgccacgccctgcccttccaccggaaaaacaaccataaacagttttacaaagaattggcctgggtccctgaggcacaaaggaaacacacagccaagaaggcgcccgacggcactgtcatccccaacggctactgtgacttctgcctggggggctccaagaagacggggtgtcccgaggacctcatctcctgtgcggactgtgggcgatcaggacacccctcgtgtttacaattcacggtgaacatgacggcagccgtgcggacctaccgctggcagtgcatcgagtgcaaatcctgcagcctgtgcggaacctccgagaacgacgaccagctgctgttttgtgatgactgcgatcggggttaccacatgtactgcttgagtccccccatggcggagcccccggaagggagctggagctgtcacctctgtctccggcacctgaaggaaaaggcttctgcttacatcaccctcacctaggccggctcggctcgccgcgactctggggtggtgctcgcctacctgcctctccgagctcctcaattctcccccaccctgaacatcccgcagggggagggggagagggggaagccgagagggggctgggccaccccctcccctctgtgcaagtggaatgtctgccctgtgggtgggtgggcccggccagggcctctccctccctccctccctctctgtcccttggcaaatggacaccaggggcttctcccctcaaagccataccccgcctctgggcgggcatggggggtggtgggtgccagccaggggcatggacagagcctttttctaaagaaaaagacaaaaagtt

SEQ ID NO: 575 - DNA, 2555 bp, Homo sapiens
gtgtattcccttgccctgggcctgccccttctcctgcctgggaaagaggtatgactcccacaggagcaaagaatcctgggggcttccagttccctccaccatctctaccatgctgacccatttggggctcagcactgagacagaggcaagaccagcagctccaacatgtagtgtaggctggcacagagcaaatgcccccgcagcctactccccttgcccatggctcatgtcagtaatcaacctacgtacctttcccactgaaccaggacagggcctccaggcctcagcacagaactgcagacagccaccaccaggcattgtcaataagacctcagttccccctcctgccccactgcagagcaatccattccatccaaagcagggtgactggcagtctccggccaggcatggggcaagggtggggactgccagtgtttgcttgtgtctaggagttatgaacaagctggccaccaaaatcggcgtcaccctgggtgcccaccagcgctgtcctgtgtcttgggtctgtgagtcaaagaaaaggtccctggcccagggagtgacaggcagtaattaggctgagttgggtggggaggtttgtctcggcctccactgttcccggaaaccgctgttctccttggaacagccactgggagttggagtgtttatttgatttctgacttgctaagcctgtaatttacctgctggaacagacagagtccagctgcccaaaccgtgtcattaaaagcagatcctgggcccgccccatccacaggcacagcctggcagagtggttccacctccccatgggcccaaggatgcgcctctctggagttcacgtgctgcacccccagggaggggcctggggagagctggtccagcagcaggggtggaggctggggccacactgcgggacagcagcccctccacctggaccagggagggcctccatgtgcaagcgcagaggaagagaccctctcatgtacataaagggtgggcccaggctgtctggaagatggtgagttccccactagtctaaggcttcaagctcagctagcagagattggaagaggcaatggcctgagtgttaggagacaggtattccggttccaactcagccactgacttggtgtcaggacaagtcccctttcttattcacgcttcagtttctcatctgcaacatgaggacataggactctttaattccaaaggctcttccaacccagagaacccatctgcccccatgaccttctcccagagcttgagacatggcctgagccccctgctgccataggacttggggcctatctgccattgcaggacctgatttaacagctctcttcttccaatactgggcagtagagtttcggaaactgacaaatgtgtggtctcttcagtgcccagtgtgtaacctggcatggtttgggtgtgctaggagtttgtgaaatgaatgttttcaagacgcaaacgctgctatgcccatcaggtgtgcacagcaggcctgaggatcatgatgagactccctttttatgcagcaaggcacaaagtgtgacagtcgtggccttcctggtggccagacttctagcaactttagccacccaccaaatgacatcacatacagaaggcctcagaaagggaggaggtcgtaaggacacacagctgatgaagggtcagtgctcagctatcaaggtcatcttctggcctggttgcctcccacagcccaggatgcattcaaggctgcacatcaggagcataaataagggtggtcagctcaggcccactggctgcaacaagtagccactgacagggagtctggggccatttggtgcagaacaacccccaacccagtggccatcttcacaactgcagcacagtgctggccctaatgccaggtgagcgtgcaaagtcctgtttctttgtctttacatagggaccgggcgatgcgctttagagaaattccctattatttcacaggaaaggaggctgtgaaaaggagagggcaggttttggagccaagtcgacctggcatcaggtcctggctgcctttttttttttttttttaaagacatacatggtcttgctttgtcgcccaggctggagtgcagtggcagtgtcatggctcactgcagcctcaacctgctgggctcaagcaatcctcccacctgtgccctcatgggcagctgaagggggagctttctaccccaggttcctttccttactgaaaagtcttgagcaaacagttgccgctctccaccccctgctttttaaaaaaaattttttctcacgtaagaaaatgttatctgtgtgctggggaaaattttgaaaataacaaaaaccagaatacaaacacccataatcaatcacagagataaccactgttcataattccttccagtcttcttacttggcacatatacatttgtctttctttatatatgacatatggatattttacaaagttaggatcctactctatgcactgcttggtgatcggatctattcaatgtacaaaatattttgaaagtttctgtgattaaatgttctttgaaaacataaat

SEQ ID NO: 576 - DNA, 2654 bp, Homo sapiens
tttcccttaatggtgctgtctgcctgccaggagacatatgagaacacaagccaccaggtgcacaccctgcggaggctcgttaaagagaaggaggaggcctttcagcgtcgatgtcatttggagccaaatgtccggggcctggagtctgtggacagtgaggccctggccagagtaggccctgcagagctgagtgagggcatgccaccctccgacctggaccttctggctccagccccaccccctgaggaggtcctgcctcttcctccaccaccagctccgcccttgccccctccacctcccccattaccagacaagtgtcccccagccccacctctccctggtgctgcaccctctgtggtgttgacagtgggcctgtcagccattcgaattaagaaacctatcaagaccaagttccggctgcctgtcttcaactggacagcactgaaacccaaccagatcagtggcactgtcttcagcgaacttgatgatgagaagatcttggaggacctggatcttgataagtttgaagaattattcaagacaaaagcgcagggccctgcccttgacctcatctgctccaaaaacaagacagcgcaaaaagctgccagcaaggtgactctgttggaagccaatcgtgccaagaacctggccatcaccctacgcaaggctggccgctcggctgaggagatctgcagggccattcatacgtttgacttgcagacactacctgtggacttcgtggagtgcctgatgcgcttcctgcccacagaggctgaggtgaagctgctgcggcaatatgagcgggagcggcagcccctggaggagttggcagctgaggaccgcttcatgctgctcttcagcaaggtggaacggttgacccagcgaatggctggcatggccttcctggggaacttccaggataacctgcagatgctcacaccgcaactcaatgccatcattgcggcgtccgcttccgtcaagtcttcacagaagctgaagcagatgttggagatcatacttgcactggggaactacatgaacagcagcaagcggggagctgtgtatggcttcaagctccagagcctggatctgctgctggataccaagtccactgaccggaagatgacactgcttcatttcatcgccttgacagtgaaggagaaatacccagacctggctaacttctggcatgagctgcactttgttgagaaggctgcagcagtgtccctggagaacgtgctgctggacgtgaaggagctgggccggggcatggagctgattcggcgtgagtgcagcatccatgacaacagcgtcctccggaacttcctcagtaccaatgaaggcaaactagacaagctccagcgggacgccaagacggctgaggaggcctacaatgcagttgtgcgctactttggcgagagtcccaagactacacctccttctgtattcttcccagtatttgtccgattcattcgttcttacaaggaagcagaacaagagaatgaagcccgcaagaagcaggaggaggtaatgcgggagaagcagctggctcaggaagccaagaaactggatgccaagaccccatcccagcggaacaagtggcaacagcaggagttaatagcagagttgaggcggcgccaggccaaggaacaccggcctgtttatgaggggaaggatggtaccatcgaggacatcatcacaggcctccactgccagcctatggttgttcgccaccaagccaggagtgctgcaccgcccagtggtccccctcgggctccaggcccccactgagaccctctcggaggcagaagcacttcacccctcagagtcctacaagtccaaccagtggacctggaattggccaagggctcaggagagggctgtgttgctctctcaaccatgtccgccccagctcttgaggctggatctttctacttgtgccactatgggcactaggtctgtaggtccctggtgcttccagtactgcactttgcccccaaggtctttgacttcatttcctgaagggtcaccaagggtcagctcagggctaggaaaaaccatttccagccttagcctaaacagggcacatagatctctcccactagagcccagagggatgagaggagagagcaactgttctttctttttttttcccttcctttttgcaggcccatggtcagctctggtctagatgtatctaggcttagggagccctgggaccctgccagtctcagttcatctcttaccaggagcaaggccctctgaagcatgggccgtgccagctgtgccctagtgataagggtaagaggagagatgtcaggctcactgcccttatttctctgcccatttcattctaggctcacactgtccttgtcaaggtgggcagaagagcagaggtcttctctgcaccaaccactctctgcagatggctggagaaagggtgtgccaactcttcaccttctttcctcagctacggttttttttttttttttttttttttttggcaggggacaaggagcatggtggtcttggctatttgcttacctccccgtttctcctctgcccctggaagggaatgtgggggcccacttttttgtacatgtaccacctccctttcctcttactgtacataaacctcagactctccccctctc

SEQ ID NO: 577 - DNA, 2915 bp, Homo sapiens
tagacagtcagctcacttaaaaagacatgaacagactcataatgaaaagagtccttatgcatctctttgccaagtagaatttggaaacttcaacaatctttctaatcattcaggtaataatgttaactataatgcttcccaacaatgtcaggctcctggtgttcaaaaatacgaggtctcagagtcagatcaaatgtcaggagttaaggcagagtcacaggattttattcctggtagcaccgggcaaccctgtcttcctaatgtacttttggaatcagagcaaagcaatcctttttgcagttattcagagcatcaggagaaaaatgatgtcttcctgtaccgatgcagtgtttgtgctaaaagtttccgatctccatctaaactggaaagacactacctaattcatgcagggcagaaaccatttgaatgctcagtttgtggcaaaacattcagacaggctcctcactggaagagacatcagcttactcactttaaagaacgaccacaagggaaagtggttgccttagattcggttatgtaaattgtcgcaaccactaacaattgtggtctctggtgatcttatttttaaagcctgtattatttaaaatgcatttttattgaaaggcctgcattaaactgaatggtttcacaggcatttgcttgtcctgcatagtaaggaggtagaatacatagaaaattaatacaatgttttagaaacagccaagttaattttagaggcaagaacatgatttgatgctataaagtaggcattttaatattgtaaacatatactttggctgtattgaaaaatataaatccatgatggctgtacaaataatttagcctcattcattttttaaaggaattattccttaagacatgccatctctttttagatatactcaaaagactgagaggcaaaacttggcttttagctgcagcacatagccctgttatatttgatttattttacatttcatatgaaagcataattttgtccacatgtgactcaaattgcattggtaattttttttttttttttgtaagttaaaaaaactacagagacactaaaggtgaaaatggatgagacaattatagtattattttcattggtctttttttttgagatggagtctcactctttcgccaggctagagtgcagtggcgccatctaggctcactgcaacctccgcatcccagattccagcgattctcctgcctcagcctcctgagtagctgggattacaggtgcctgccatcacgcctggctaatttttgtatttttagtagagacgggggttcaccaagttggccaggatggtctcgatctcttgaccttgtgactcacccgcatcggcctcccaaagtgctgggattacaggcatgagccaccgcacccgacggtcttttcaaagctatttatttttaggactatgtggtaatttcaccttcaggtgataaggattttttttttctcccagctagtgctatctttctcaaaataatttaaaagtaggcgagaggctaggatgtacctatatttaccatgtttacttaccaggaatattttctaagtgccatagtctttttcataatacgtatgagttttaccttttcagaggaataatttcaagtcatttatttgctcattaatgatagcagtagtcatagacttaagactattctagagatcttcatctccataagacttttacatttattttagtaaacttttctttctatgcctctttaatggagtggttctgttatttaagcctgttctaagtttgatcaaatggcaatgactaggtctagttttagtttttatttttgcaggagtctattgctaaagaattttattttgatccttgttaaatttttattttaattaataaggtagtcattcctgtagagggataagatgcttgtagagttgtgggtatcattccaaatagaactgttatgatttgggaaatattctttactacaaaggacttatttcataattacaaattttccttcatatttgcctttgtttataaaatcttcaggaatgacattctctagcaataaaaggaatgaaccgttatgtttctaagctgaaaagaggaacaggtgggtaattatcctgccatacttaaatatagtggaaaatcctctattgagaatgtggataaatgaacaattgtaagttttgcatcataaactgagaactttcttttgacaggggggaggcgggagggatagtaggtgggggtgatctgcttgcttcttttaccacaggtgatttttaagtaacttgggtttaatttacagagatgaaacatgacagtctgagtaaaatacccagtgatgtagaagtgtgcctgtttattatgtagatacagacatccagcaaaaacaggagaatcacatgctttaaagaacactttctcttaggtttccttgagatatgttcctccagtgcaagcaagataatggtttacagaatttgctttacacaaaacttgtcaagaactcatctgttaaaagcaaggaataactagtttatattttccaataatgttcaaggttttctccttaatatgtttgaaattattgattttggcatttttctaagcaatttatgtaattttatttgaagaaaatgttttgtataatgtttttcccagcctaaacagggagagtcctaacagtgttgtgcttgtatgattctgagactttatttgcgtaagtgatactactatactttatttttgacccatgcctttttaagctgtttcatattgaaaggtggaatattgtaaaaattttgtcaaagatgtactgtagtgctatttgaagtacctgtaacaaaacagttggccctctgtatccatgtactctgcatctgtggattaaaccaattgcagatc

SEQ ID NO: 578 - DNA, 2613 bp, Homo sapiens
agtgacggcgcgaatggcggactctcagctgttctgtgtggcggaggaacgcagcggccactgcgccgtggtggacggaaacttcctctacgtgtgggggggctacgtgtctattgaagacaatgaagtatatttgcctaatgatgaaatttggacctatgatattgatagtgggttgtggagaatgcacctcatggaaggagaactcccagcctccatgtcaggaagctgtggtgcttgcattaatggaaagctgtacatttttggaggatatgatgacaaaggatacagcaatcgactttattttgttaatttacgaacaagagatgaaacctacatttgggagaaaatcaccgactttgaagggcaaccacctacaccacgtgataaactttcctgctgggtatataaagacagactaatatattttggtggttatgggtgtaggagacacagtgaactccaagactgttttgatgttcatgatgcatcttgggaagagcagatattctggggatggcataatgatgtccacatatttgacacaaagacacagacttggtttcaaccagaaattaaaggtggagttccaccacagccacgagccgcgcatacgtgtgcagttcttggaaataagggttatatctttggcggacgtgttctgcaaactaggatgaatgatttgcactatctaaacctagacacctggacttggtctggaaggattactattaatggagaaagcccaaaacatcggtcatggcatactttaacacctatagctgatgataaacttttcctatgtggtggactaagtgcagataatatcccattaagtgatggttggattcataatgtcacaacaaattgttggaaacaacttacacatttacctaaaacaagacctaggttatggcacacagcctgtttgggaaaagaaaatgaaataatggtatttggtgggagcaaagatgacttacttgccttggatacaggtcactgtaatgatttattgatctttcaaacacagccttattcactactcaggtcatgccttgactgcattggtaaaaattctatcatgttagaaagtcagatatctttattacctcctaaacttctgcaacaagtactcaaaaaaataacattttgggctgcagctaatcaccgagaagaacaaagagtccaaaaagaagaaacagaaaataaatatcagtggatcagtagcaattaaattgttatatactttacatatttagtatgttttaactttttaatcagactatacatttacactcccaaattgcaggctttatttaaaggataaaatttaaaggataaaaaaacagtcactctgttaagtgactatatgccatgggatatatggaaaaaagatattaatgcagattaatttatatttgtaaacaaatttccttacaaactgcagaacaaatattctttctgaaagtaagtacagttataacagattttaaatcaatgtgtattctttactggaaagattacatacatttgagaataagaaattactctcaagaacttcagaaatctgcaacataattttataaatatataaatacatgtatgtatgtcaaaacactacatatacactttcagaaagaataaactttctcaagtcattttaaagttacctaacgttcttcttgaataactaatacagtgggtcaaatattataaaataggcaaacaccaaaatggtattaaatattgaactcctgaccttttcgacacttacctagtaaagtattcttaggcatcatcataacttttcctcacctttattcgaatagaggaataaatgtcttcagttgtctctccattacccctaagttattagtttgtctagtttatatataaagaccatgttttaaagtacataaagtggaggtttatttatcatacaggctttgaaacattaagaagcagtatttttattaactttttgagacatattaaaatacattttgccttagaagactgcttctaaagtaatttttgtaagtaatgagatgggatggtaatctagtaatttgactttatagaaatccctcagtttggcccccaccattctacagagttgtactcaagacagatactgaaaaaatctaataccttcccttgtattttcagcattaccatctatacagaaatggaacactgtatctttatattcctaaaaatggtacttttggcataattaagaaatttttcttcatattatcacaatcatgcccttccattgaattattaattacaattaattactaaaaagcttggtatgtaaaattattctccacaatattaccatgcaagttatctctgaaatttaaaatgttaaagaaaaacatttctatattgaaatatatataatttataatgaaaattatagtagtttgtagtatttcattgaattttagagagatatttcatatatatgtactgtattttggatgtgtaaagcttctatgtattgaaatatttttttacgttttatttattgtacaaagtgtatataattactgttttcttttttgtcagtgtaaagcagtcattagaattgattatacaaaaaat

SEQ ID NO: 579 - DNA, 2588 bp, Homo sapiens
agactcctcgcagccagcgatggaggcgagaccccctagtaacagaggcggtggctactgctgcggccactgggtttcggcctcttcccagcagcggctctaagaagcgcagcggaactcgaccggatccaacccagttagttacttcctgtctagagttgtagcttccacctgcaccttctagccaccatggcaacctcatctgaagaagttttgctgattgtaaagaaagtgcgtcaaaagaagcaggatggagctctgtacctcatggcagaaagaattgcttgggcacctgaaggcaaagatagatttacaatcagccatatgtatgcagatattaaataatgctgcaagaagatcctgttttgtttcagctttataaagaccttgttgtgagtcaagtgatcagtgctgaggaattctgggccaatcgtttaaatgtgaatgcaacagatagttcttccacatccaatcataagcaggatgttggcatttctgctgcatttctggctgatgtccggccccaaactgatggctgtaacggtctaagatataatttaacttctgatatcattgagtccatatttaggacctatccagcagtaaaaatgaaatatgcagaaaatgttccccacaacatgacagagaaggaattctggacacgttttttccagtcccattattttcacagggatcggctgaatacagggtcaaaggatctctttgcagaatgtgccaaaatagatgaaaaaggcctaaaaacaatggtttcattaggagtgaaaaacccactactagatttaacagctttggaagataaaccattagatgagggctatggcatttcctctgtgccatctgcttccaattctaaatccataaaagagaatagtaatgctgccatcatcaagagatttaaccatcacagtgccatggtcctggcagctggactcagaaaacaagaagcacaaaatgaacaaactagtgagcccagcaacatggatggaaattccggagatgcagactgctttcagccagcagtcaaaagggcgaaattacaagagtccattgaatatgaagacttggggaaaaataattctgtaaaaacgattgcactaaacctcaagaagtcagataggtattatcatggtccaactccaatccagtcactacagtatgcaacaagtcaggacattattaattcttttcaaagtattagacaagaaatggaagcttatacacccaagttaactcaggttctctcaagtagtgctgccagtagtaccatcacagcactgtcacctggaggggcacttatgcagggaggaacacagcaagccataaaccagatggtgccaaatgatattcaatctgaattgaaacacttatatgtagctgttggagaacttctacgacatttctggtcctgctttcctgttaatacgccattcctagaagaaaaggtagtgaaaatgaaaagtaatttggaacgattccaagttacgaagctctgtccattccaagaaaagattcggagacagtatttaagcacaaatttggtaagtcacatagaagagatgctccagacagcctacaacaagctccacacatggcagtcacggcgtctgatgaagaaaacgtgaggtggccatgatgcttacaggttttgtgagattgagagaactatgacctgcagcaactctggaaacctggcctgacagacaagcagatgacctcacaggagtgataagaaacatctgctccacgccaactcccagagctgatgctattgtacttgcacattggagactgaaaggaaagaagggactaaatgctggggaggtaaattaagacagaaccaaatgagctaagttgcaaatatatatatatacacacacacacatatatgtacatgtgtatgtacatatatattttaaaagactgtttactgcagttgctcaggaactgcttttgattcacattaagctgctttcagaaattaaaaaaacactttttaaagggtgcattgataaaatctgaggttttttggttgtcgtttttttctgtgtacattttttttcctaagtttatggcacagggtagaccttaagtattcctcctccatccttcattcttcaccctccatcggatcctcaagttttaatgaattccaattataccttacatcagcaagttaaaaaaagtactttaaaataaagcaaagggagactgttgctcaaccatcaggaaacagttgtcagaagacatcattggttctgtgtttcctacggaaataagaaacgataaatattgcactgaatgtttgtggtttggagtccctgaataataaagagggaatatatttgcagaaagtcgcatagggttttttaatgcagaattttgtcagaagacaatggcgctgcatgtttttctttgagtgcaaatgtacattgctaagatttttttaagatggcatgtgctttgaaaagaagatattgcatttttaagagtttaaaaatcttatgagtgagaaatattaaaaaaatcttattttcacctctttagaaggaataaaagatgtttctcct

SEQ ID NO: 580 - DNA, 2801 bp, Homo sapiens
cttaatgccaaactcacattccccaagccctcaaatgcaggcatggagggaaaattacgggcattctcagagcccctggtaagaatcgatcccagggctggtacgctgagccacgagaatgcactgttcctgtatcatgcagccaggccaggaagctctgttcttccagttcggggagaccccaggggaattcagcgatacttccgagcactgagcatcagtcttttattaccaacaaggggaaggtctgtagcttcctgagctcacaggccagctataaaatcagcgtgaggcagccaggaagcacccagaactcttctgccacagttgtagaattgtaggacccagtgggcaccacctttgtctcctgggcaagtccctttaccttccaaggcctcctttctcccaccctgctccacttttctcagcctcctgaatgaggatggaggcttaatagacatgagaggattttgttttcagttcaatgacatagagttaagtgagctgtcagggaagacgagaggcatagctgctgtgagctcctgagaccctgaaaatgctggtttgcttcgcaggtgccatctagaacttaacaggcactttcggaaaaagttggctgaggaggaacctgctggggtattagaagctgccaccagcgggttggtgattgatgttctttggggccacggtgaggcatctttttcattaaagtggggctttgtgtcctacaagtgctttgagttcagagaaaagatgaaccaaaaatgaagaaaggaagtggctcttgcttccccagcaaagagttacttgccttctgaaacacaggccttgttgccacataggaccagcccctccagagtctcactcctcaagttctgtgagacgctgcagaggacctggccatggccttgatcttatctagaccttgggaacacccctcaaccatcctcacctcacttctgcagaatggctgtctaggactttaaaaatgaatgttcacctttatcgtgccttacatcttggaaaaagatgtttcataagtttactcttctcagggtgaaataggcctttttatttgtccttcgcctgtctttttcagatttcaagggagattccttaattcttacattccaggagtcagtgagacaatctatgcttcccctccctgaccctttttgtgtttcttggtgttgatatttcacatgcttggtccttctctttgaactttttagtgcttccgggtcatcatcctgatctctctgtggcaatgccttcctccagctcccacctctaaatcatcttggcttcccactgcctggccttttctaaaagaaccccaatcttcattgcctttaaaacagccagatttgagtcaatttcatattggtggccagactgtttaaacacaaattctctagctatttacagggctcagagctgaggaggaagaaactcaagtccccaaataatgactaatcacaattcattctcaccagcaagagccatgaaattctaaggagctggaatttgggatggcttcaagtggccagtacaattgaagcgtctggcagacaggcaaagaagcctaccttctcccctccccacggtgccatcaatggaatcactttcttggcccctcacttaatatgaatcatattcacctggggcaaccaacgcctgacagagttgtagtgcagaaggcacctctttgaagtgaaaaccaggagatcttttatcacttccccagccctgcaggctcagtcacatgtcaaatagataatgaataaatgcgtcgccaatgcactctattcatttatttttgacaagtgagttggtgacagtgcccccttgcatgctaataaaatatacagcagccacacttgtaaagtctttgaaatacgaggcttcatgcgagtactccactattaaatctttgctggaaaatggggtaaccagactgctgggactcttgcaaaatgattacgttcgaagattagtgccattctcctctacacaggctatggtttcagacagcaccatggctttgataaagtggctcccagctcataggaacttgataattaatgtcctctgtgttgcatagagatcaggcatcaaaaactcggtggtgctgagacgccaacagaacaggattcttctggtatctggaccactgagggctggttgtcaaggagttatcttctcttggtcgcacctagtccacgtgagggagaggaaggcttcacattgtctttacttgggcccttgagattctaggctttagacaatctgaagctgttagacctatcagccaggctcctctctgaccaaggacaacccaaggggctccttagaccagcctcacctgtctggatcaccattctcctccagcttcaaaagtccatccttcctgcaaatctcatcaagactcgcggctcttaaagataaccctctccttcctgcagcacttctatgcttgaaggggaaggggctggcacacatcttctctgtgtggcctcctcctcctggccacacggcctttttcctggcccctttccttacactgttgacatgacaagggatctgaaaagggaataagtccaggttaaagcctcaaatggcacagatcaaaacccactctttctacaaaaatttgccgggcatggtggcgggggcctgtaatctcagctacttgggaggctgaggcaggagaatcgcttgaacctgggaagtggaggttacagtgagtcgagatcgcaccactgtactccagcttgggcaacagaacaatactccatctc

SEQ ID NO: 581 - DNA, 2365 bp, Homo sapiens
agtggcagtctgtttttcttgctcctgatgataattcattattgctgctgcgggcggagttatatttgaccatgaagaactatgagcaagctctccaagatgccagtgcagcttgtcagaatgaacctctcttgattaagggacatcaagtaaaagctcaggctctttctggattgggaagaagtaaggaagtgttaaaggaatttctctactgccttgctctgaatcctgaatgtaactctgtgaagaaagaagcacagaaggtaatgtgtgaagtgctgttttcagctacagcaaatgtgcatgaaaatttaacatcttccatccaaagcagattaaaggctcagggtcacagccacatgaatgcccaggctctgctggaagaaggtgatgcagggagctcagagaattcatctgagaaatctgatatgcttggaaataccaattcttcagttttgtattttatactgggcctacacttcgaagaggataaaaaggcgttagaaagcatccttccaacagcacccagcgctggcttaaagagacagtttccggatgacgtggaggatgcacctgacctgaacgcccctggaaaaattcccaagaaagatctctcacctcaaaggagcccaaactctgagacagaagaaagtcaggggctctcgcttgatgtaactgactttgagtgtgccctctgcatgagattgctctttgaacctgtcactacgccctgtggacacacattttgcctaaaatgccttgagcgctgccttgaccacgccccacactgtcctttgtgcaaagacaaactttcggaattattggcaagcagaaactttaacataactgttctggccgaagaattaatatttcgatatttgccggatgaattgtctgataggaagagaatttatgatgaagaaatgtcagaactgtcaaatctgaccagagacgtccccatctttgtgtgtgccatggccttccccacggtcccatgtccactccacgtttttgagccccgctatcggcttatgataagaagatgcatggaaactggcaccaagcggtttggcatgtgtttatctgctgagcacgcggggctttcagagtatggatgcatgctggagattaaggacgtgagaacgtttcctgatggaagttctgttgtagacgcgattggcatcagtcggttccgagtgctaagccaccgccacagagatggctataacacagcggacattgaatatcttgaagatgaaaaggtggagggtccagagtatgaagaacttgccgctctccacgattctgtgcatcaacagtctgtttcctggttcgcgtctctccaggatcgcatgaaagaacaaattttaagtcattttggggtaatgccagacagagaacctgagcctcagagtaatcccagcggccctgcctggtcctggtggatcctggccgtgctgcccctggagcgcaaggctcagctggccatcctcggcatgacctcgctcaaagagcggctccttgccatccgacggatattagtcatcatcacgcgtaagatgaatagtcggcaagagctggctaatgccagggagagaaataattgatttttctctctgtcaaggtttctggcagcccttgtgcttttataaatgtcaggcatggacgaatagccgtccattcattgtgcttcatcaagtgcttgtggatgaggttccaaaatgggacgcttgccaaacattgagtcctcctcaaaaatgacaattctgtgtctggtgggatctgaccttgtgtgaggttagcctgaagtctgaatggagcccatagttggaaaacaacctaagaaaatctcttagaagcaggtgcttggggaatgcagttcactgacagcacaggaccctgcagatggtttacatgtggtttgggtttcacgagaaagaaggattcacttcccagtcagtatctggctctgccagatggtaaaggcgtgctttagtgtgtagacaatatgggggaaccacgtttttatctggaagtggatttcttagaacacaggctaaccgaaactacgcttaggctttgcgtgttgctgtgaagttgtctgtgaaatcgaataatcacaccattgttcagtgcaggagcccaaactagtccttacccaagaagtagtagcctctggatagaactgtgtttaatgtcctgttgtagtcccaggtgttgtaaattgcatgttgtaatcaaacgaatgtcaaaacataagaaagtataccttggatatagaaaaacctgagaacagtatcattcacttgaggatatatatatatatatatttacacacaataaagtgagttaaaattgtatatgc

SEQ ID NO: 582 - DNA, 3411 bp, Homo sapiens
ttttcctccattccaggctgggctgtagctgctcccataaagggatcacagtttgtgttccacgcagaaggagcacagaacacttccaggcatatccttggagctcaagacaggttgctcagctaggccagagaagagagggatctgttcatttccagccctgcaggcctgttggctgttttgtgcatttatgtagcttttaagtgcagactaatagctatcatttattgcatgcccactatgtgccaggcactgtgccaggcattctatgtgagctttcttatttactcctcccaacaatcctatacattaggtatcattattgtcctcattttacctgagaatggaagtgaggcacagagatgaaccacagagtttgttctgggtccatggtcctgttgtttctatgttctgtctgctctactacactgcctttcagaggcaggtctggaagttcagagaccaagttcaaaccctggagtgttggggtatgaagtggcttgagattttgaatctttcctaccccatccctccctttgctcagcatcttcaaagccatggggcggggcctgccagacgaggagcaggagaagctgctgcgcatctgttccatttatacccagagtggagaaaacagcctggtgcaggagggctctgaggcctcccccattgggaagtctccatatacactagacagcctgtattggagcgtcaagccagccagctccagcttcgggtctgaagcaaaggcccagcaacaggaggagcagggcagtgttaatgatgtcaaggaagaggagaaggaggagaaagaggtcttgccagaccaggtagaggaggaggaagaaaatgatgaccaagaggaggaagaggaggatgaagatgatgaagatgatgaagaggaagacagaatggaggtggggcctttctctacagggcaagagtcccccactgccgagaatgctaggcttctggcccagaaaagaggagctttgcagggctctgcatggcaggttagctcagaagacgtgcgatgggacacatttcccctaggccgaatgccaggtcagaccgaggacccagcagagctcatgctggagaattatgacaccatgtatctttggaccagcctgtgctagagcagcggctggaaccctcaacatgcaagactgagtgagtgcccatggcaacaggatttctcaccccctttctctgccacctgtgggagggagagaagacaaggtgaggtgggtgggggaggtagctgtccccagtcagggcctaaatgagtgaagtgtaagccccagtccctggctgggcccttgccagctctccctgtccctagtgtggggagccagtgaagtagccacacacagctgggcttggcatccctctcagattgcattcagtttgtgcttatggatggacgtgtgtgtgtgtgtgtgtgtgtgtgtgtgtgcaggcacacacacacattttgggaggagaagggtccatagctttcagcagattctctaactggtccaccactcctaaaaagtcaaaaatagatgctctcatccagctttttcacgttactgaggagaaaactgaggcccagaaaggggaagggatttgtctaatggtgcatagagtaatcagtaggcctccccacactgtccaggcaccttggtagcaaggcctgcacggggcttcatgctctccctcaaaactcgcctctggatcacaggcgtgggagcccttgggtcaccagggagccaggaaccaagcagcccttgctgaggggctatgctagtaacacaaaggagcccatccaaagggcctgtacattccagaatgctgggccattctgaccagataatcctgtgagtactagagaggaacccctgcgggcccctgaaactaagtctttccctttgctgcctgcccactccctgggagatgaacccctcttcatctgggcattctgggaaagggctatagaatccaggggccccagaagcaggccagacccaaggcaatgccatggactctgtccaaggccatgggccagcaggcctcttggagaagagaggtggcagctggggaagccaggagatctgtagttgggagtgggattcacatgtctgagagaggtgcccttacccctccttcccaaccagcctggccctgggtaaggatggcttattgagtaccatggatagcaagggtgaagtgtgggcagctggagctgttcagtcaagaaggaagctgattcagcccagctcccacacccactgtagtagggacgtttcctttgctgtggaggggcatgcccacccctgcttcttgtctcagctccacccctgacttggctatgtggccttgggaaagtccattcccatctctgggcctcagttaacttgtctgtaagattgtgggtgatgggaggtggtggaactagattatccgtaagggttctttcagctgcagtagtgtaaccatggatctgcctgagggtagggtgatggctttgctctcagctgtcaccctcacccagctggaaggaccttgacttgcgggaagcaggggaagcaagagtgttatgagcagggccagggagaaggagggcagagccaccctccctaaagcaatcttgcaatcgtgggcctagtcttatagcccaagcctggccttgggccccttaaccaggtgttgggtgtgggagggatccaggcccccaagctctaaggccttgaaaggatgtcctgttaaggcagctactttcaatgtcttgggagtcaggttatgtggggccccctcccctacctcaacccaaacagctctgctttaatctggtttatctactagggctctgcataaaacttcatttgaaaagttcttgcctccttccctcccttcctcaactgaggagagggccaagtcaaccctggggcccacacgaagtcgtttctcggatttgctccagtctctttgtaaagccaggcaggagagtgggcccatcccacagatacacacatgtcaagcactcttggcccctccagagcctaaagctgcctccttccctgactgacctcccactctctcctcagcaccttgggcctgagctgtggtgtcggcagtggcaactgcagcaacagcagcagcagcaacttcgagggccttctctggagccaggggcagctgcgtgggctcaaaactggcctgcagctcttctgatggccatccctggtgcaagtgttcatccagccgtgccagggcaacagcccaccccctagtacaactgatgctccctgagacaacctgggagacagcctggatcagccacatcaactcagttgtccaccacaggggaattttgaatgtcttttgtttttgttttgttttgaaaaataataaacaggcaactgt

SEQ ID NO: 583 - DNA, 3713 bp, Homo sapiens
gctgctgcccgcctcccagcccttcttggatggggtggaggtttccgtctccttcacctcgccaagcttctcctgtagctcctttacttgctgctccaactgcagtgcgttcttgttctcattgttctggacagagagaagcaatcagcagccacccactgcagctggagaccccagaacttggtgtctgcctcccatggcactgggaaggctggaggcaggttagaaaaatcaccccctctctcccacagccacctggctcacaggtgcctttagaagtaacatttcatgtgagggctacactgccccattttagaggtggggaaacaaaggcccggagggctagggaggagggcaagctccccagtttgggcaacgcaccggctcctcgaagacgctctgtggcttggccagctgctgaaggctcttgtgctgctcctgaatcctctcctcctgcttccgaagcctctcttcctgctcctgaatcctctcttcttgtcgctggttcaggagacttatgcgctgattctttttgacctgggcctggagctctcctgccactctctctagttccttcctcaggtgctgcagctccacctcagagggcactgctgggggctccgggggcaagggttcagctgacaaaggaagcagataataagggcctctggattctcggaaaagaaaaaccctcctcttggcgcacagctcctctcaggctcctcaaacttggcctcactgctaatgattcctcgcacccagatggtagccagtcttccaaagcacattcagagaaagagcactgcgggtggctggcaacgggccctctttcctgatggggacactgagacactgagactcattgagatgacaagactcgccgtctcctggcacagatctctttccctctgcctcaaagcccttccatccacccacctccctggggcactctaagccaccctcacagccctctgatgccagtcctgctcccaggtcatgccagccccatcttacccatctggtttttgagtttggacaagctcctctccagcttctctacccgacgcatatcttgctgcttctctttctttaatgtgcaaatctgcccaaagcacaaggggaaagggccttggagagaggggctggaggctggacaggctgccctctccctctctgcccccacctccacaaagcccagacccatgaccacctctggctctactattcccattttacagatgcccagaaagatccagtgacctatctaatgtgggggggctgaagggtgagatctcacctcctgcgacatttttctcatcctctgctgccaccgggccctctctccttttagatgttcagcacactcatctctttctaattggacttgttgaaatgactccttcaactgcaagaatgggcacagaacttaggaagggctgtcactggtcctcacctgctcctggccacctggggtcatcttccttccacataactccctcagaaaacctcacctgtgtcagctgcactttcagtagtgcctcctcccgcatggactgctctaacttccactccgtacgtgctttgctgcggctggacaactggatggtgaagagtgagaagtttcaatctggagagcctgggcatttccacacagtgccccttaaaaggactagggctaggcccaatatacaactcagtcagtaaagatcaaggcatttccaagcccgtggtctggtttttaaaagaacacagtaaagttggaacggacagggaatgagattgaatttatagctggctaacagaggcccagagagatcagataatattgctattgttattactgttattattaccactgtttgaacctttgtggaatacttcaccaggtaccgtgctaacaatcccatttaatcctcgcaaccaccataggagacagttactatgattccctctattgtggagatgaaaaaacatggagtatttgaggttaagtgcttgcctaagttcacttaggcagagctgggatataaacacccaggtctatccaattctctaagcccgtttttcttgctggggatgggggcacagataggaaggggaaaattaatcttttgttcactttttgaaaggatgatacatttgcatagtccaaaactcagaaggtacagaagggaagtatctcccggccatcttgttgctctctcctgaattttttatgaacccttgcagacatgttttatgtatattatcacagtatgcacacacacacacacacacacacacacgcacacacgtttcctctttctacagaaatggtaacatactaaaggtactcttctgtaccttcacagtagaagtacccaataccccacctaggacttgctcaagaccacagccaggtaagggcggggcaggcatttggcctccaagctctgcgtccagtgctcactccacacagtgacccccaactcacccacagcagctgactcagccccaggctgccactaaaaaccatacaaaaaagtagcaagaaatggccatgctgccttctgggcaggacacgccatcctgcagaagggacctttaggctcactcctccatctgcaaagccaggctcccaggggatggggcaggtggttggactcacctggtttgccttcttcttctgtgtggccatgacattagagagaacactctctaactctcctttacgctgcaatgaatgttgcaggcagacagccagatccttggacttttctgtaatgagaaagttgagatggggcccaaaggactccccctgaagacctgtcaaagtgccaggttgaaggatgacagggtgcccagattcccaccttcaaagtatctgagagaacgtttcatgtggtacaggtccgtatttagtttccctttctgtatgttcaatgtctggatttgaacctttgggagaaaagccaagcaagtgctgaaagagaaggaaagaaaccttctccggaggacaggaggaaactgcacaccctccactcacctctagcacccttttggctttctgtttcttgttgtttgctttcttttcctgtaggaagaagaagacagagctcttaccagggggaggcagagatggcacagcaagagacatgcccccagaatgccaccaatgccccaggacaggcccacccatgggaccaggttatcaggggccctgtggggatggggtggaatctgaagggtgagccttcatccccaggctgggagtgggtgagacgagactggggcctgtatgtctgagtgccccccaaacccagcagtcatgttgcgaggaaacgaaatcacgttacttcttccagctgatgttccacttgtttcttctgttgtttctgtggggagagtcaaataaggtgatggagggtggccccctcaactctattccccagaccaggaagtggtaggcaggggccaggaatggattttaaaggcaaagttctcagacataatgggaacacgaaccggtaaactctcctcaagctcccaaggacagaggatttgggtctttgttggcttttgcccacagccacagaactcaaagtctgaatctggaatctcttgagaggacagcaatataaacctctagagatggagtttcagaaaggcccctccttctggcaacttgtgatttagagaagtgggttcattcaataaacatttactgagcatgt

SEQ ID NO: 584 - DNA, 3339 bp, Homo sapiens
gaataactcagttttaggtaagcctcccctatatcctagaataacctgcctcttcggctgggaagcggagggaaccttctcttccttaaagacagggtctcgcactgtcacccaggctggagtgcagtggtgcaaccccacctcccgggttcaagcaattctcatgcctcagcctcccaagtagctgggagtacagcctgtggagcccaggcctcttggagcatctttggggctgacgcagcggaggttccgggcacacgtggccactcccagcaggaggctgccatgccccacattcccgaggacgaggagccccccggagagccacaggcagcccagagccctgccggccaaagttcacagtccccacaagaggctttctcaccgacacttgaaggtgtccactgcctccctgacatctgtggaccccgcggggcacatcattgacctggtgaatgaccagctgccagacatcagcatctcagaggaggacaagaagaaaaacctggcgctgctggaagaagccaagttggtgagtgagcgattcctgacccgccgtgggaggaagtccaggagcagccccggagactccccatcagctgtttccccgaacctcagccccagcgcttctcctacatcctctcgaagcaactcacttacagtccccaccccgccaggtttggatgtgtgcagtggcccgccatcccctctgcctggagcaccaccacagcagaagggggatgaggccgacgtctcttcacctcaccctggcgagcctaacgtccccaaagggctagctgacaggaagcagaatgaccagaggaaagtgtctcagggcaggctggctcctcgtcctcctccagttgagaagtccaaagagattgcaatagaacaaaaggaaaacttcgatcccctccagtaccccgagaccacacccaaaggcctagctcctgttacaaacagcagtgggaaaatggccctgaacagccctcagcctggccccgtggagagcgagctggggaagcagctcttgaaaacgggctgggagggcagccctctgccgagaagtccaacccaggatgcggcaggagtgggtcccccagcctcccaggggagaggcccagctggagagccgatggggcccgaggctggctccaaagctgagcttccacccactgtgtcccggcccccgctgctgcgagggctttcctgggacagtggccctgaagaacctggcccccggctgcagaaagtgcttgccaagctgccactggcagaggaagaaaagcgttttgcaggcaaggccggcggcaagctggccaaggcccctggtctcaaagactttcagatacaagtgcagcccgtgcggatgcagaaactgaccaagctccgagaggagcacatcctgatgagaaatcagaacttagtggggctcaagcttccagaccttagtgaagcagctgagcaggaaaaagggcttccttctgaactctccccagctattgaggaagaagagtcaaagagtggcttagatgtcatgcctaatatttctgatgtgctgctgcgcaaactgcgggtccacaggagtctccctggaagtgcccctccactcactgaaaaggaagttgagaacgtgtttgtgcaactgtccttggcctttagaaatgacagctacactctggaatctagaattaaccaggctgaaagggaacgcaacctgacagaggagaacactgagaaagaactggaaaacttcaaagcttccattacgtcctcagcttcactctggcaccactgtgagcaccgggaaacctaccagaagttgctggaggacatcgctgtcctgcaccgcctggctgcccgcctctccagccgagctgaggtggtaggcgccgtccgccaggaaaagcgcatgtcgaaagcaacggaagtgatgatgcagtatgtggagaatctaaagaggacgtatgagaaggaccatgcggagctcatggagtttaaaaagcttgcaaatcagaattcaagccgcagctgtggcccctctgaagatggggtccctcgcacggcacggtccatgtccctcacgctgggaaagaatatgcctcgccggagggtcagcgttgctgtggttcctaagtttaatgccctgaatctgcctggccaaactcccagctcatcatccattccctccttaccagccttgtcggaatcacccaatgggaaaggcagcctacctgtcacttcagcactgcctgcacttttggaaaatggaaagacaaatggggacccagattgtgaagcctctgctcctgcgctgaccctgagctgcctggaggagcttagtcaggagaccaaggccaggatggaggaagaagcctacagcaagggattccaagaaggtctaaagaagaccaaagaacttcaagacctgaaggaggaggaggaagaacagaagagtgagagtcctgaggaacctgaagaggtagaagaaactgaggaagaggaaaagggcccaagaagcagcaaacttgaagaattggtccatttcttacaagtcatgtatcccaaactgtgtcagcactggcaagtgatctggatgatggctgcagtgatgctggtcttgactgttgtgctggggctctacaattcctataactcttgtgcagagcaggctgatgggccccttggaagatccacttgctcggcagcccagagggactcctggtggagctcaggactccagcatgagcagcctacagagcagtaggaaacctcacacctagccagtgccctgctctgagacactcagactaccaccctttccccaagtataacgtcaggcccaagtgtggacacactgccgcccatcccatcaggtcatgaggaagggttcttttaacactcggcacttctgtgggagctattcatacacagtgacttgatgttcttggaggatcaacaaaactgccctgggaaagcatccagtggatgaagaagtcaccttcaccaaggaactctattggaagggaaggtctcctgcccctagctcaggtggctggggagaactaaaacaccttcactggtggttgggggtaaggagcggggcacgggggaggaggaggtagggggcagtaaaaaacttactctcttttttcctctctgtaattggttatcaggaagaatttgcttaatgactaacaccctaagcatcagacctggaatttggagttgcaaagtgactatcttcccatttcccatctcattttcaataacttcagcctcccattctttcctttggaatgagagtttctttttacagaagtaggaaaggcttctcag

SEQ ID NO: 585 - DNA, 4410 bp, Homo sapiens
cacctctggaaggaccggcatccacacacacatacagccgcgccttttccaggaagcagctatccgtagcttttatcacggctccaagactctccccagcccataaagcttaggcacccctgttttaaaaagtaggactgttggaaaccacctcagccataactacagtcagaagaggaagggccctggtgtcagagaggaggggctgggaccttcacctgcagcttgaggcgatgggcttcaatggggatgatcttcaggatcggcaggtccacaaccagcaccttgggtttgctcttgataagacatcctttttctatatcccagtcagcaccttccaggtacagtcctgagacaaagcatcctagggacacaaggcagagactggatacaactggagcatgcacagcctgccacggagtggctctatcaggcgcacacacagcgacacacaggccactggctggcctcctccccagcgcattggggacagcccaggcccttctccagcatttctgtcctgcccaccttccctctgtggaggagcagcccagacaggagaccctgtggccctgccccatggcccagagaaatgggtgtggggcggtggcctctcccccaggaatcctcattcctggggcatcaaggcccacggacttagaccaccctgggcccccaggctagaaagatgcatggtcccagagtcagaatgggcaccatggcaaccccagctaccctgtgagccgaagtggctggggagcaggaagtcgaagcctcacagagaaagtggtctccggggaggaggacccagcagatgtgcaaagagaggaacacactcctgtggccccagagagagtggtggcccggacacctgccacctcccctgccactgagacctggagagtccctgcatctttaccggattttgtagtccacttccttgttccggaagaagtggaatggctggaaagtatcaaaaatgaagtcccccaggtactcatccatgtagatggtcaggatgcggcgatcaaagctgtcgatggcccgtcctccatacatgacctgaaattagagggcctgagagccagccaggagctcagaacctactgtgtgcaccctgggggcccggggccagaggctcacccagggtcaagagactccagcagcctggctgctgcaaggcttgaacctgttgacttgcataacctttcgggccactgttcacacaattgatctgtggctttgctggcttcccaagggatagggcccaaagcagtaagaagccctcaggaagtgttgggagctcctgtgcagcaggcaaagtcccccaaacacatcaaacaaacagctgaagaagccagcagctgcttctgtctttggaattgatgtcactgcctgagccgtgtgcagaccaccggggatgcttcctgtgagctctgtatacagcaacagctgaggcaaggggctagaggatgccttgcctggatccccagccatggatccagctcagggaacctccatgtgaacagagctcacttaggacaaagaacaaccaggtgagagcagagagaattgtcacagaaacccaaggggaacacaggggcagaagaggctggttctgagggctcagaggaaaataggggcacgaggccacagctctgtagccccagaggcacctgcggaaggatccccggtcacccctacctctccaattaggtacttgaggctgccccacgggatccttgggtcccgttgctggaaggctttcgttaagtacgtgttcagaatttccatgcagaccttgaaagaagagaacacgctcagttatactgaaacccaccaagctgttcacattctgatacttttctgaaaaggctgctgggaacggtgcaaccctgctgtggttgaacccggaggaaagtcgggaggaagtgggccgcctaaggaagccatttccaaggagaagcagccactgtcacctggaagtcagactcattgaagtcatagtacacgttccagccaatcttcccaaacttccttctctcctgcaccacagcatgaaagaacgccagcacgtagaccagcggcttgaaggcagggtgcgggcactggtccagcatttcgtgagagatcttgaagtaagttgccctcatgttgagtttcagcccattgggtggctcggtgacaaccttcagaagagaagaaaacacacagtgatggagaccgcaggcccacaagcttggaagagtgtgcacaatgcaggcactgcgctttccttcctctctacggagccatctgtctgagacctccaatagctaaagtctcttgtccagggcccaggctgagaagttaaaggactagatgttctggctctcagggtcaagggtcaagagtctttgaccttcctctgaaccatgagatcctttactatatataaaatgaaagtaaagtcttccctccacctccccagagagagagagagagacagagaatgacaaaacctttccaaaagaatttcccggagaataaattaaatggggcatgtaaaccacgcgaaactcctgcagtcagcactagcgaactgcaggctgtgtgtgggggggggggccgtgaagtttatgaaaagtagcgtagatattgttagggacacatgcagaattggtagagataggcctgggagtcacaaacacccaacccaggacagcggctccctctaaagagagaggtgggattgagaagggtttcaaccgcaaggtttcacctgcagcctaaggtttatttctacacagacaaaggcacaccccggccccagagcagcatgcaggtgttctgagaagctgcgtgctggcatgttgatgtccatcctgaagccagacctttagggacttctgcagaatcccaatggggaagcccttggtggggtccgtggtgagccacaggcggaagtctgggtggggcttggtgatcctctccagggacttctccagatctttcagccacttgaccaggaggtggcagttctgcagcatcagccactgcccccgagccaccgccgtctccagcagctgcagggccacctgcgccgggggagagggaagaggagaggggttggcatccaaacccaaccccgtgctctccagagacccactccacacccacagaagggcgatggcagctccagcagaagccaaaagcaagccgaggatccaggagctacaggtggagccttcaaataaaccatctttgagaaaccccatgggccccgtgggtgcactgagctggtcacacccagcctggaagatgggtgagcattttgcactcatctgcctccctggccctggaagtcccagctcctcccacacagtcgctcctgtcccctgaggactcctgagcagggctgcaagagaccagctaaagcccaccaggaagtcgggactgtcctggccactgtaagatcttcagggccctaggcctggaaaacaatcaccatgtcccctcccaaatgtaattcaaagcacaaacaagctaaacacccaaatcaagccttgctttctgaaatggcttaaaacacatgagtgctggcgttacaatagcttatttcagtgttgtggttgagagagctggcccgccttgctggtgcccagggcttgcctcctgggccatccagcatgggtattgccatcctcatctcacccaggggctttcagcagtagaggggcttacccaaagcctcacagttcatagcaaagccaggactggcagtcagctccctctgaccccaacacgcatgcctgcaaccatcacacttactgacgcacagacttttcctgcaagctttgtcccacattgtactgaacttgtgtagcaagttctagcagggagcactgtgatgcagagaggcaagacctcagcaaagaaagctcactggctcagaaaggtaggaggatttgcaccacagttctgtcctgaatggtcctgggctcagcctctctccacccactcccttggccatgcaattggggccataataatcctgatccacaatgaggctgttcagggactaaggaaggtaaggactgtgtgtgaaagggctttgaaaacagcacagcctgagcatcgtgtctcatgcctgtgatcccaacactttgggaggccgaggtggaaggatcgcttgagcccaggagttcgagaccagccagggcaacatggtgacgtgtttgtatttttctctacagaaaataccaaaaaaaattagccaggcgtggtgacgcatgcctgtagtctcagctgctactggggaggctgaggcaggacgatcacttcacaatcgggaggtcgaggctgcagtgagctgtgttcgcgccactgcgctccagcctgggtgacagagtgagaccctgtctcaaaaag

SEQ ID NO: 586 - DNA, 4142 bp, Homo sapiens
tttaggaaaggaagcaggatagatgggtgactgccagtgttggtggggcaggtgggcagcagtgggtgcgtggcgcagcagaaacacagcctccagagtttgggccccttttccgaagctcaccaggctatctgcccatcttttcctccccctccctctaactgcctccctcccctggtccctagcacagctccagggcacccctggagcagctggagaatctgggttgcggtccacccccaggtggcgctgtgctcccgcaccaggttcaagtgcactagaggagtgatgacatcatccaggacggaaacagcatccccaccgcgggagcaccgaggaagagggcagctcacttgttgctcaggacagtagggagtggtttttctctctggctaaatcatgtttgaagtttggtagaaagggcttcctaaggtgacaggttctattggacccttaagatttggaggcaggttgtttgggttcaggtgagcgtccagtgctttcctgcagcaccgtcacagccttatttcagtgagggaaggaaggggagctgttaatgagaagcagttctatggcctgaagacctgggctcaaaacaaaaccaacaaacaaaacagacctgagctctgacttttattagctgtgtgatcatggatatattagttaacctctctgggccaaattctatctgcaaaatagaatattggtatccacctcacagagttgaaggatcagctgaagcaacctaaagcatctagctagtgcccagtgcccagcaggcacaggggggtgcagtggggctgacagtgagggctgacagtggaagctctagctggccttagctccagctcataccctttaggtccaggagccagtgtgtgtctgtctcctctcctctgggcccagtgattgcttaggtgactggggtgacaggcaagtgggtggagggaatggagaagagtgtaccctgggatctgagggctttacccccaggactagactgccctctggttttggtcagacctagcacagcgatcttgcttcctagctggggcaccccaccctcacctcaaagatggtgaaactgctgtgcctcctgctgttgaggcaacctggaggcagagaaacctacaagtgacacagacccaaggtggcagttccacagtgccaaggggtggcagcaccttcaagagaatgaaattcagaaagatgcctttcacctacacccgatggtgggcatggcagcattgtcagcattcctgcagttggggcaggaagtggaattggtgagcaggtggggagggctggggaagatgaggcccctctgagccctagggcacacagatatgggtgctattctccaaatagtcactccacttctctgcctgccgccttcctgggcctgtgactgctgtgaggacctggccctgagcccatggttaggcagagtcatggaatgagcatccctgaacatgcctaatatagccatcccagcaccctgggctccactctgccccagcacccctgagaacaactctggctgctgactccaggcagcaggactggttcaggagcagacctagtagaggcctggccttctagacctggacaaccaggtcagtggagagtcttctgcttagagttcagattttcctccatgctgcactttctgaggatgtgaatttatttcttggccaactcaaatagtgtggcagggaacctgagcttctagagtcctccagggagcccagggttaggatcaggactcacagttcaggacaacaggtggggcacagccattcacagctaaaggtttgtatatattatcaaaatcttatggaaaaacagatacacagctattcatacagcagcaggtgggtgtgaggaaaatgtctgctttggcatcaaaccttcaagtccagctgctgtctgtcccactcctcctgtctggagcctactcccatcaggcactgtgcatccaggccactgcccctgccacatcctctaattagcctggactttggggtatcctcagcccctccccacgctcccctttgggcccccatgcctctccatctttctgccattttcccacacagagtgccactggcccagcagctttgccccgtgggctcctcagaggcctgaatcctggccctggagggcagtggggctggggtggatgtggtccctgtgggacatctttcctggatcacaggccttttgcagcttgccagctacatgggccctggacagtgccatcttctcagtgatgtgctaaaaggactcttcttgtccagaaacctgagctccatgtactaaagcaaaatttggagagcctcagagacaagaaaaggaaagtgagaagatataaggcatccttccttgagcgtgacccaggcctggactctcccatggcagaatagggacatccacagcaggtcagccagggatggggtgggcagggtctgtgtagccctgggaggtgaggcctgagcagtcatggcattggcagatggtgcctggcagcctggtcctactgaagcagtttgggcacttccacctgtaggggcaaagtagagacaggttagagaagggagctcagccacctcacctccctccctactggaaggacacacaagacactgcaatatgttatgtctgtggaatgtgaatgaggtgttgacactgagggagcatttttcattgtctgtaaaaattggatgtcattgagtgaccactggaattacaattgagattttcctttatctcatgataccttgtcccagatgatgttgtgggggttgggtatccaaccaaatggacaaacgatcgtggactttgtcacccaggccagacttccaggggaggcagggcttggagaagtagggtgtccagggatggctcctgtgtccatggcactggctaggcaaaggtagactctcctgagaggtgaatctcccagagacctttcggatggactgacctgtaggacttggctggtcctgagaggaggctaagtaaaacgtggatcatttttgtttggggaaatggagaagacttaaaggaaggacccgaggcaaaactactctgtagaggccatttttccattttaaggagaaacaggcttcattgcagaatgaaagagaagcatggagtgaggtattaaaggaagctccttaaaggaagggtagagtctcagctctaggggatatacaggtgtgacctgcctgcaggcaggaggatgcatgagatgacctgaagtcccctatgggccctgggagtctatatcatctgcagccgacataagctcctctgcatgccttcccttttgcagtcctaccctctcctccaggccctacccagccccgccctgttggctcatgcccacaactacttaacttcttgagctgcttgaggttgctggagcggatggcagccaatagctggtcacgggagttcttctcctgggcagggaggactttgtctcccatcttcctctgggtagctggtgagagtgaattcttcaggttctccatgataaggggtggagccaagggagggggagggggtggtggggcagctggagcacccccttttttgggtgagttctttggagagggctttggagatggttgaggtgaaggttttggggagcccttagccacggccccggccttgggtacctccagcagatccttcttctctcccttggcttcctgtgcctgcctttgctcctgcagccgcttttgtctctgcttgtccatgttgcggctgagcagattggtgacagtcattcggggcccggccagctcaaaatggtagcccagcttgagcagggtagtattctccttcagcagcttggcgatctccatctccgtcttgcctccacagatgtgtcgctggttgtggaagcggagctcggtcagcgtgttgttctggaggagggcccggaagatggccaggatgcctttgcctgtgatgtggttggagtccaggttgaggctggtgatggtcttgttggccttgagcatgatggcaatggcaaaggccacgtggtcatcggctcgcgtgttggccaaggcgaacagcttaaccacagtgttgaactccagagcctcagtaaaccggaccaagatctc

SEQ ID NO: 587 - DNA, 3955 bp, Homo sapiens
caagcaagccaccttcttacgacattaaatttggtggaccaagcccccagtacaagcgctggggcccagcacggccaggctctcaccttttagagcagcacccccgactaatccagcgaatggaatctggctatgaaagcagtgagaggaacagcagcagccctgtcagcctggatgcagccctgcctgagagctcaaatgtctacagggatccaagtgctaagagatcagctgggttggttccttcctggcgtcatatcccaaagtcgcacagcagtagcatcctggaggtagactccacagcatccatgggtggctggacaaagagtcagcctttctctggtgaggagatatcttctaaaagtgaactggatgaattgcaggaagaggtggccaggagggcgcaggaacaggaacttcgaagaaaacgggagaaggagttagaggcagcgaaagggtttaaccctcatcctagccgcttcatggacttggatgaactgcagaatcaggggaggagtgacggctttgagaggtccctgcaagaggcagagtcagtgtttgaagagtcactacatctggaacagaaaggagactgtgctgcagctttggctctctgtaatgaagctatcttgaacagcctatcccgctccaagtattgttaagccaagaggcccaactggaatccggcatggatacagagtttggggccagttctttcttccattcacctgcttcctgccatgagtcacactcatcactatctccagagtcatctgccccacagcacagctcccccagtagatctgccttgaagcttctgacttcggttgaagtagacaacattgaaccctctgcattccacaggcaaggtttacctaaagcaccagggtggactgagaagaattctcatcatagttgggagccattggatgccccagagggtaagctgcaaggctctaggtgtgacaacagcagttgcagcaagctccctccacaagaaggaagaggcattgctcaagaacagctgttccaagaaaagaaggatcctgctaacccctccccggtgatgcctggaatagccacctctgagaggggtgatgaacacagcctaggctgtagtccttcaaattcatcagctcagcccagccttcccctgtatagaacctgccaccccataatgcctgttgcttcttcatttgtgcttcactgtcctgatcctgtgcagaaaactaaccaatgcctccaaggccaaagcctcaaaacttcattgactttaaaagtggacagaggcagtgaggagacctataggccagagtttcccagcacaaaggggcttgtccgttctctggctgagcagttccagaggatgcagggtgtctccatgagggatagtacaggtttcaaggatagaagtttgtcaggtagtctaaggaagaactcttccccttctgattctaagcctcctttctcacagggtcaagagaaaggccactggccatgggcaaagcaacaatcctctctggagggtggggatagaccactttcctgggaagagtccactgaacattcttctcttgccttaaactctgggctgcctaatggtgaaacttctagcggaggacagcccaggttggcagagccagacatataccaagagaagctgtcccaagtgagagatgttaggtctaaggatctgggcagcagtactgacttggggacttccttgcctttggattcctgggtgaatatcacaaggttctgtgattctcagcttaagcatggggcacctaggccaggaatgaagtcctcccctcatgattcccatacgtgtgtaacctatccagagagaaatcacatccttttgcatccacattggaaccaagacacagagcaggagacctcagaattggagtctctgtatcaggccagtcttcaggcttctcaagctggctgttctggatgggggcagcaggataccgcctggcacccacttagccaaacaggctctgcagatggcatggggaggaggttgcactcagcccatgatcctggtctctcaaagacttcaacagcagaaatggagcatggtctccatgaagccagaacagtgcgtacttctcaggattcatcaaacgtgaggaagcctttggaaaccgggcaccgttgttccagctcctcttccctccctgtcatccatgacccttctgtgtttctcctcggtccccaactctaccttccccaaccacagttcctgtccccagatgtcctgatgcccaccatggcaggggagcccaatagactcccaggaacttcaaggagtgtccagcagtttctggctatgtgtgacaggggtgaaacttcccaaggggccaagtacacaggaaggactttgaactaccagagcctcccccatcgctccagaacagacaactcctgggcaccctggtcagagaccaaccagcatattgggactagattcctgactactccagggtgcaatcctcaactaacctacactgccacactaccagaaagaagcaagggccttcaggttcctcacactcagtcctggagtgatcttttccattcaccctcccaccctcccattgttcatcctgtgtacccaccatctagcagtcttcatgtacccctgaggtcagcttggaattcagatcctgttccagggtcccgaacccctggtcctcgaagagtagatatgcccccagatgatgactggaggcaaagcagttatgcctcccactctggacacaggagaacagtgggagaggggtttctgtttgttctatcagatgctcccagaagagagcagatcagggctagagtcctgcagcacagtcaatggtaaaggttattcctttcctttcctggagctacacctttctttgtaaaactgtactgtgggccgggcgcggtggctcacacctgtaatcccagcactttgggaggctgaggcgggtggatcacgaggtcaggagattgagaccatcctggccaacatggtgaaaccccgtctctaccaaaatacaaaaaattagccaggcgtgacggtgcgtgcctgtagtcccaactactcggaaggctgaggcaggagaattgcttgaacccgggaggcagaggttgcagtgagccgagatcgcaccactgcactccagcttggcaatagagtgagactccatctcaaaaaacaaaacaaaacaacaacaaaataaactactgtggcagcgttggtaccctgcatcactgccatggttgtgctattctcatctcaacatagaattggtgggttctcctaagggtgtcaggaacctctaaaaagatgtgattctttgggaggggatatttgaaattccaacttccattccccctagcaaaaggaagcagctgctgtttaagggttttatctgagccactttaaagatgaatccatggtattactctggatactagccattccttaggattttaaggtcacattttattcctggatgctttatgtccccacctccacctgagccctcatcctctgttccctactatactcccaacttctactctttgttttatccacctatccctattacctgaccctttgtcttccctgtctcccatccttggggggacatgtagccctgtggtcatggttctgatgacatcatcagggcagcccccctgcccaggtattatggcctgtcagcattccctgtgccctccaaaccttaggcctagaatgcggagctgccaacataacattcacccttttgaacagatggagtcaggcacactaacacagccttctgtcctcaataacacagccattattgccacttgctcagtcgtcaatgtaaaccctcagagtcagctgaactattttaggccaaacatactgtttttgtaaagtatttttcattaataaatctataagacagttctattt

SEQ ID NO: 588 - DNA, 3765 bp, Homo sapiens
aaaaggaggcgtgcagcgagcatgaaccggctgggctgctggcccgcaaggagcctgccaaggtcaggcaggggcagtgggcagaggagtcttggacttgggggccacccttcaggtcccaggcatccaggcaccccagcagcgaagaggacatgggagtcccctggtgtgagggccagagactgtccactgtctgtaagtcttctaagtagatgtcagggttctgggaggaggcctgcagggggctgagggcccagggggagcccctcggactccctcccacaagtggactctgctatctgcttcctgctgggctggcctacactcaggccgtgggctgtggagagccgggccgtggcacaggcgtggagacgacctttttggcctggccccggccctttccttcacattgtgaggcatggattcttgcttcttctttttccccaccccgagtctgtgccacatctgctctgggaagatgtggtctgtgcttggccatgaattcccaaggcttgaagcagcaagggctttgagggagagggctttgagggagagggccttgagggagagggctgtggggcagaagcagagaaggagaaataagcctccggccaaggtcaggttgagcaggagagccttgggttctttgtgggacagcacagagctgggggtcaggcgagctgtgcccagcaagtaggcagcggctggatgtgacaaagacccagaggagaaacacagaagaggggagagggtctggaagctggggaaagcaggatggtcgggaaggcctggcccctcacccattcccagggaacggggccttgggccccagaagggcacaggcgggaggcagccgacccctggtggcagcggcagcaggcacgggagggcagaatgcagctggggtgtgcgtgggtggcagcaaggaggggcggagggaggaagctggcttcctggagccttctcagccctcaaagacagaccgacagacagacagacagctggcaagaggcagcctgggggccacagctgcttcagcagacctcatggctgagtgagcctcccctgggcccagcaccccacctcagcatggtccaagcccatggggggcgctccagagcacagccgttgaccttgtctttgggggcagccatgacccagcctccgcctgaaaaaacgccagccaagaagcatgtgcgactgcaggagaggcggggctccaatgtggctctgatgctggacgttcggtccctgggggccgtagaacccatctgctctgtgaacacaccccgggaggtcaccctacactttctgcgcaccgctggacacccccttacccgctgggcccttcagcgccagccacccagccccaagcaactggaagaagaattcttgaagatcccttcaaactttgtcagccccgaagacctggacatccctggccacgcctccaaggaccgatacaagaccatcttgccaaatccccagagccgtgtctgtctaggccgggcacagagccaggaggacggagattacatcaatgccaactacatccgaggctatgacgggaaggagaaggtctacattgccacccagggccccatgcccaacactgtgtcggacttctgggagatggtgtggcaagaggaagtgtccctcattgtcatgctcactcagctccgagagggcaaggagaaatgtgtccactactggcccacagaagaggaaacctatggacccttccagatccgcatccaggacatgaaagagtgcccagaatacactgtgcggcagctcaccatccagtaccaggaagagcgccggtcagtaaagcacatcctcttttcggcctggccagaccatcagacaccagaatcagctgggcccctgctgcgcctagtggcagaggtggaggagagcccggagacagccgcccaccccgggcctatcgtagtccactgcagtgcagggattggccggacgggctgcttcatcgccacgcgaattggctgtcaacagctgaaagcccgaggagaagtggacattctgggtattgtgtgccaactgcggctagacagaggggggatgatccagacggcagagcagtaccagttcctgcaccacactttggccctgtatgcaggccagctgcctgaggaacccagcccctgacccctgccaccctccggtggcccaggtgcctacctccctcaagcctgggaaggtgggtctggggaaagtgggccgagtgatctgggggtaccccttgggttggtgtggggaaggagtgcctccttagtggtgcttgcagtcacaggaagcagcagcagtaaggacaaggggccggattccaggtcttcaacactggccactcctctgcttcctctgttggccccagatggacagtaaggggaacctccaatgtctctctgaacttaaagacaggagctggcatttatgacagacaaagaaagaagcccaggtgtcctggtgttctctgagacactctttgtgagcttcagtttcctgttctataacatgaacataagtgcttagctgccatgagggaaaagtaatgagagaagtttctagaagccactccagccactccttcctggggctgacaaaagggtgattccaagatcatccttcacccgaggtcctgcccaagcacaggccagatgcaagaatggggaaaagtctggtcctgatctccaagtctcaacatcctatcagtgactctgctccctgaccacacatcggaagggctggatgaccccaatcaaaagaaagaacaaggactctggttacccttgcctccacccatgtgtcataagagtaggctacagaggtgaccaggcctggcagttgaaatctctggaagagggaacatgtggggactactcagaggcaaagaggagctgctcctgcctccatggttgctggcctctcccaccaactactcttagggaggctaagcagtctctgttttgcttccatggctcaaataataccctgggtatgcaggacccactataccttgcatttgctgagtacacctagagagcttggctgtttccaaaaacaatcagggtcataaccatccatgcagacatggaggctcggctgaaccaggactcctcactgtctacctgagagaatgagcacccctcatccatctcagcatcaacacaatttccaggggacctcaggtctacctcaggactgaacgccacacctcaggattcctcctccttgaatctgagactggctgcccattctgagatggggatgaaggtaagatgccgcatcaccaggcacgccgcccctgacagctgccttgataccagctctctgtggaaacccccgaggagttggctctggagaacagctgggcctcctcactcaggacttctctcctgaagaacacgcagtgctaaaactgaggatgatttccctaatgcttctgcttggccttatggaggagctgctccttccttacagccttggggatggacttgcccacacctccacctcccctgagccctgtgagaggcacgactgtctatgccaatgaggctcggtggggggctctcaagtgcctgatcctgccctgggctcagagccagcccagagggaagcaactgcacagccccacaggccctccttggcactgtccccccaaccccatctcagagctcagagggtacaagctccagaacagtaaccaagtgggaaaataaagacttcttggatgactgactc

SEQ ID NO: 589 - DNA, 4528 bp, Homo sapiens
ttctctacttgactgctgacaagtttaacaaagtgtgtggctcttctccttcctgcttgggtaagaataaaggtgttaaaactcatataatcccttcctttgcatgtttgttctctgtgtcttccaatgcattttttaattaaaaaaaatacatgtcttttgctttttcagaacatatataatccaaaaagattagtgacgttttgacagtcgtcagaacactaaccattagtactgcattggagtgatgctcacttttttcagagtagcatctctaaagtactttctaaaaataaaaaggtccctgctttggcctgatttttgcttctggatcatcaggtgctttgccgtgaagtgtgcaggagctgccgcctgtctgtgtctctggctgctccactgtgttcagtcagtgcatggccatctccctcgtgccatgttctggcttcactaacactccccgtctcgctgcagtgtaacacgtctaacttttgcttctatcccatttcactcatgttgcaggaaccaggaggggttgggacccatagttcatgatcgaaagtctcagacattgcctgtttcccgtaacagaacaggaatgatgcatgccagattgcagcagctgggcagcctggataactctctcacttttaaccacagtaagtcccatgacatgccatcgtaacagccagccatctcatgtgccatctcagaggggagagccctaggccacacctaccacatcaccaactcaatttttcttctagctcaaagcaagtaggatgaagagctcatggcacagttcccttccttggaggagcgtcctcagcatttgggagtgacacaatgtggaacgtgctcaactacagcactaaacctaaaagtgcctgaccctttctgcatccctaaaacaaaactcggctgggtccatagccagccgttctcaagaattctaaacataaaatttggattcatcacctagaaccgacttaatgttggctttcccctgcaactctgagaacattcgggatggatttctttcaccccttctgatcctgtgcatgtaattgatcaagcgtccacattctgacattccagctctgaatggatgttaatccttgcactactgtgaaaacataaagcccatgaatcaatttgtgagggtgtggaaaagcatccaataacaaagtgactttttctgtgttttcagtgtgagaaagatatcaagtgtgcttggaatttctgtagacaatgtaatcttgtgttgtaattcatgcaggctatggccactcggacgcagatgttctgcaccagtcattacttgaagccaacattgctactgaggtttgcctgacagctctggacacgctttctctatttacattggcgtttaagaaccagctcctggccgaccatggacataatcctctcatgaaaaaagtttttgatgtctacctgtgttttcttcaaaaacatcagtctgaaacggctttaaaaaatgtcttcactgccttaaggtccttaatttataagtttccctcaacattctatgaagggagagcggacatgtgtgcggctctgtgttacgagattctcaagtgctgtaactccaagctgagctccatcaggacggaggcctcccagctgctctacttcctgatgaggaacaactttgattacactggaaagaagtcctttgtccggacacatttgcaagtcatcatatctgtcagccagctgatagcagacgttgttggcattgggggaaccagattccagcagtccctgtccatcatcaacaactgtgccaacagtgaccggcttattaagcacaccagcttctcctctgatgtgaaggacttaaccaaaaggatacgcacggtgctaatggccaccgcccagatgaaggagcatgagaacgacccagagatgctggtggacctccagtacagcctggccaaatcctatgccagcacgcccgagctcaggaagacgtggctcgacagcatggccaggatccatgtcaaaaatggcgatctctcagaggcagcaatgtgctatgtccacgtaacagccctagtggcagaatatctcacacggaaaggcgtgtttagacaaggatgcaccgccttcagggtcattaccccaaacatcgacgaggaggcctccatgattgaagacgtggggatgcaggatgtccatttcaacgaggatgtgctgatggagctccttgagcagtgcgcagatggactctggaaagccgagcgctacgagctcatcgccgacatctacaaacttatcatccccatttatgagaagcggagggattttgagaggctggcccatctgtatgacacgctgcaccgggcctacagcaaagtgaccgaggtcatgcactcgggccgcaggcttctggggacctacttccgggtagccttcttcgggcagcaataccagtttacagacagtgaaacagatgtggagggattctttgaagatgaagatggaaaggagtatatttacaaggaacccaaactcacaccgctgtcggaaatttctcagagactccttaaactgtactcggataaatttggttctgaaaatgtcaaaatgatacaggattctggcaaggtcaaccctaaggatctggattctaagtatgcatacatccaggtgactcacgtcatccccttctttgacgaaaaagagttgcaagaaaggaaaacagagtttgagagatcccacaacatccgccgcttcatgtttgagatgccatttacgcagaccgggaagaggcagggcggggtggaagagcagtgcaaacggcgcaccatcctgacagccatacactgcttcccttatgtgaagaagcgcatccctgtcatgtaccagcaccacactgacctgaaccccatcgaggtggccattgacgagatgagtaagaaggtggcggagctccggcagctgtgctcctcggccgaggtggacatgatcaaactgcagctcaaactccagggcagcgtgagtgttcaggtcaatgctggcccactagcatatgcgcgagctttcttagatgatacaaacacaaagcgatatcctgacaataaagtgaagctgcttaaggaagttttcaggcaatttgtggaagcttgcggtcaagccttagcggtaaacgaacgtctgattaaagaagaccagctcgagtatcaggaagaaatgaaagccaactacagggaaatggcgaaggagctttctgaaatcatgcatgagcagatctgccccctggaggagaagacgagcgtcttaccgaattcccttcacatcttcaacgccatcagtgggactccaacaagcacaatggttcacgggatgaccagctcgtcttcggtcgtgtgattacatctcatggcccgtgtgtggggacttgctttgtcatttgcaaactcaggatgctttccaaagccaatcactggggagaccgagcacagggaggaccaaggggaaggggagagaaaggaaataaagaacaacgttatttcttaacagactttctataggagttgtaagaaggtgcacatatttttttaaatctcactggcaatattcaaagttttcattgtgtcttaacaaaggtgtggtagacactcttgagctggacttagattttattcttccttgcagagtagtgttagaatagatggcctacagaaaaaaaaggttctgggatctacatggcagggagggctgcactgacattgatgcctgggggaccttttgcctcgaggctgagctggaaaatcttgaaaatatttttttttcctgtggcacattcaggttgaatacaagaactatttttgtgactagtttttgatgacctaagggaactgaccattgtaatttttgtaccagtgaaccaggagatttagtgcttttatattcatttccttgcatttaagaaaatatgaaagcttaaggaattatgtgagcttaaaactagtcaagcagtttagaaccaaaggcctatattaataaccgcaactatgctgaaaagtacaaagtagtacagtatattgttatgtacatatcattgttaatacagtcctggcattctgtacatatatgtattacatttctacatttttaatactcacatgggcttatgcattaagtttaattgtgataaatttgtgctgttccagtatatgcaatacactttaatgttttattcttgtacataaaaatgtgcaatatggagatgtatacagtctttactatattaggtttgtaaacagttttaagaatttcatccttttgccaaaatggtggagtatgtaattggtaaatcataaatcctgtggtgaatggtggtgtactttaaagctgtcaccatgttatattttcttttaagactttaatttagtaattttatatttgggaaaataaaggtttttaattttatttaactggaatcactgccctgctgtaattaaacattctgtaccacatctgtattaaaaagacattgttgacc

SEQ ID NO: 590 - DNA, 4563 bp, Homo sapiens
atcacagaggcccagggcatgtggaaagggggaaagtctgggaataaagtgaggtgctgccccgtaccagctagcatggggcctggcacaaagccgtctcagcaatccgactccctcggtggtacggcaagaggaactctggagacagcttcctcctgctatacctcctgcgggagttgaattgctgggatggctttgtgccaggctaggtccttgaataagtcacctcatctctctgggcctgtttcctcatgtgtacaatgggtggcttaaacgagaggcttttccagctctgctgcattcagattgtccgacttggtagctgaggcctagagagggtgtgtcagttgcccaaggccccacggcaggcaggtcaggggcaagctcacaaaagtgagtactttgcaacagtggttccccagcctggctgtgcttcagaatcaccggcagagcttttaaaaatatgctgttttaaaaacagattccaagtccaaccacaggctattgaatcagaattgctggggaagtttctagtttaagaaacttttcagatgatacagatactcagagttgagaactattgtcttccactcaccatattactcctcagtggggaggttagtgatgtgtttgtgtgtgtgtgtgtgtgtgtgtgtgtgtgtgtgataggagggtgggcagcagcttaatgctagcccccaggccataaggtcattgccttccatacccccttcacaggaacatttgttggagctcccagcctgctacttaggggcacacagtatttctatgatgagatggcggcatgtggtgggagggtgtccatggctgattctcagtcataccaatcagatactgacttccttccataccagttggtaaatggctgctgccctgagcagtccacatgctctcccctgccccagcccttcctgtgggagtctcctggatcctactccattatatagcaactaaaggggcagtgcgtggtattggaggtggcccctgggccctgctcctgcagctgtgtccagagccattctggcaagtccatgtctatgcagtgcttgtgtcaacctgtggactcagcttggcttcagtgtcagatgagaactccctgtgggggcagccattatctttcccatttcagcaaacatttatccatgcttaccctgtgctgggccctggggacacaaatactagtcagaccagctgtgcctgggctctgggataaggctgcacgcactgcctacaggcctgagagcagagcacaggaagctccctgcccagcccagctacctaggagaaaggagggtgggaaggtgactatctccctgagactgggagaggggacagctgcccagctgtcctgtggtacggcgctgaggaatgccacctaggagttgggagggggcatggccgtttctgttccagcctcacccctgtctctcttggcagatgcagtccacctatgtcctgcagggtcttcacctccacatcccaaacattttcccagccaacccggccaacatctctgtggccctgagagcccagggcagcagctacacggtgagagataaagcatgtgttcggcacccagttcagccaggtagcggcttcctctgagaagaggaggaaatgaaactgccttcacactcccctttcctgcctgcaaggcaacctcaggatacaggaaaagcacctggagggtgggaggacttgtgtcacagcgcagggatcctgccaagatgctcaactgcttgaaggaattcaggccagctgcacacccccatgctgctgctctgaagcaggtctcgctgcctaatttgcaccctcagatcaagcatacttaggtcccttttcaactcttccttgtcccctctttctctgggacccttagatacctagatctctgcctttcccagaactttctaaaccagttccttggcatttcagactcatgaaatgaatgatctgcagagctggcagatatatgagaaatttgccattgtagtccatttccttgcccatggcagacatcactagtcaatcatgactttttttatgctgagcccataaatgttccataatcagccactaccaattgataaaagttagaatacaagaggaacctatttgccatctctacataatcccactccctggttacacagctgaggagcatgaactccagagagggaaaggagctggaccccagggtcacccagggccagtctagagtccaggtctcctgactgcagccaggctccttgcactctgctagcctgcctctcctgacttcctcctgcccagatcccggaagcctggctcctcctggccaatgttgtggtggtgctgattctggtccctctgaaggaccgcttgatcgaccctttactgctgcggtgcaagctgcttccctctgctctgcagaagatggcgctggggatgttctttggttttacctccgtcattgtggcaggtgtgcagaggggtgtggggcagggggctgaactttgggcttggggaagtctgcttccaccatgggctgatgctgaagtggtagcctggaccaagttcagcctctcccagtgggcgtcagtgttggcttcccagaggtgcaagctgaaagagaccctcctatctaatccagctgcccctcattttgacagaagaagaaactcaggccgagagaggaacaaatattttcccccagtgaattatcagctccttgaaggcagagatagtttttctttttttattcactgctatgaacatgcacgtgggccctccataaatgtgttgaatgaattttccacttagtggcaaatgaagacttaaaaaaaaattatcttccttcttccatttcaaaaggatctgaagccatttgttacaaagtgggggttggtgggggcagtgggggggatcagctaaagaagtctttcacactgttgcacaaacctgaaccctttttacttagtaactttatgaccctgaagttccttagagtctctgagctatgtctttaaaatggggacaggtgtcattcggaccctgagcagggctctgcccttgtggaactcagtctgatggggggtgttgtgaggattacagcagatgaagtctgtaaagcactcagtagtgtgcctggatcacaagtatgtgctggagaaatgaaagctccataaacggtattgtgttgaaagtgtgaaaacccaactagattttattccagctatatccttaaagcagtttgtcctattttatcctcacaataatcctgggaatgttattcctgcttcttgagtaagggaactgagtctagagaggttaagtgatttgcccaaggtcacacagctagccaggctgggaacccaggtcccccaactccatgtccaatgttcattccactagagcacagctatctcccaagcaacacaggagaaggagataacatagttaaacttgaaagccaggttagaaacactacagcaatacttgacgttgcagtagagaagtcatgtgatatcatggaaagtaggccagctttgaaaccagacataccagagctcaaatccagccctgactacttatcagctgtgtgactgtgggctagttgcttaactttctagttaagcacttgaaagtgctagttatttcactttcttccgcagcaaggatgcatggtaaatgcctagcacataacaggttctccattaatgagagttgttagtgttattgagtgcaaaactcagcttggagcttctagcagccaagaccaaaagggaggagttggtcacatcttggccccctcctccaccccccagtccagcattcttttccttgcctgctgctcaatctttggctgcttcatgagtaccccatccccaccatgtacaagctcttctgtgggctaagctgcctggggtgggcctgactataatccccctctgctcctccaccaggagtcctggagatggagcgcttacactacatccaccacaacgagaccgtgtcccagcagattggggaggtcctgtacaacgcggcaccactgtccatctggtggcagatccctcagtacctgctcattgggatcagtgagatctttgccagcatcccaggcctggagtttgcctactcagaggccccgcgctccatgcagggcgccatcatgggcatcttcttctgcctgtcgggggtgggctcactgttgggctccagcctagtggcactgctgtccttgcccgggggctggctgcactgccccaaggactttgggaacatcaacaattgccggatggacctctacttcttcctgctggctggcattcaggccgtcacggctctcctatttgtctggatcgctggacgctatgagagggcgtcccagggcccagcctcccacagccgtttcagcagggacaggggctgaacaggccctattccagcccccttgcttcactctaccggacagacggcagcagtcccagctctggtttccttctcggtttattctgttagaatgaaatggttcccataaataaggggcatgagcccttc

SEQ ID NO: 591 - DNA, 3554 bp, Homo sapiens
tcgcgggttggggcggttgggctggcagctgaggctcgtggccatggagtggggttctgagtcggctgctgtgaggcggcaccgcgtcggagtagagcgtcgagagggagcggcggccgcgccaccgccggagagggaggcccgagcgcaggagcctctggtggatgggtgcagcggcggcgggaggacgcggaagaggagccccgggggtagcggcggcgcgagcaggggcgcggggaccgggctgtctgaggtgcgcgccgcgctggggctcgcgctctacctgatcgcgctgcggacgctggtgcagctctcgctgcagcagctcgtgctacgcggggcggctggacaccgcggggagttcgacgcgctccaagccagggattatcttgaacacataacctccattggccccaggactacaggaagtccagaaaatgaaattctgaccgtgcactaccttttggaacagattaaactgattgaagtgcaaagcaacagccttcataagatttcagtagatgtacaacggcccacaggctcttttagcattgatttcttgggaggttttacaagctattatgacaacatcaccaatgttgtggtaaagctggaacccagagatggagcccagcatgctgtcttggctaattgtcattttgactcagtagcaaactcaccaggtgccagtgatgatgcagttagctgctcagtgatgctggaagtccttcgcgtcttgtcaacatcttcagaagccttgcatcatgctgtcatatttctctttaatggtgctgaggaaaatgtcttgcaagccagtcatggtttcattactcagcacccctgggctagcttgattcgtgcattcattaacctagaggcagcaggtgtaggagggaaagaacttgtattccaaacaggtcctgaaaatccttggttggttcaagcttatgtttcagcagctaaacacccttttgcttctgtggtggctcaggaggtttttcagagtggaatcattccttcagatactgactttcgtatctacagggattttgggaacattccaggaatagacttagcttttattgagaatggatacatttatcacaccaagtatgacacagcggacagaattctaacagattccattcagagagcaggtgacaacattttagcagttcttaagcatctagctacatctgatatgctggctgctgcttctaagtatcgacatggaaacatggtcttctttgatgtgctgggcctgtttgtcattgcctacccctctcgtattggctcaatcataaactacatggtggtaatgggtgttgttttgtacctgggcaaaaaatttttgcagcccaaacataagactggtaactacaagaaggacttcttgtgtggacttggcatcactttgatcagctggttcactagccttgttaccgttctcattatagcagtgttcatctctcttattggacagtctctctcatggtataaccacttctatgtctccgtttgtctgtatggaactgcaactgtagccaaaataatacttatacatactcttgcgaaaagattttattacatgaatgccagtgcccagtatctgggagaagtattttttgacatttcgctgtttgtccattgctgttttcttgttaccctcacttaccaaggactttgctcggcgtttattagtgctgtctgggtagcattcccattgctcacaaagctctgtgtgcataaggacttcaagcagcatggtgcccaaggaaaatttattgctttttaccttttggggatgtttattccttatctttatgcattgtacctcatctgggcagtatttgagatgtttacccctatcctcgggagaagtggttctgaaatcccacctgatgttgtgctggcatccattttggctggctgtacaatgattctctcgtcctattttattaacttcatctaccttgccaagagcacaaaaaaaaccatgctaactttaactttggtatgtgcaattacattcctccttgtttgcagtggaacattttttccatatagctccaatcctgctaatccgaagccaaagagagtgtttcttcagcatatgactagaacattccatgacttggaaggaaatgcagttaaacgggactctggaatatggatcaatgggtttgattatactggaatttctcacataacccctcacattcctgagatcaatgatagtatccgagctcactgtgaggagaatgcacctctttgtggttttccttggtatcttccagtgcactttctgatcaggaaaaactggtatcttcctgccccagaagtttctccaagaaatcctcctcatttccgactcatatccaaagaacagacaccttgggattctataaaattgacttttgaagcaacaggaccaagccatatgtccttctatgttcgagcccacaaagggtcaacactttctcagtggtctcttggcaatggcaccccagtcacaagtaaaggaggagactactttgtcttttactcccatggactccaggcctctgcatggcagttctggatagaagtgcaggtttcagaagaacatcctgaaggaatggtcaccgtggccattgctgcccactatctgtctggggaagacaagagatcccctcaactggatgctctgaaggaaaagttcccagattggacatttccctctgcctgggtgtgcacctacgatctctttgtattttaatcttgtggatgagctctaagtacatgcccagtggatactccatgtgacatggtttctccctatgttacgtggatgtttgtaacagggaccagatggcatacttagtgttttctgtaaactgaatttactggcaggaacattttcagctgactgggataaactgatgcttcgattcctgaagaactcaaatccaccacttgaactgggttcctaggattacacaccatatgcagtaccattagagaaagatgctacgtgggtgtatggcctagaggagatgtgtaacttttgcaactaacctgagctgtgggtgtggatggaggtgtctcagattctccagagccaatggctttaagaaatcgaatcatgtgtcgacaaaggtcccacttgccttgttctagtgctgtgttgaatagaagggtagcatgttgcctacttactgcagggacttccatattctacaaaaaacaaccaggacagcattctttttatactacacaatttgggaagatatgagcaattctttatctcgttttctaaactcaaagaatgtagccacaccaccacaggggttagtttaataataagattaaaaagtaccatacaaggaaaagcgaggcaagtactcttctggtgtatgtaaactataatttattaaactcctactacatgccagatagcatacatatactttaagtcatttcatttatttctcccagtgactctgcagataggcatatcatttgtattttacaagtgaggaaactgagttaagtaaattgttgaagatcagcag

SEQ ID NO: 592 - DNA, 3833 bp, Homo sapiens
ttgtagcctctactgtacaattccagcagggaaggagctcaacactgaattctaaagctatgcacttgtctgttttcttcctccttgaccttttcatagcaggggtgaacaactggatgctgaggaggaaaaaactgggcaaattaaaggggaatgagcttcagaccccatgcagagctggctgtgagtccgggtttcactgctcaccagctgcatgaccttgagcatgtgacttccccactctgagctgcggtggcctcagtgcaacacctgggtggcggttaaaaacctcgtgatccacaaatgaaggcccttgttattagttggcaaaaaattaaggaaaaacaaagaacaccatggccttgaagagtgttgggcaggagactgctcctcctccggaggaaagtgaagacaggaggctgtcacatcgtctctgacatggagagtggcttccgggccatccgtaggggaaggacacagagctcttgagcccccttctagattcaaggttggcgttttacggggatggaggaggtagccaccaaaagggaatgatttgcaggccaccagaaatgtgcctgaggtcccacctgtggaccctccatttttggatcctgttccctttcaatgccagtactcttttcttttttctttttttctttctttctttttttttttttagacggagttttcttcttgttgcccaggctacagtgcagtggcatgatctcagctcactgcaactgattcaagcgattctcctgtctcagcctcctgagtggctgggattacaggcacccgccaccatgcccagctaattttttgtatttttagtgaaaacggggtttcaccatgttggtcagtctgagctcgaactccggacctcaggtgatccacccatctcagcctcccaaagtgctgggattacagatgtgagccaccgaacctggcccagaactcttagaagtagaatctcagggttgaaagagtttttaggattttcgacagttatggtagagtattattggtcactataagatgttagtgggaatggaactactggctgttttccaactgactgttccgtcagggtggggagaggtctcagcacgaggccccgccgaaatgttggtaagtggtcagccaagtgggccgctcactcccggttcacccactgtgtttctgtcagtgaagcaaacatccccatttggcaggagaagaagctgccggaggtcacactgctagtgattggtggcccaggggtagggcagccttctttcctctgcagttcactgctccagaaccatctccagcctcatagctcaccgtggacagccctgcggtgtggcgctgatgtacagagtgatgccaggcgttcatctccccactgagctcctgctgagtgtttgcctggggccaggtcctccttccgggaagtcattttagctggaaagaacagggtgggggcgggtggcaagggatcagagcatgagcgtttgagggcttcgtcaggggcagtgaggagcctctaaaggactctacatttaggaatgacagagtcaaacaatttaacaaagccctaaaggtccctgccaggaaagaatgagccccatgtatcaccataagcaacttcttagaaacataacccacccctgtcatcccagcactttgggaggccagggagggaggattgcttgaagccaggagctcgagatcaacctggtcaacatagtgagaccccatctctacaaaaataaaaataaattagccgggcatggtggcacatgcctggggtcccagctactcaggaggctgaggcaggaggatcacataagccagggagactgaggctgcagtgagctgtgatggcatcactgcactccagcctgggcaacagagtgagaccttgtctctaaaaaaagaataataaattttaaaaaacaaaatataacccaccttataattgattcaggcctcttcccctcctgtcacgttgccaggatcccaggatgctggtatcctgcatagatttcaggtacatcactgatgtcctgactgaggaggatgccctaggtgagtttggaagctttctgggatatacgacgtgcacacacagtagtggcatgctttgtttcctaaaagagtgagtgatgctttttatttcttccagaaatactgcagaaaggtcaaattggtaaaaaagaaagaggtgggttgtaagaaaattttcttcattgtttttgctaacattgtccacttttgagtgcccctgtccttttggggtacacattgtcttcccaaatgccctgtgctgagcagctaggccctcaaatcaacattcaagtctgcatggtgaagcctgctgggtatgacctctgactgcagagtttgcttcagccactgctgaaaggaagtttggctttaggattacactgtagggagagccctgggggagcagggcagtccgtgagagtatcctgatcacctgggtttgacatcctagtaatttgtggctgggtgtgtgtgtgcagggccggatcaggagaacagctggactctccaggggaaacagcttagctacaggcacttccaattccgaagggccctggaaagtgcaaaatgttgacggcgctgtgttttcacagagaagcaaatgctggcacaaggataccctgcttacacgacatcgtgcgcctggctggggtactcagatgacacgttgaagcagctctgtgcccaggcgctgaaggatggctggaccaggtttaaagtaaaggtgggtgctgatctccaggatgacatgcgaagatgccaaatcatccgagacatgattggaccggaaaagactttgatgatggatgccaaccagcgctgggatgtgcctgaggcggtggagtggatgtccaagctggccaagttcaagccattgtggattgaggagccaacctcccctgatgacattctggggcacgccaccatttccaaggcactggtcccattaggaattggcattgccacaggagaacagtgccacaatagagtgatatttaagcaactcctacaggcgaaggccctgcagttcctccagattgacagttgcagactgggcagtgtcaatgagaacctctcagtattgctgatggccaaaaagtttgaaattcctgtttgcccccatgctggtggagttggcctctgtgaactggtgcagcacctgattatatttgactacatatcagtttctgcaagccttgaaaatagggtgtgtgagtatgttgaccacctgcatgagcatttcaagtatcccgtgatgatccagcgggcttcctacatgcctcccaaggatcccggctactcaacagaaatgaaggaggaatctgtaaagaaacaccagtatccagatggtgaagtttggaagaaactccttcctgctcaagaaaattaagtgctcagccccaacaacttttttctttctgaagtgaaagggcttaaaatttcttggaaatagttttacaaaaatggatttaaaaaatcctaccgatcaagatgagttcagctagaagtcataccaccctcaggaatcagctaaagcaaaaagaacttttacctcggcatccagcccaacccctaaagactgacaatatccttcgagctcctttgaaagcaccctaaacagccatttccattttaatagttggatgcggattgtacccttcaatctgaaagtcttcagctttgaagtcatcaattttctcaacttttcgaagaatcctgagctttgggaaaggtctgggttctcgctgaagctaaaaacaaaataaggccattattttgcc

SEQ ID NO: 593 - DNA, 3858 bp, Homo sapiens
tttctgcacctcagccttctgagtaactatattactctataagcacacatcaccacacccagctaatttttaaattttttatagagacagagtctcactgtgttgctcaggctggtctctaactcctggcctcaagtgatcctccagctctggcctcccaaaagtgctgggattacaggcatgagttctttgtatgagttccttgtatattttggatattaaccccttgttagataaaaggtttttcagtattttctcccattccgtggactgccttttcattttgttgtttcctttgctgtgcagaagcttttttgtttggtttagttccatttgcttatttttgcttttgttgcctgtgcttttggtgtcatttacaaaacaaacaaacagaattattgccaagactaatgtcatggagcttttccactgttttcttctagttttacagtttcatgtcttacacttaagtcttttcactttttttttttttgggacagagtctccctctgttgcccaggctggggtgcagtggtgtatgatcttgactcactgcaacctccacctcctgggttcaagtgattctcctgcctcggcctcccgagtaggtgggattataggcatgtgccactgtgcccggtttatttttgtatttttaatagaaatggggtttcaccaggctggtcttgaactcctgacctcaagtgatccacccgcctcagcctctcaagggactaggattacaggcaagagccactgcgcctggcctcttttaaccattttgaattgacttttgtggatggggtaagataagggtccaatttcatttcttggcatgtggttatctagctttttcaacaccatttattaaagagactatcctttctttattgtgtacttttgacacctttgttgatgattagttggccacataaacgaggatttatttctgggattcctattctgttccattggtctatatgtctccttttatgccagtaccatacagttttgattactgtaggtctgtaatataacttgaaatgaagtgtgatgccaccagctttgttcttcttgctcaggatcattttagatattctgggtcttttgggttctgtatggatgttaggaatttttttttttttttctgtgaaaaatgtcattggagttttgctagagattgcgttgaatctgtagactactttgtgtattgcagacattttgacaataatgattcttctgatcctgaacatgggatagctttccatttatttgtgtcatctccagttctttcatatatgtattatagcttttagcatacacatctttcccctccttggtaaaacttattcctaagtattttattccttttgatgctattgtaaatgggattgctttcttaatttctttcttggatacttcactgttagtgaagtgtaattgatttttgtatgttgattttgtatcctgaaactttactggattcgtttattcattctaacagtttttagtggcgtatttagggttttctgtatataggatgatgtcacctgcagagacaattttacttcttcctttctgatttggatgccttttatttcttttccttgcctaatttctgtggctaggatttctagtactatgttgaatgtaagtgataagtgtgggcatccttgtctgtccttgtcacattcagttgtatgtgcaatactggaaccatccagctcatagtcacgtaattcctctttgtgcagcctcatgtaaaatcacacccctattcacatttttttctgtctgtctcccacctctccaggtccctgccctgcaactttcagttacttcagactctcagaagactagcctctaaatacctcaatttatctgcactactgtggtctacttgaaattctcttccctcttctgcagtttgtaatggcattcaggccaaaaactgtagtagttttagggctctcttcatttgcttctctgctcctagggatcatagtgctgtgctatctgttgtccagcatctgacacagttggttttatattttgtctggttttctagttattaagcaggttaagtctggttcctgctgttctatatagcaggaagcaaaggttctctcatgaatttttagcataataacataagcgtggattccaaaaattcattacacagatcctggaaatctgtttactatgttttatacattctgtgaaagctggagaatatatatttgttttactatgtgtatcgcaaataaaatatcaatttcatgtgccagagaattgaatacattatcaaagggtcatttcataacgttataatcaccatccatcctgtaagtcctttgaaatttcttcttttctatggatctaacattgatcaatgacgaattcctaagcatctatattagttagcccagtgtttctcaaagtccaccgcatgtaaaaatcatctagggaatctttctaaaatgtggattctgatttagtaggtctggggtgaggtcttcccttttgcaattccagcaagttcccatgggatgctggtactggttaatggaagtcacttagagtagcaaggagcctgtttgcctagtatttacaatgagcacgttttgggtatcatcaaaacaagagaatctaaaaatgtatggtgtgggtggaaggttgtgttacttgatatttcaaaaagatcattgaaatcagaaaatctcagagatatgttggatttcatcacatttattctatggcttaatgttgttttattttgaatatataataagagagataccacaaatctttagctattaatatttagggatgttaatgtccttaattcatattgtctcaaatgtgattcattccctctataggtatactaaaacaggcattcatgcctacaaaaccatcttcctaactttctttcctctttttagtctcttcctgaaccagtgacagtggttctcaaacattttggtctgaggacccctttatggccttaaaaatgatcgaagagcttttatttatgaaggtaatacctgctaatacttgttgtaatctattaacattgagaaatgtaaaaatttttattaattcacttaaaatatcaataaacccattatttgctaatataaattgcactttttaatgaaaaataactttagtttctactgtgtgcttctgcattttgaaaatatgtctaggatacggtatgtatttaggagatattttctaaataaatgcatattcattttttaaaatgggacaaatgtagcatagacatatttttgctaacaatatccatatagttgcaaatttcacttttagaatttgctttcaaaaacaggttgtttattcttctttgttatgccttagttagtaaatcatatattataaaacttcttcaatgcaattggtctttggtcagccattgacataggaagagttagaaagagtccagggctccttggtactggctgtgactggataagtaggttgtggcttagtttgtgtttaggtgtcataactaggctaggtttgggtcccagaaagtgctagccttactgtaggagaggaagtggtattgctgggtgtgtcctcaggtcaggaagtgggacgagtgcagtatggaagcccaggggggtccttgtgactggaggaaaggtgaggtttccagtaaaggattcagaattcgggcatggtgcagcatgcctatagccccagctactcggggggctgaggtgggaggatcgcttgggaccaggagttcaaggttgcagtgagctgtcattgcgccactgcaccccagcctgggtgacggagtgagacctgtctcaaaaataaatacat

SEQ ID NO: 594 - DNA, 3642 bp, Homo sapiens
cctcagagggggctgggtggtcccagggcgcgaccttgggctgccagaagccacgctagggttggtcaaggctctcagtgcaaggtttcgacatagtcgttctgtgctgcgttctgcagttgtcagctgtcacctgcaaacctcagcagctccccttagggcgtggtgggcaaacagtgtcagtgatgcgtgtccacagcctcgggaaacacttcaggtccacgttttcgtatgttgtcactagatctcggcccttccgaccgaaaggcttcggcacctcacgcggtgggtcccatgcttgtcctgttaaatactcttgaactctattctgtcctgatactgaataatgcaagaatgggtggttccagttttcatccctataaaccgtacatctttgtgccagtaagtaagcatgaaacaaataagtacgtctgcgctaagcgaacgtaaaacacacgacatcagtcggttctcggggagcgatggagctagtcacgctgagcggctgtcactctgccattccggcctctggggaggtggaacgattcatagtcccctgtgtggaaaaggggcttgcctgggccttgtttggctttgctagtcagtaggtaggtacaggagaggtaccttcaaatagccttacatgctggtaagtgcagggaggctgggggctgtgtcccttcttaacccaagtggcgcagctcctccgtggagaaccaccattgatttgcctcttctccgaggctgttcatccctgactgttgagagaggaccctgctgcagcctccctgtggccagtagcacagttctcatcccttcccagtcctctctccggccatgtcaacagtgagaggtgggtcgtttccatcccctttggggggctgcggattcacccctgtgggaaatggcacctcatcatggtaggggctcttgttccctttcagctcccgattctcctgaaggggacgtccgatgatgatgtcccgtgtccgggctacctgtttgaagagattgctagtatccttccttgatgtccccgtgtagtggaaagagcggatggcagggtcccagagtggtgcaaagggttcctggggattctgctgtccctagggggatgcacggctcctttattattgtaaccaggcatgggtggggtctgaaggctgcaatactgatgacacaggggaccctagaagcccaggtgctcctgatggcagagcctccagtaggcgcctccagggagcgtgaactgagaggccccatggcctggtctccctgcggcctggcgcagccctcatcatctcgcccttccctaacccgagcgtgccgcagaaatctcccacgagtctccgggcagcagccagtgcctgctggagtacctcctgagccgcctgcacagcagctccggccacgggaagctcaaggtgctgaagatcctgctctatctgtgcagccacggctcctccttcttcctgctcatcctcaaacgcaactctgccttcatccaggaagctgcagcttttgcagggcccccagatcctctgcacgggaacagcttgtaccagaaggttcgcgcggccgcgcaggacttggggagcaccctgttctcggacaccgtgttgccgctggctccctcccagcctctggggaccccgcctgccacaggcatgggctcccaggccaggccgcacagcaccctccagggtttcggctacagcaaggaacacggccgcacgggctcggcaggcgaagccttcctctccaccatccagaaggccgcagaggtggtggccagcgccatgcgccccgggcccgagagtcccagtacccggaggctcctgccgcggggtgacacctaccagcctgccatgatgccttcagccagccacggtcccccaaccctggggaacctactccccggggccattccaggtccccgagctgtgaggcatcagcctgggcaggccggagggggctgggatgagctggacagcggccccagctctcagaattcctcccagaacagtgacctgagcagggtctcggactcgggcagtcattccggcagcgacagccattcaggggccagccgggagccgggtgacctggcagaaagggtcgaggtggtggccctgagtgactgtcagcaggagttgagcttggtgaggactgtgactcggggaccacgcgccttcctgagccgcgaggaggcacagcacttcatcaaagcgtgtggactgctcaactgtgaggccgtgctgcagctgctgacctgccacctgcgtgggaccagtgaatgcacgcagctgagggcgctgtgtgccatcgcctccctggggagcagcgacctcctcccccaggagcacatcctcctccgcacccggccgtggctgcaggagctcagcatgggcagcccgggacctgtgaccaacaaggccaccaagatcctgaggcactttgaggcctcctgtgggcagctgtcccctgcccggggcacctcagctgagcctggccccacagccgccctcccaggcccatctgacctgctgaccgacgctgtgcctctccctgggagccaggtcttcctgcagcctctgagttcaaccccggtctcgtcccggagccctgctccctcatctgggatgccgtccagccctgtgcccaccccacccccagatgcctcccccattccagcccccggagaccccagcgaggccgaggccagactggcagaaagcaggcggtggagacctgaacggatcccagggggcacggacagcccaaagagaggccccagcagctgtgcgtggagccgcgactccttgtttgctggcatggagctggtggcctgtccccgcctggtgggggctggggctgctgcgggagagtcctgtcctgatgctccccgcgccccccaaacatcgtcccagaggacagcagccaaagagcctcctggctcagagccgtcagctttcgcgttcctgaacgcctgacccgatggcctggccctggagtcttcagcttcagctgctgtctggggcggtctgtgcttcctgagcagcctcaaccgtagctgctacagtctccaggcagcttgacttgagaggacgaccctagggctacctcagtttcccccatctcctctgccagaggctctggctatttggacttgaatccctacgagggatggcaggtggcagggcttcagaaatgtcgatctcagggctctcagggggcagtccctgcctgtcttgccctcagacatgaggtttcttgtatgaatgcggaagcgactaccaggttccttatttcattttgatctcagctccctccttccccaggaggtcatgagcagcaacaagccactgctcccccgtcccatcggggtgggctaggtgctgaggctgggtttggtgcatgtgggttgagggtgtcttgtccgggctgccttgtgctgtctggcctgaggccatttcaagtctcagatccctacgtgatccttccctggctctcacctgctcctttaggctgtaattgcttcctacacacgaagcctctgattggagcctctggtccatctcagaaaaaccttccaagagcgctggggtttatgctttctgaataaacactactgtttacatg

SEQ ID NO: 595 - DNA, 5277 bp, Homo sapiens
aagacccccaagctcacagccattccttgctagagaaacaaagcagcatattatgtgattttcagaggaaataaatggaaacatacaacgtcatgtcagagggacgtgggacacataggtaaactgaggcatggaaagaaagcccgtccctgtgtgaggttagagagccagggcaggatctttccctgaacgaaactctttgcatgcattcctgcccatccacctcttcccttttaaaaacattttcttcaagaattgaatggccacataatttcttattctaaaataagacagaaagacagtgccattcccatgctctggggtaatttccattttaaatacgcaatttctcctcttttaatagaagtcagatttcttttatctgtaattaaatccagaatatggttttttttaaggtcctcgtggagttttgactttactgttctgaaaatgaataagagttctgagcgtcagtttagtgaacaactcaactcattatccgctggttgtgaaatacaaaaccttggtctgacccgtgggggccgtgtggtggtggcagcccctgccctccccccgggtctgatggctccatctgccccgccagccactgtctttctggccgcagcccgttagcccagggccctttcagcactgacctgagacttggctctgacttggtcagatgaccatgtgaacacagctgcttctggaggcccatattccgcaaaccatgcccctgctcactgcaggattctgcacgttgcattttggagtaagtcttcggtagaccttacaggactcccccatgatcttatgtccttggttttcatgaagggtgcgaggtaagaaactcattgagaaaactcacctgaagctgctgaggaggctccgccaagtctctcagccaggacacgcctgagtgcatcttggggcccatgaccaggagagacgttggtgttcctggtgaactgcatggttcctgccaccagacagtcagagccactgccatgtcaggcgtttctctcgtcccgagtcggcaatctcactcccagattttgtgctcacctgcttagcttctctcacccagaagtatgccagattacagtcaattaccagatgcgcagcaccatctttctgcctttcttcccctggattacttgtttctcagccttggtctttattaagctgagtgtttatgcctgcgctgcctgcagcccctttggaagcaggtgaagcatccatcatccataaaattggccactctgtgccccatccccaggaggccctggcactcctttccccagggacacccgacagcccagcagtcatcacagagccacgctgtgacttggaggagaatggggttgagccaggagtcagttctgttgcggggagggtgaccctttctcttccctcccctgcaagtagaaaatgtcccccccaccagtcagcttctggaaatcactggcacagggggggctttggtgagtgggagatgacagaggccctgaggagaagaaaaaggagcatctggggaggaaggagtccttggcgtccctcagacacagtgtgtagatggctctctttttagcagccagatcccaggaaacagctggacaggaaaccatggggcagtgtccggcgtgaccagtgtgtccaagcaacctcacagcactgggctccccaggctcccccggctcccccatggctgtgaccccagtctctggccccacagctccctcatgcacctcccatgctctcccgggggctgtggctgtcctgggcatctcgtcttggtcgtctgggtaacaggtcctgagagacgtccccaggagaatgctgtgcatgtcccgggctctccagctgcttctgagccctggacttggacacccagcacatgttcaggttgccagagtcaatgcggttaaaccccaacttgctcgggatgcctgtttgttagatgaactatgtggaattcaccccaggtttctctgtcctcgtatgtgggaaggtttgtacttagaggctgagacctcgtcgcctctagcagcaggcacaggcccctgcatggccacattctgctgagatggtccctgctggtggaattgtggtatctcactgagcatgtgtgttgtcttgctgtatgagcccgtgtctcactgtgtgtgtgagtgattgtatgtagtgtgtgtctctcactgagtgtgtctcactttctgagcacatacatatgtgtgtaagtgtgtagaatggtcattagctaattggtattaggttttgtcgtggttgccttctggaaactctgtagggcaccccattccctgacctgctgtgtccagaattggtgggttcttggtctcactgacttcaagaataaagccacggacccttgcagtgagtgttacagttcttaaaggcggtgtgtcccgagtttgttccttctaatgtttggatgtattcagattttcttctttctggtgggttcgtggtctcgctggcctcaggagtgaagctgcagaccttcatggtgagtgttacagctcataaaggcagtgcagacccaaagagtgagcagcagcaagatttactgcaaagagcagaagaacaaagcttccacaatgtgaaaggggacccaagtgggttgccactgctggctcgggcagcctgcttttttccccttatctggccccacccacatcctgctgattggtctattttacagagagctgattggtctgttttacagagagctgattggtcttttttgacagggtgctgattggtgcatttacaatccctgagctagacactgagtgctgattggtgtatttataaaccttgagctagacacagagtgctgattggtgtgtttacaaaccattagctagacacaagagtgctgattggtgtatttacagtcccttagctagacataaatgttctccaagtccccatcagattagctaaatacagagcactaaatgttgtatttacaaaccttgagctagacacagagtgctgattggtgtatttacaaaccttagctagacacagagtgctgattggagtatttacaaccccttagctagagataaatgttctccaagtcctcactagactcaggagcccaactggcttcacctagtggatcctgcaccagggccgcaggcggagctgcctgccagtcgtgcaccgtgagcccacactcctcagcctttgggcggtcaatgggactgggcgccgcggagcagggggcggcgcttgtcggggaggctcaggccgcacaggagcccatggcgaaggggaggctcaggcatggtgggctgcagatcccgcgccctgccccatggggaggcagctgaggcccagcaagaatttgagcgcagtgctggtgggctggcactgctgggggaaccggcacaccctccgcagctgctggcctgggtgctaagcccctcactgcctggggccagcagcgctggctggcagctccgagtgtggggcctgccgagcccacgcccacccagaactcgtgctggcccgtgagcaccacgcacagccccagttcctgcctgtgcctctccctccacacctccccacaagcagagggagccggctcaggccttggccagcccagagaggggctcccatggtgcagcagtgagctgaagggctcctcaagcagggccagagtgggcgccaaggccaaggaggtgctgagagtgagcgagggctgcaagggctgccagcacgccatcacctttcactgccactgacagtacctgggaaactgcagagccccacacacatgtgcactgactgtaacagcaggaatacagccagcacctgcagccctggctggtgtccacaggactgagtttcagtcccatagccttgacttacctgtgatgttggacacgttggtctcctccagccttgttttctccatctgtgaactgggccaacgctcctctgctgtgagctgatgcgaagccacctcagataacctctgtgctcagtgctctgtgccatggccgtcgcccgtcgctttactgaggctattgcagaagtcagcgtgggctctgggcttccgcaccaaggtgcgagatgctcaccccgtggaatgaggttgctctgacagcaggaccatggccgtgctcatgcccagctccgccttcgtgggacaccacgcatgggcactccctctggttggggaaaaactgtcatactggattgtgttccttttttgccttaaattattagctgccatttttgctcatcaaaaaagtggcattaggcacttccacatggatcgaagggccctgtcactagtgggttcctgctcagagcgtcttgtgtgatgtttcatcttgatgctttgacaggttaacaaccttctcatcaggatcattgttaggtccttcaggtgtggtcctggggaccggtgatgaaggacacccccattgcatctcagctacggctcttggaccatgggcagcggtgctgaaatgacaatcctggagccacagccttcctccgtccacagccagtgtgctcacggacgacacaagtaattgtggacaccactttgccaccacgactgtttatgctgcagccccaggggccacagcagcagctggtctctcctcaatgatggttcagcgccgagtgcattggcggcacggtccatttctctgccgagcgcttgtgttgtgcctggggtctgagccacagcggcaggtggatgggagagattccctcggaacaggtgtctggagcaggtgggttgcggggccactgtcaagcacgtggggactgtgcctgtggcttcatccctgcgtggactcagtcctccccttgttttaagtggtccctgggtcctttgtgcacatcagtaattgcagaggcgggacgcgcactctctgagcggagcagcttggctgggcttgtccctttaatttgcgatgcatcacaacaaatgattgtaatcagtcaccgcccgacggcggcctgctcttccatgaccacccttcagtgagccggcagctgagcgacacggacaaagccgcctggctcagggttggggaaaacgctctttagtcagtagagttaaaccacctgatttattccatattgtggaaggtcagtctgatttaaggaaatgtcagtttgatagaatgttttgaaagaaatgcagctcataaatactgcgctgaaagctcagccttgatacaagctcacttggtaaaataacttaataaaggaaactttcgattc

SEQ ID NO: 596 - DNA, 4204 bp, Homo sapiens
agaggaagaggccggctcatgaggtcatcactagcaaaaatgtctgtgttctgtgatgtcatcacagggacaaagcctcgttcccatgaggtcatcacagaggaagaggccggcccgtgaggtcagcgctggaggccatgtccatgttctatggtgtcctcagaggcttccttcttgtggtataataacagagacgacgccttgttccatgacattccttcctgtggtgtcactgcagagacaatctcacctggatgatgtcatctctaactccaaggcctcttttggcatcatcgccatggggaagatattttctccctgtgtctttgcagcagagaagatgcctctgtcctatgatgtcatcattacagacaaagccatcttcctgggacacgtcgcaggggaaaatgcctcaccgattgtgtcctcactagacataaggtccccttttcacaacatcatcacagggaccctgcctccttcctgtgatgccatcaccagagaaggtgccttgccctatgacgtcatcagagggaccgtgcctcttcctgtgatgtcatcaccagagatgaccacccactctgggacctctccaggaggaggtcccttctgtgatgtcgcccagatgctatgtgctctgagatggcacaaagagatgcctccactgctgccaccatgttgtagaaggcagggcaggcccagagtccaggaccaccccagggaagatgccagagagcagagaggggccctgtcctgagatgttgtctgaaggaagcatcgctggggagccgcccatgtggagggcctcctccagagatgatggtctgtgtaggctgttggcagtgacacccctacccccaatgctgtgatggcatcaccagagcttcctcctcagaggcactgcccactctggaaggccatcggtattggtggtgtcaccagagttactgccttgtcccaccatgacttagcttggttgctccctccccagactccagggacatgtccagcaggatctctgccagaccctctgaggggaaatggggccttggatcccacatctgtgccatgactcctgggagacaggacctccagatggccttctgctcccaggaggccactctggatcaccaggatcctggagttctggcactcataggtgtcccatagcctggcctcacttttctttctgccatatctagagacaatcacctctgtcaacaaagtcctagccttctactggggggaggtgcttggggtacacctactcttgccctcactgacactgtcagcatcacacaacacccgccactcatgatggcaccacacccggggtcaagtgttacccatgtctgaggatggaatccttccccaggattacctatgacccacaactatggtatcatcttcttccaggatttaccatgactaatggtgtcaccatctgccaagactccccatagccaatggtgtcaccatcctccatgattcctcacaaccatggtgtcatcatctttcaggagccaccacagctgacggtgtcatcatctcctagattccaccatgaccagtgatgacattaccttccagaatccactacacctgacagagacatcctctactgaaatccactaggactgatgattccaccatttcccataatccctcatgattttggtgtcatcacctcccaagacccatgatgcccaatagtgtcatcatcatttgcagggatgcatggtgtcatcatctccagggatccacttcaaccatgtgccaccacctcccaggatttcattcaaacatgtgccactacctcccagtatccacttcaactatggtgttatcacctgccaggatccacgagagccaatgctgtcaccatccactaggatccaccataaccctggtgtcatcatctcctgtgatccatgaggtccagtgctgtcaccatccactaggatccaccatgaccctggtgtcatcatctcctgtgatccatgaggtccagtgctgtcaccatccactaggatccaccataaccctggtgtcatcatctcccaggatccatgaggtccagtgctgtctgtcaccatccactagtatccaccataaccctggtgtcatcttctcccaggatccatgaggtccagtgctgtcaccatccactaggatccgccataaccctggtgtcatcatccgtgatccatgaggtccagtgctgtcaccatccactaggatccaccataaccctggtgtcatcatctcccaggatccatgaggtccagtgttgtcaccatctactaggatccaccatgaccctggtgttatcatctcccaggatccatgaggtccagtgttgtcaccatctattaggatccaccatgaccctggtgttatcatctcccaggatccatgaggtccagtgctgtcaccacccactaggatccaccataaccctggtgtcatcccagagtccactgtaaccatgtgccatcatcccccaagagccatcatcttaggagccaagtaccgtgacgggctgtatttcagttgtcctctggggccgcatggtacttacagttgttcacttaaggggaaccagcacaacaggccatattcccgtttccactaaaaggacaggggtggggccagctgtccccctctgaagacttcacccctactctggccctccttatgtcactgcctcactcctgaccgaggatgatgcctgcatcaatcccaccacagatgtggcctcagccaacctcaccttaccccccggtgaggcacccaggccccccctgacagcagcgctgtccctcacccagccatctgattggtgacagggtcaacccagcaacctctcattatcaccagagaggaagcatttcaaccctcaggtgacgccactgccccctgcccaatccctgtcacttgggcccctaccaggatcagcactccactggccccggccaaattctcctcagagatccctgacccccgcgggatgggtcaaagctggtgaccgactggggccttcagtgctgtcttctgctggcctcatcctgcagcagggacactggagagcaatggtccctgccagcacatctgcggggaccaggggtgctccttcacctccctccctaacaccttaacacccggggagcctccgggggtggcaggaagtccccagcacccaatgcacaatcttccctcaattctctttgtacatagccatgttgcgggggcggccattcccccactcttaaagggctacacgcccctcccccagcccctagggcgaggtggggggggcctcttcttcctcccctgggccgtccccctccctcttatgtctccccgcaaacactggcacctcacactccttcttgtcaggagcttggggcagacaactggcccttggttcccaccacactgaggaaatgggggttacccaaatccacctgggccctggtgccagtttttcaaccccacggcttctagctgctctgaggggctcctcccatcccttccagggcctccccagccccgcactgctcaggccaactgtgacttccccagaaaggagccagcttgagcacccaccccctcccagccccctcccctctgctcaacacctccgcggaacactcagctttctccagctgccgggatttgggggtctgggcctttcagcttttttatcccccctccactagctctagcccagcctggattccagggatcccacccctagccctgtccctattcagttggcacaggctgcctgaccctggggccttgatttgatctcaaataagccatagaggagagaggtcttgaggggtgggagcaggtgtgtactgacaattcccctccacatgtcttgagctgggacctcgtcatctgagacttccccatgccccaacaaatgcaaatgcacacaaacccatgcatacacaagcacacacacacaggcatctccccgtctggttgggggagcatgggagggggcacttcacagggagaagataaatagttccacacctgaagaccctccaacagcttctgcctccctcctcatcacttcctctctccaccccctctccaacactggccccttcccctaattaattccctggtgaggacagccagaggagctgcgacttggtattttttggaataaatagacattttcctg

SEQ ID NO: 597 - DNA, 4490 bp, Homo sapiens
aggtgctggaggagcgccagcggctgtggctggctgagctgaagcgcctgtatgtggagcggctgcacgaggtgacccagaaggctgagcgcagcgagcacaacctccagctgcagctgtttatggctcagcaggagcagcggcgcctgcgcaaggagctgcgggctcagcagggcctggctccggagcctcgggcccccggcaccctcccagaggctgaccccagtgcacgaccagaggaggaagcccgatgggaggtgagagatgacacagggctccgagactctcccatctccattgccggtcccttcttctgcctgccccctcccaaaccggctccccacaccctactttgcttgcgtcctccccatcccccaggtgtgccagaagacagcagagattagcctcttgaagcagcagctgcgtgaagcccaggcggaactggcccagaagctggcggagatcttcagtctgaagacacaacttcggggcagccgggcacaagcccaggctcaggacgcagagctggtccggctgcgcgaggctgtgcgcagcctgcaggagcaggcccctcgggaggaagccccaggcagctgtgagactgatgactgcaagagcaggggcctgctaggggaggcaggaggcagcgaggccagagacagtgctgagcagctgcgggctgagctgctgcaggagcgacttcggggccaggagcaggcgctgcgctttgagcaggagcggcggacttggcaggaggagaaggagcgcgtgctgcgctaccagcgggagatccagggagggtacatggacatgtaccgccgcaaccaggcactggagcaggaactgcgggcactgcgggagccccccacaccctggagtccccggctcgagtcctccaagatctgaggccagcagagcgagctgacagcagcaacactgtcagaaggtgccctgagacggccggctcagccttcccttgcactggttggggtggaacctgcagaggccagcccggggctggggaggcgcaaggagaggagggatccagtggggccgtgggctgggtagggtgccttggcaggagccaggacaaggccctcctggcagaggagcacctaggcagggcccagccctgcttcctggagtggatgtggcccagagaaggaggctgggggatcaccagccccaaggtcccgaagggcaggtcagagggagagaggctggagacctgggctggggccttcctccagggaaggaggctggggtgggaacactggcctcccccagaataaaaccatgttttctaccagaggctcagaatacgctgagcctgtgaccagaggatgatggatggtcgggattgaggctgttgacctgggcagtagctcctcccacggccagtggtcagtgggagggtgtgccctgcgcctgtctgcatggccactgggcatgtgtgttgggagcagaggagtcctactccttgcctcagccccacacggttccttagctgccgtgtgggctgaaattcctttctttagcaccagtggagttttcagaaggaacaacaccagggaatgccaaaaaaacaaagggcaagtcaaccaaggcattttgagaacatgaaatgtcttcttggtgggaaggctgggccccaggagtatccacaggctcaggccatgcccctccccgcacccacctcctgtctccctccctccctccataggagtggggggcccctagaagtgctctgcctcattccctgttcgtaggaaggtgcaggagaggaggtgggcaagcttatgggtttcttggtaaagagcctttaccacagcaaggaatgggaacatttccccatcagcaacggggctctagggcattattaagtaggggtgaaatatgattgatttgcattctggaaagctctcccaggaggaagcattccccaccccaccttgcctctgtcctgcgctgggctccaggacggtcagtcctcccagatccctgctctcagctaaggctggtccctaaaacccacacctgcctttggtctctcagaggcctggcttgccctctgggcctttgctcccccgctgggtgcccggcctggaacacaggttctgtctggctgtgtgagtggcgtctctcccttcctttgagggaagctcagctttcttacgcgctcatcgttggacaggctgccatgcattgcgtgcttactgggcgccaggtgctgtgctgggcccttgtgagtgtgggggcacaggctgaattagatgagctcctgccgcagggggccctgcacactgatgtcagctcaccagtctcttccctgacagggcagctcagggaacttctgagaagttatctgcagagagccccacctcactccctttggctaccctggccgtgcctggcagcccctcaggccccacaggtgggtcctggttgtgaagtggagttagtgcacatggatgtcaggggacgggtgtgaggcatgagctgggggggccccctttttcagggcagagaatgaggcgtgtgcactgtctgctgtggggatggtgtgtttatggccatgtaagtggcaggtgtgtgtaaagatgtgcttgtgggtggtgggtgtgtccgagggggtgtgtttgggagcctggcctccaaaagccagtgtctgggttggagacagtgcaggccccttcttggccccaccctctaccccattccttcctgtcagccccagtctgtcttggcactggccaggcttgggtggagcctgtgtcccagacagatcccctaggcctatctgagacccatgcaggcccacacctgagctcctgtctgcctgaggagggaaagggggagtggccaggtcaggcaggccagtcgtctacacacccccttggtacccattcccatttcacaaactcctccaaaccccaaaccccaaacggaaatctctgggacaatggctcctccagagggcccctcagagccaggtgctggccagatgccttgatcacagcctccatggccaggggcctgtcaagccaggggcccacacacctggtgccagggtccaccttggtataccagctcggcagaacagttccccacccagcgattagggagctgggctggccagtacaaccagtggggagtgggtgggaggcaccaaaacttggcagctgtgccagaaaccaaagccaggcccagatgtagggggagggcacgagagctgaacctgagcctggggcgtctcggagctggatccccgtcagctcatccaggctggacaaaccagttcctgggtcccccagccggctgggtggctctggggccaaccgaccacaggtgtcactgatcacaggtgtcaccgtagtggctaccacctcagggcagcccctccctccagctggcggggcctcagcttcccagctgccctggcttagccttccctgcagcccctccccaacaggcttggtccgggcagcctgctctgcggaaggtggctgcctcctggtgctgggctccctgcctctggggcctccagtccttcactcagtgtcatcccttccagcagctccctgggcctcttggtccatcccttcaggcttctgacacactagtggcctcgagtcactgatagtggtgcctcctccttaccttggcaagcccttgtagccctctgagccctcatcctgcaggcagagcccctcagtgctctgagaaacctgccctgaactcaccgcctcccctgcctgggcactccctcctccctgcgcccacagcccccatgccaatctccgtcagctctttctgtgctgctgtaattgttggtttgcctgtctcctttgagctgtgggcattgccggggtagggtggtgtcttcactacagctccagaaggcactggtgggatgtggagtcaggagcaaccagagaccccccaatactagaatgggtttgagcttggggtggggtggatggggaagacttactctgaatgttcgttcaccatccgtgggcaccaggtctgtgccaagcacagggactccaggggcagctgccattcgttccagtgatgtatttggggccttctcaggtgaggaagccaaggtggccaaggccctcggtcccctgccctgatagggcttacctgtgggtgggggagggagaccacacatgtcagaggtagtgaaggccgctccaaatagtgactggggccaggcaggcggaaaagagaacagaagagaatccagaagtgttcagacagaactagggacaacagaggggcctccatggtggcatgggtcagcagagcatggagcaggcagaggaagcctatctgtggggctgggtacatttctctgagactcacggaatgtaagtgttgaggtttctgcaaagagggcgcaggccctgcagtgacggttcagatattgataacccatcccccttggcaggtgggggcttaggcatccatattggattcag

SEQ ID NO: 598 - DNA, 4949 bp, Homo sapiens
ggcgcgctatggaccccgcctcgcggagacgcctggctcgggccttgtccccagtgagcggctggagcggccgcggggtcgcagagcctccgggaccccgaggaagggcgcccctcggagttgcccgaggccgggcccggcgtccactcgccactcgcctcgcccctccccggccccgcaccgccctccaccccgcctccttcgggttccttctgcgtccggcagagcctgcgcgcctcacccggacggccacggactcgcagcctcggcgaggacgctgcctgcgtcccgactgcctggacctccccgcgtggctcccggcgaagcccagcagtcggagggtgccaggtccgcctgacgcgcccctccccacgggaagaacggggcgggggtccaggagggacgtaagccgggctcccccggcgtgttgatccgaacccgcgcgggaaaacttgcgcaaaccaaaggagggaagagtcaggcagcccccagccccccagggaggcccaggtgaaaaacagacgccggcctcgcctctcccggtgcggatgatcccggcactcccacccccgcccctgctgccccgagttcggctccctcagccccacatcctctctggtcgtctaagtggactgcagctgctcagggagcatgtcgcgaaggatagggaaggacagggggtctgcttccccagccgccctccagacccccagggctggtaggggccggcaaccctatgcccccacctggcctgctgcaggtgaggggggcacaccagggtaacacaggagcgggagggggagaaagcctggctagagcatccacctcataggcaccttccttgtgtccagggtgcagatgccagggctctgaggccctgaggtcctgtctggggcgagggggcttcctccatccactgcatccactgcccggctgagtctggaggccactgagcaagcagaccctccaaagccaggcacgctcaggccctcacatggtcacggtgcttatgctctgggccagcctggattgctcatccctagctgagattgggattcacagggtcttccagttcccccttttctttctctactgattgagaaacacagagtcctttgattgctctgggacctggccattgcgtgttccctgcagccttgaacccagttcaatggggccgggcacattccctgataaagctgtttaggttgcttgaaaacacgatcaaccctattgctaaacacgtagaaactggccctgccctgagcccaatcccttaaactctcatctaagctccatagccagagtcccttgctgcaaatgtacctgggtggagcatcccttgcctcatcatcgatcccaagaaagctgaagctccatgtgaaaatttccggaagaaatgctctggactgatcaccctggcgtttagggcttctttccttggaatcccaaccaattccatcgcgggactgtttggggaagtcttttgaggcaactcccttgctgccacttttggggcaactctagcctcctcatatttggccagatagaacagttccaagctgtaaatgtttccaggaaaaaatctcaactacaaagacactttcaaggtgctgcatttccaacagcactctccgtatccgagtggacagcccagagcaatggtgcttccaatccacagagcccctccacaggtcccttgccatctgcagacacccacatctcaagacggggtttctccatgttgaggctggtctcgaactcctgacctcaggtgatctgcctgcctcagcctcccaaagtgctgggattacaggcgtgaaccaccgcgcccggcctaggatttcctcctttgacgatgaatagttctccactgtagtctcactctttctcccaggctggagtgaagtggcgtgctctcagctcactgcaacctccactcgccgctccactccctggttcaggcagttctcctgcctcagcctcccaagtagctgggattacagtccggctctgtcgtccaggctggagtgcgatggtgccatctcggctcactgcaacctccgacgcccgggttcaagcgattctcctgcctcagcctcccgagtagctggaactgcagccagagacctccacggccggcaacgcccctgcgcaaggcctcacggctccaggctgttggaggtacctgcccactcaacctgggctggctgttggaggtacctgcccactcaacctggcgggctgtgcgtggcttgtgctttgggctggatcccacgctcgccatgggatctgcactcggactgcagctgggccgggcatgccatgacctgcttccaccttgggtgccgacgtctggatgagaggaacatggtggcgcctgaaaaatctggagacaccagaaaccctggatccccaaaggaagtgttattcccgctgtccgtgctgtgggtgtgaagatgtgtgctgcacatcccagtttccagcacaggacaaagactcagagaggcacctgccaggagtctcaggtgatggaacccagtggcgggcatgtgggcagctgccccaggtggaagggatcgtggcacagctcttggttccccaggctggccctgaccttcgtgctttcctgcccatggcccagacttccgagctccatgttggggatgctcagggacaacccttcagcctcccccaccatgtcccggctactgcccaggattcttgttctctggagggtggatccagccctccccatcttggtgccctaccagggccaggcttcccatggctctttctgcagctcctggcacagactgtggggcgcacagcccggggagcagtgggccttggaggggccaggtctgcatgttcccacccccatcatggagtttgacacgccagtgggcaggtaactcaatcccccctcaccttctcttcatctgttaggggtgacagggtgctccccgtggggccaagaggatgcagcacccccaccggctacccttccggccacacccttctctcctggcccaccttctgagctggcagggcttccttcctggcttctgctgggcagtgtattagggtcctctagagagacaaaaccaataatggagtttaggagaggggatttttatttgtttgagacagagtcttgccctgtcacccaggctggagtgcagtggctcgatctcggctcactgcaacctctacctcccaggtcgaagtgattctcctgcttcagcctcccgagtagctgggattacaggcacccagcaccacacccagctactttttgtacttttagtagagacgggggtctcaccatgttggccaggctggtcttgaactcctgacctcaggtgatccacctacctctgcctcccaaaatgctgagattacaggggagagctaccgcgcccggccaggagaggggatttattaggcgaactggcccacacacttatggaggctgagaagtcctcccataggctgtctgcaagctggagacctagagaagctgtaagtgaggctcagtccaggtaagaaggtggttgaaccaaggaagccagtggtgtaactctcattctgaggctgactggccgagagccctgggaggcctctgtggcaagcctgagtccaaaggccgaagaacctggagtcctgatgtccaagggcaggagatgggtgtctccctccagaaaagagaatttgcttgtcttctccctttgtgttccatctgggtccccaaccaagtggatgtgcctgcccacgctgagggcagatcttcactgagtccactgaaaacatcctcacacactcagaaacaatgcttcgccagctgccaagtacagtgtgtgtgccttggtcccagctactcaggaggctggggtgggagaaacgcttgagcctgggagctggaggctgcagtgagccatgattgtgccattgcactccaggctggctgacagagagatcctgcctcaaaaaaagagatagatagatagatagatagagctccaccagccatctaggctttttttttttagacagggtgtcactctgtcagccaggttggagtgccgtggtgctgtcatggctcgctgcagccttgacttcccaggctcaacccatcctcccacctcagcctcctgagtagctgggactacagcgtacaggcacagaccacgatacctgacttatttttaaattttttgtagagaagtttcaccgtgttgcccaagctggtctcaaactcctgggcttaagcaaacctcccacctcggcctcccaaagtgatgggattacaggcaggagacatggcagccagctaaggctccctgtaccctgttagtcggctttacagcacctggaattgaccgccacaggccggcccaggtcttcctgcagaacccttggggaggcgctgtgctcccgagcccgggggtgggtgggtttatctgacccgtcctcaggaccgccatgcgggtggggtggtgcagggtgcccccccacagggtgcccccaggggaggcacccccacacggtgcccggcagtcctgcctgcctggagagctttctctgcagaggagactccatgatcccagcctccatcctggaatctgagagaaggaacagaaaacggaaggatgatccagcctctacactcacaaacgaacttcttgtttgaagacataacctttttattcccaagtcttcccccaacacccagctttactgaggtataaatgacaaataaaacttgtatacaggaggctgaggcaggagaattgcttgaacccagagacagaggttgtagtgagccgagatcgagccattgcactccagcctgggcgaaagagtgagactgtcttaaaacaaaacttgtatatatttttggtgtacaacatgattcaataaacatctacactgtgaaatgataccac

SEQ ID NO: 599 - DNA, 4350 bp, Homo sapiens
gctgaaggaagctacaatcatccaagtgggaagtaatgtctaccgatgttctgatttaagtgaatgaaggtcttctttccacctcgggaaatcttgagggttatgtaacagcagctttgaaaggcttgtgagatgtactttgtgctagtccatctcaaatcttcaccggctgtaccaagaacagaaaaaaaaaaggaatttgagacgggatctcagcatgtttgccaggatggtctcagtctcttgacctcgtgatccgcctaccttggcctcccaaagtgttggaattacaggtgtgagccactgcgcccagccatcagaacaaaatatacagctggatgtttgtcacaattctaatgtccctgcaaagatgagatgcatgaatcacacagcaatctcatcaaaaagataagaaaattgagactcagagcatttaagcagccagcctggactcacagagatttaagtctcagagccagcactcaggatgagtgccaatggaagcctgtccttggagtccagaatgaacgtcagaagcaacccagccacagcaggagactgtccatgaatgtcatctggctgaacctaaagcacctctggatttagatgcactccttcaaggaccatgggttctgcaacagtaccccctctccattgttccagctctgactcagatgggccctccttgatggcactcccagcagcacagccttagcactgggagcatgacttcggcaacttcacctatcattctgaaatgggaccccaaaagtttggaaatccggacgctaacagtggaaaggctgttggagccacttgttacacaggtgactacacttgtcaacacaagcaacaaaggcccatctggtaaaaagaaagggaggtcaaagaaagcccatgtactagctgcctctgtagagcaagccactcagaatttcctggaaaagggtgaacagatcgctaaggagagtcaagatctcaaagaagagttggtggctgctgtagaggatgtgcgcaaacaaggtgagacgatgcggatcgcctcctccgagtttgcagatgacccttgctcgtcggtaaagcgcggcaccatggtacgggcggcaagggctttgctctccgcggtgacacgcttactcatcctggcggacatggcagatgtcatgagacttttatcccatctgaaaattgtggaagaggccctggaagctgtcaaaaatgctacaaatgagcaagaccttgcaaaccgttttaaagagtttgggaaagagatggtgaaacttaactatgtagcagcaagaagacaacaggagctgaaggatcctcactgtcgggatgagatggcagccgcccgaggggctctgaagaagaatgccacaatgctgtacacggcctctcaagcatttctccgccacccagatgtcgccgctacgagagccaaccgagattatgtgttcaaacaagtccaggaggccatcgccggcatctccaatgctgctcaagctacctcgcccactgacgaagccaagggccacacgggcatcggcgagctggctgcggctcttaatgagtttgacaataagattatcctggaccccatgacgttcagcgaggccaggttccggccgtccctggaggagaggctggagagcatcatcagcggcgcagcgctgatggccgactcctcctgcacgcgagacgaccggcgcgagaggatcgtggcggagtgcaacgccgtgcggcaggcgctccaggacctgctcagcgagtacatgaataatactggaaggaaagaaaaaggagatcctctcaacattgcgattgataagatgactaagaaaacaagagatctaaggagacagcttcggaaagcagtgatggatcacatatctgactctttcctggaaaccaatgttcctttgctagttctcattgaggctgcaaagagcggaaatgaaaaggaagtgaaagaatatgcccaagttttccgtgagcatgccaacaaactggtagaggttgccaatttggcctgttccatctccaacaatgaagaaggggtgaaattagttcggatggcagccacccagattgacagcctgtgtccccaggtcatcaatgccgctctgacactggctgcccggccacagagcaaagttgctcaggataacatggacgtcttcaaagaccagtgggagaagcaggtccgagtgttgacagaggccgtggatgacatcacctcagtggatgacttcctctctgtctcagaaaatcacatcttggaggatgtgaacaagtgtgtgatagccctccaagagggcgatgtggacactctggaccggactgcaggggccatcaggggccgggcagctcgagtcatacacatcatcaatgctgagatggagaactatgaagctggggtttatactgagaaggtgttggaagctacaaaattgctttctgaaacagtgatgccacgcttcgctgaacaagtagaggttgccattgaagccctgagtgccaacgttcctcaaccgtttgaggagaatgagttcatcgatgcctctcgcctggtgtatgatggcgttcgggacatcagaaaggctgtgctgatgatcaggaccccagaagaactagaggatgattctgactttgagcaggaagattatgatgtgcgtagcaggacaagtgttcagactgaggatgaccagctcattgcagggcagagcgcacgggccatcatggcgcaactaccgcaggaggagaaggcaaaaatagctgagcaggtggagatattccatcaagagaaaagcaagctggatgcagaagtggccaaatgggacgacagcggcaatgatatcattgtactggccaagcagatgtgtatgatcatgatggaaatgacagacttcacaagaggcaaaggcccattgaaaaatacatctgatgtcattaatgctgccaagaaaattgccgaagcaggttctcgaatggacaaattagctcgtgctgtggctgatcagtgtcctgattcagcatgtaagcaggatttattagcctaccttcaacgaattgccttgtattgccatcagcttaatatctgcagcaaggtgaaggcagaagtgcagaatctgggaggagagctcattgtgtcagggctggacagtgccacatcgcttatccaggcagctaaaaacctgatgaatgctgttgtcctcacggtgaaagcatcctatgtggcctcaaccaaataccagaaggtctatgggacagcagctgtcaactcacctgttgtgtcttggaagatgaaggctccagagaagaagccccttgtgaagagagaaaagcctgaagaattccagacacgagttcgacgaggttctcagaagaaacacatttcgcctgtacaggctttaagtgaattcaaagcaatggattccttctaggacgataggttttaacaagaaagctttttctttcttttctttctttctttttctttttaattccatttttgtatgcatacctgccagctcgtatgcctctggcatggggaaattaagggaacagtgtctgtttgcatgtaagatgagatgagatcaatactactgatccatctgtagcctgggaaggagacaggacattcctgtactaaggtggcacagagctgtcctttgcaacattctcataaaattgggcacagagttcgcattggcgcaatatttatgggagtgggagggatggggaaaataaacttaactctacaaaagcaaactctaatgcatgcaagaatcattaggttggcaggtatatgcataagtgaaaaatctggaagtgtaatggtagaacataaaacttgtattgcttctgtttcagtgcaaaaatgtactagccaatacgcttaagtgtgtggcccatgaattgaacaatttaaccttgaagtctatatccgtgatattatgtcgatttttaactgaggggaaattaactagtccagcctaaaatgcttcttttaatctgcattctgtttcctcttctagttgtgccattactagtgatcatgtttttttcccccctttaatgaaaacaataaacatctatttgagacaattaaaatccttctgggggcactggaagcacaatacggtgtccaatcttgctttcatttttttttctttttaatttgaaccatgattttgctagaaatagaaggcccagtggtggaatattagagggaaggaaactgacaacgtgtgaaagttagaggcaaatacataggtgtagcttggagtgctggtatctaatataccattgtattcactaactaactcaaaataaacacatttaatcttg

SEQ ID NO: 600 - DNA, 4523 bp, Homo sapiens
atgttcaggctggaagactttagccggagaggatcagggacatgtaggtggcagattgggtgaggatcatggaagaactcactgagcagttggaggcaagagcaggggtctagctgctggtgaagacatccttaatcactggatgggggtaagccaagagtgaatcttattctagtgtatggagcagtgttaggaaatgttcagatagagctgtgtcttaaatggctcatttattcatatgttctttcaaacatttattcatttactcacaaatgcttactaagtacctgctaagtgtcactagtatgtgtcttagatatcgaaaagattctgcagctttcctcagtaaacatcgactctcagtcaatgttccttcatatgcagacatgaataaggaaggcgtgaattgaggtgtgaattaagaaagtgtcacagtcagatccttatgaataagaaaaatatagagtacagattttttcttaattgtattttttaactttttactatggtcgatttcaaattaataggaagtagaaaggataatataatgaaccctcatgtgcccattatcagcttcaacagtaccacctcacagccagttttgcttcatccaaatgcccacctgcttttctctcccacattattttgaagcaatcctagacatcatatcatttttttcattttatttttattttattttactttaagttctaggatacatgtgctgaaagtgcaggtttgttacataggtatacatgtgctgtggtggtttgctgcacctgtcaccccgtcatctaggttttaagctctacatgcattaggtatttgtcctaaggctctccctcccctttccccctacccctgatgatatcatatcattttatctgtagattttacagtaagtatctctacaagataaagcttatttctcaacctcgtttattgtctagtaagcagtacagattttttttctcttcgccttttttcagtgtggaattgtgggtaattttctctctgatttagaatccttgatgacattgaagtttatgaagaacagatttcattcaaactggaagagctggtcactatctcctctttcctgaattcttttgtgtttaagatgatctgggatggaattgtagagaacgccaagggtgagaccttggagctgttccagtctgtccacgggtggcttatggtgctgtacgagcgggactgccggcggcgcttcacccccgaggaccactggctgcgaaaggatctcaaacctagcgtgctcttccaagaactcgacagggacagaaaacgggcacagttgatcctgcagtacatcccacatgtcatccctcacaaaaacagagttctactgtttcgaaccatggttaccaaggagaaggagaaactggggctggtggaaaccagctctgcctccccgcatgtcactcacatcaccatccgccggtccaggatgctggaggacggctacgagcagcttaggcagctctcccagcacgccatgaagggggtcatccgtgtgaagtttgtcaatgacctcggggtggacgaagcagggattgatcaagacggtgtttttaaggagttcttggaagagatcatcaagagagtttttgacccagcactcaatctgttcaagacaaccagtggggatgagaggctgtacccctcacccacatcctacatccatgagaattacctgcagctcttcgagtttgtggggaagatgctggggaaggctgtgtatgagggaattgtggtggacgtgccatttgcatccttcttcctgagccaactgcttgggcaccaccacagcgtcttctatagctcggtggatgaactgccttctctggactccgagttctataaaaacctcacctccatcaagcgctatgatggggacatcactgacctgggcctgacgctgtcttacgacgaggacgtcatgggtcagcttgtttgccatgaactgattcctggagggaagaccattcctgttacaaatgaaaataaaattagctacatccatctgatggcacattttcgaatgcacactcaaataaaaaaccaaacagctgccctcattagcggattccgttccattatcaaacccgagtggatccgaatgttctcaactcctgaactgcagcgtctcatctctggcgacaatgctgagattgatctggaagatttaaagaagcacacagtctactacggtggtttccatggaagtcacagagtcatcatctggctctgggatattctggcctccgacttcacaccggatgagagagctatgtttctgaagttcgtgaccagctgctccagacccccgctcctgggattcgcctacctcaagcctccattctccatccgctgcgtggaggtgtcggacgatcaggacaccggggacactctgggcagcgtcctccggggcttcttcaccatccgcaagcgggagccaggcggccgcctgcccacctcctccacctgcttcaacctgctcaagctgcccaactacagcaagaagagcgtcctccgcgagaagctgcgctacgccatcagcatgaacacgggctttgaactctcctagctcctgtcccagccctgcctccagggctcctgggctgccagggaccttcagctcccagaggcagtgtggtcctgggaatgtgaccaacatgccaggtgacattggcccctagaccctctctatagccatgagactccttgtggcctcaagaaatttagacgcccacgacagcactacacagcatctccaggtgatgcccaaggcacagggctgcagaaaataaacctccagattccaccaacacgggtccattcttcctggtgatggcagaggggcttcttttagctagtttgatcttttgggagtctgtctttccttagccgtctgagtgagctgtgtatgaacaagtcccaggagttccaagagtctagagtggtttttgcagcatgggttgagtgtacaaagcctactgtgcgtgagatcctctccttccgtttctgaaatctcttactcaggtaaggcctcgccaagcctctatgcaccccacaaagtttctgcctccatgccgtccgcagcgcctcttcccagacagccaggcccatctgctgcccagggaagcgcaggcgcctgctagggacgctatggacaccatgagtccaaggcgctgctcctgccttgaagccacgcgctccacgccgcggccctcccattttctgcgtcctcagcgggctgagctgccagagagccttcccggacctattcccgtcctatgcattcacattggcatcctggtttgggggaagaaaaacaacggcccttagcagcagccccgtttccagaatgtgctgcctgttccccaaagcctgcttgtcccgcggaggacggctgcctttgaccctgcttatttgtctcactggttatctaatgaggaacaaacactaacctaaggtacacatcccatctgggcggtggcttcactcctgagtctgcaaaatcccaggaaacttgggtcttgctgcccatccttcctcagcacagggaacccggaagcccgttgcactgacagaggctcacaccctctgggttttttgtttttttttaaacttcatttctcttccaacccattgtgttcctctgccctcattctttacctttgttgtaagaactttagctccagggaactgaggcagaggccctgtttgtggtctgtgttgacagccacccaccctctcccacctcatgctcctgcacctgcaccaccaaggttgatgccggattcgaagccaggaaggcccagtccctcctctgctctcctcaaagacgcaaaacattttccaacaagagctgtcacagtggcagcaaagcaggggccacccgtctccacagtccttcagagtttcagctgcatcctggtgtcccacccaggtcgagcccccaggcttctggaaaacagtgtgtgctctactttgatggaaacatggcaaggaatttaaagacaggaatgtattaatattattgaaggtgtgttcgtaacctctgattctgtggacttgccactttctccaaacgctcggttcctttgaagatttcttctgaacgtgtgtgcgcacgctgggcgggttcgtgcatacatgcggggaccccagactgtcagcacagggaagatggatcccatcctaatttttatcacctgaaggttggaaccagtgagggactgggagagagtgatttataagcaccaatatcaacttcatgtggatttttgacgaggggtagtttgtaatttcatttaaattcttttcagcagctggaaatattgcactatctgaaacactgaatctccttttgtaactggtgttcactgacaccttgatggctcttgatggctctaaaaagttgtaggattttttgtttttgtagctaacttatggattgagatgtgatcaaaggctttattaaatttgtacttcagcat

SEQ ID NO: 601 - DNA, 4005 bp, Homo sapiens
atgactatatgctggagaagtgagagagcaaatgaatggcttatttcatctccaccattccccacctccttcattacatgtcagtaacaccaccctgcctgcagccccctgtatccgaccgacctttcctaccttggtgcctgggccttgccacccatacctggaaggagaccccacatcccccctgcattctccaggcgcagcttagctctcctctccctccacgatgccttctctctgcctgttttcccccaagcctcatgtcccactcctgtctgcccatagcttttgtgtcttgtctgtgggctctcgtaattttcccttgtctgtttccagcttcttgagttcagagctttgccagccttatctttccacctggtgactctgccactgtggtgcatcagcaacacacacagtgcccactcatgttctcccactctctcagagtttcatcttcaccttaggcacaccacgcacatccttaagggggccatgctaggcattaaagatacagtggtgaacaatatatgcaggaaaataacaaacaaaaaggtcagcgctgatagcctgtaatgctgtgaaggagatctaataggggaataggatgaagctgaagagctgagggggtgggccaccacccagctcttgggggtgtggggggagggcggtgtggtggcctcagggaggagatgacattttgtgccacaatttgaaaggtataacaatgcaagccacatgcagacctggggattaagtgttccaagcaaagttgggaaggagcaggtgcaaaggccatggggcagaagcaagccagagtgtttgagagatggaacaaggtcagtggaaattgggtcatctgggatgtgaggtctctgtggccagagaaggctgtgaagagcccctgagtgcaacgactacaaccctgggtttagctagtgcctctcaggtaggggtagtcagtaactgtttattctgtagaattaaaaacctttcccttatcttcttccttattctgtacatttgtcactggggtactaaaagttgatgatggtctgcttcatgtggcttagagtgaggtgtccctagactagggtcagcgacgaacctttcctgctatagataatgagatatggataatggtgtagccccatgttctggccagggagggaagcagagggtgcccttgtcccttctgtgctctcccagcatgaaaaagtaagaccttgaaggtgctgcccttagacatgctgcctcgcaatcaatggaagcatccagcccttgttggtgacttgagatgcacgccagcctcaggaaacatactcaaaataattgagtataccataattcattagttatcttctcctacactctaattttacacattcttagtatgttatacatgtaggtcaagttttatttcataggatagaaagccatttgatcaatccctgtttctccatgtgtaaaatgaaaataacatctaccttgcagagctgtcagtgaagatttatcagtgagagaatgagtaaaatccttgtaaaaggttcagtgtatgggggtacattttaattttctctagttgtcaaaaatatgatttatgtgagctgaataagaaatttgaattatggttttaatttccaaatgagtaaatgaaagctccttgttcctgtagaacgttatgtaaattaacacagtgaggctagagaagagacagttttaaaatggtgatgtgacgatgtctaaactctgtggtaataggacatatttttcatcaatttgaggcaaaacagataaatgtaatctataaggaactgagaagaaataactattttgtccttaagaacgatacacctgttaagttatgtgtctgctttgggattcggtttccttttatagtttcccaacaaaatcgtggcccaggtagcttgcgatgtccttcagttgctggtttcctactgggagaagcttcagatgtttgaaacctctctgcctcggaaaatggcagaaatcctcgtggccacagttgcttttcttttaccaagtgcagagtactcctcagtggaaacagacaagaagtttattgtgtccttgctactctgcctcttggactggtgcatggcattgcccgtgagtgtccttctccaccccgtgtccacagcagtcctagaggagcagcattcggccagagcccccttgctggattatatctacagggttttgcactgctgtgtgtgtggctcaagcacgtacacccaacagagtcactacatactgaccctggctgacttgtcatccacggattatgaccccttcctgccactggcaaatgtgaagagctctgagccagtccagtatcattcatcagcagaattgggtaacctgctgactgttgaagaggagaagaagagaagaagtttggagttgatccctttgactgctcgaatggtgatggcccacctggtgaaccacctggggcactaccccctcagtgggggccctgccatactgcacagccttgtcagcgagaaccatgacaatgcccatgtggaaggctccgagctgtcctttgaggtgttcagaagtccaaacctgcagctgtttgtatttaatgatagcaccctcatctcctaccttcagacacccacagaaggaccggtagggggatcaccagtgggctctctctctgatgtgagagtaattgtgagggatatctcagggaagtactcttgggatggtaaggttttatatggacctttggaaggctgcttagcacccaatggaagaaatccttcatttctgatttcgagctggcatcgtgacacatttggacctcagaaagactcttctcaagttgaggagggggatgatgttcttgacaaattacttgaaaacattggccatacaagtcctgaatgccttttaccgtcacagctaaatctaaatgaaccttccctaaccccatgtggcatgaactatgaccaagagaaggaaatcattgaggtcattttgcgccaaaatgctcaagaggatgagtatatccagagtcataacttcgattctgcaatgaaagtcaccagccaagggcagccctccccagtggagcctcgaggacccttttatttctgcaggttattgcttgatgacttgggaatgaattcttgggacagaaggaagaattttcatctattgaagaaaaattcaaaattattgagagagctgaaaaatttggactcccgccagtgccgtgagacacacaaaatcgcagtgttttacattgctgaaggtcaagaagacaagtgttcaatcctctctaatgaaagaggaagccaagcatatgaagactttgttgctggacttggatgggaggtggatctctccacccactgtgggttcatgggtggccttcagcgcaatggcagcaccgggcagacggccccttactatgctacctcaactgtggaagtgattttccatgtttccactcgaatgccgtcagactcagatgattccctcaccaaaaagcttcgtcacttggggaatgacgaggtccatatcgtctggtctgaacactccagagactaccgcaggggtattatcccaactgcctttggagatgtttcaatcattatttacccaatgaagaatcacatgttcttcatcgcgataacgaagaaacctgaggttccattttttgggcctctgtttgatggagccatagtgagtgggaagctgctgccaagccttgtatgtgccacgtgcatcaacgccagcagggctgtgaagtgcctcatcccactctaccagagcttgtatctttttgctttaaatgtgtaacttactaaccatcccagaatcaagattcctggcagtttttcataagaggtaagtattcaaaactgaattgaagagggaagagaatttttttcaacctctgttaaaaataacatagtggtttttcatagcatttgttaatttatattaaatataataattttatgctgcatt

SEQ ID NO: 602 - DNA, 4304 bp, Homo sapiens
aagggaaagtgccacattttcaaggcgagaagacataatgaggccaggaaaaaggttttcttcctaagaaaacactatctatgttgcagttaagcccaaagcattcatggtgtatgatgaaagaattaaataatgcctgtgctttggagacagcggaaagggtagcaagggtgtgctgaaggctgagaatttgggaatgctgggggagagaaaaatagaagagcactcaaagtgagtctgttcctacattcacattgtcttggagagacaggtttgcatagttgtttacagaggcaggctctgagaggggtgagcctgggtttcagtcttagttctcttgatcttgggaaagtcacttaacctcccaactagtctcctcatgtataaagcggagactgtaatattacttatgtcctaggatggctgtgagaattacaggagatagataaagagcacttagcccactgcctggcaaaagcaagcattcaataattatcagatatcactagtaattaataatcaggtagtgctattaacgttatcattacatcacagcactgcagaagatgaaagggcacctagaggttttttgaaaacacctgcgtcagaaattaacaaaagtccagacccccacccccacccaaaaaaaatgttagcaagattggaaaaatgagccttttccaataggataaaaaatagaataagtttccctgataatccagccccattagctttgggggctggggcagatgcaacgtagctgttaaatggagatctgggagagctctgaagagttgttgcaacattggctcagcgtggaagctttgcagggaattggaaggcttcatcccttatttaaaccacatggagtgagtagtgagtctattaaaaaatcagtgatacctgttgtagcccacacctcaggatgctgcagcaggccttcctcattagaaggcaggcaggaagacatagagcataacaagacccttttgtctctcagacaggtggttcctagattattatgtcttcccagcctcagtccactgcaagatcatccagatgttcaagtctggtcttccatgtctagcctgggttttactctccacttaaggaccatggcctgtgtctcttttccagggatggagtctgctggcatccatgaaaccacctacaacagcatcatgaagtgtgatattgacatcaggaaggacctctatgctaacaatgtcctatcagggggcaccactatgtaccctggcattgccgaccgaatgcagaaggagatcacggccctagcacccagcaccatgaagatcaaggtaccgttcagtgacagacccagtggcaatgccgccagcagtgtcagccctataaccacagataagaactcttcagagactgtattttggtgacatgcaattgtgggttttaggggtaggtagtggacacaaatctcatattttacaggatgtaagtcaatctagttcataagaaaaattgagttactttatataaaatttgatctctatttatccttgtctgtcagctactttcagtagctgcagtcaaagtcaacagagctccccacatgctcatctctctttaaaatatgcattttgttgtttttctcgacacaaaaatagtgcatcatgcatgtaacacattttttaaaaatactgatgacctagacttatttctgaagaacttcaaacactgtagatttaggaggagcttatactcttcctccactactaacctcaatcctgtggccaagaattcaaattttatcctcattcctctgtctagcacatcttttggtacaggtgctcaaaagcacagaatgactctaggatgaccaagctcagtccctgagccacccaggacccctgtatgtggtgtgaatgttgagccctagtgaagggaactcggggattaaatggagataattctttggaggcaaacttaacctgtggctgggtcacttctcaaaggttattatcactctctgaagtcagaaggccacacttgggaccctctgacccatgtcacaggaagtagaggggcaattctagtgcagttcacacacgtgggtatttaaacaaattatctcctctttgcactcccttctgtttttagaaggagtatgcagctaacactagagagtgtgctagactgaaacatgcacactttctctctccatgataggctctggctagtcctgccctaaaagacttcagcatgagagaagagagactgttttccaacagggtttgtgtttcttggatgccattctgatcagctcttaccccccttacttccacacaagagggaggtgaatgaagccagtagctgggctcactactgagttgatctcatgagggtcgataacagaaagaggctattgctagagttgggcagttcctagttctctaaacttggtttcttgaatagaaattaatgtgaaactctgggccccgatgtaatgagatagtatagagaaccaagaaaaacctaggacaataagatgataacatttggcaaaaatgaaactggatgagagacctatgggaactcccatagaatttgtcataggctgttcttgcgttgctataaagaaatacctaagacttgggtaatttgtaaagaaaagaggtttaactggctcacagttcagcaggctgtacaggaagcatagctctagcatcagcttctggggaggcctcagtctcagaaagcttcgaatcatggtggaaggcgaagcaggggcagacacctcacatggcaaaagcaggggcaacagagagggcaggggtggggggagggtgccacacactttgaaataaccagatttcatgtgaactcggaagaagagctcacttatcaccaaggagatgtcctaagccattcatgagagatccacccccgtgatccaaacacctcctaccaggccccacctccaacacgggggattacatctcaacatgagatttggaggagatatccaaactatactaaattctttacaacttttctgaaaatctaaaattgttccaaaataaaaaggttatttttaaaaccaaaccaaaacataaaaccacctgggagaacccaggtttgaatatcagatctgacactgatataaccggtgttacctgggccagttacttaaactttctcagcctctgtttcctcatatgtaatatgggagtaatttaagacttattcttcaagatgtttatgagaatcaaatgagataatacatgtaaaatgcttagcatagtgcctggcatataattacatgctcagtaaatatcagtactttgtattaagaagtaaatgctcagaagataaagattaaactggttagccagttttcactgttctctgtgcctaaaccattcatttatttaagaaacatgagcatgccttgcaggttaggcctgtgcactgggaaaggccaaccagtgcagcttaagaggcacctattgcaagggaatgtccccagcaggggaccctgagttccccaatgttaaacagagcatctgggtgaaaagtggtagttcacttcaccacgtggaaacacatttgtatactaagtcctagcacaattaaaacttctcctttgaataggctagggtttgtttctacagaaagtgtatcgtgttgaattctgaggcagagttcatggaaatcagaggcattgccagggttcttaagtgggggccgtggctggatttggagccaactttcagtttgctcaataatgtggtcgaagagttacaggtgagaaaaacgaatgtgcttactgaagaatttctaaatccatggctccctctggcggtcctgccaagaacatgacacaattaggacacaattggcatctaacagacaagcctgtgtccctgctgaacaagaaactaggccatggtagaacatccaggctctgtcctaccgcactaacgactgcactaatgatgacattaatgaccattctttttcatcttgactgacagatcattgcccctccggagcgcaaatactctgtctggatcggtggctccatcctggcctctctgtccaccttccagcagatgtggatcagcaaacaggaatacgatgaagccgggccttccattgtccaccgcaaatgcttctaaaacactttcctgctcctctctgtctctagcacacaactgtgaatgtcctgtggaattatgccttcagttcttttccaaatcattcctagccaaagctctgactcgttacctatgtgttttttaataaatctgaaataggctactggt

SEQ ID NO: 603 - DNA, 4505 bp, Homo sapiens
gtaaaccagtcctgttgtagcccttgtagcatctgctgtagtgatctggtttgggtttcagtattacttgcaatggtttggaaggaaatgggaagtttgccttctaactacattttctttttgattcaagaaccctagcagttctacaaccactgggcctaaaactaaaataaaggaaaaataaataaaaggaagcaaaaacatctaactgggatggcctggcagcattgccagagagagtcctcaggggcccatgcttgttctgtcttttgctctgccatccctagggtggacagcacggaagaggcagtacatcttaacaaaatcagggttctggatgaagggaggggtggtgaatggttgctgcaatcaacagttcatacttcaatggaaagaaggtgggatttgattcctggctgcaaatcttcactctgtcacctgctatctgtgtgccctcaggtaagtcatttaacttttctgttcttcagtttccttatatgcaaaataattcctactttgcagaatggttgtgggaggtagagttatcttaagacagtctagcacagtgtctgctacatgctggaattcaaaacattccctgctgttgctatggttggttctgagagctatatttaattttctttttagtctttcttgctggtctgtcactctcttactataaggaagacagccatttctgcataggtcactatgcagtagccttttctattttttgacggcttagcatctatgtaatatcccactgaatgaaaatactaaaatttatctattgtactatgaatagacgatttggagttttcccagtttttttactattacatacagtgttgctatgtatatgctgtggtacacgtgtatagccatttcttcagggtagaaacaaagtaacatttctgggtcatatgatatgcctgtcttcaactttactatataatatctgacatctttccaaagtggtatgccagtttatcttcccactggcagcatatgagaatttctgttgctccagctacactccaacagattcttaaagctttgtcattttgtagggtgtgtagtggtatcttactgtggttttgacaagtttccatttgttggttatttgcaagtatcttgcctccctcccagtcacttgtctattcattctttttataatatctttagtgagtagagttctatgaaaaattattcttatttatgtatttttgtagagatagggtctctctgtgttgcctaggatggttttgaattcctgacctcgagagatcctcctgccttggcctcccaaggtgctaggaatacagttgtgagctaccatgcgcaggcttaaagttcttcgtttttagtgtagttaccgttttgttctttttttattactactttccccttatcattggtgctttttgttacttatttaaaaaatcttcccatactcaggatcgtgatggtattttcctgtacaaccttctaagagctgtaggctttcacatttcatgtttaggtatttaatctaccttggaattgatttttgtgtgttgtgagaagaatgcttatagatacccaattgacccagtgccttttactggtcatttctcaatgactctgcattcccacctctgtccaataccacgtgtctatgtatgtgtggatctgttttggggctcttcaatctgttccattggtctatttgtttatcagcgtctcactgtcttgatatctgttaatataaattctttctccttactcttcaagagtgtcttggctatctttggccttttaaaattcccatatacatttttgaatcaacttgtcgccctccctcccaaaaaaacccaattaggatttttatcattctaggactatggtagatcccttcatttatttagatctacctaaatgtctcccaatatcatattagactttttgtggaggatttgtatgtctttagtaagttttattactaggcacttaatatttttagtatgcttattgaagtaaaattgatatgcattaagtgcataatatttaaagtatacaaattaataagtttaatatatgtatacaccctgaaactgttacaggaaaggggtccagatccagacgccaagagagggttcttggatctcatgcaagaaaggattcagggctagtctgtagtgcaaagcgaaagcaagtttattaagaaagcaaagtggtgaaaggactgctactccatagacagagcgggacgttcccgaaactaagaggaggaacgcatccaccctaggtacaatgcttgtatatatggagagatgtgctctgctacaagggtttgtgataaactattaattttcttaattatggtatttggcaagaatcaatattattatctttcaagcaaaattaggaatgcctttgttccccagatattgggatatctggacactcccgagtctgggtctgttttagtaaacattattaatttgttcccttaaccgtaaacatctagaggctaagaatgcctaactttctgggaattcagtccagcaagtctcagcctcattctcctagccctcactcaaagtggagtcgctctggttcgaatgcctctgacaaaaccatcaccacaatcaaggtaatatagtaaacatatccatcacccccaaatacttcctcatggcccttctaacccttccctcttactccttcctgcctgtacatcctcccactccctgtacctaggcaatctgctttctgtccctatagttcagtttacactttgcagaattttatataaatgggatcatacagtacatactctttttgatgtggcttttttcatacagcataattatttttgagatttatctaggttatagtgaatatcaactgttaattgctctttaaaaaacttttaacttcaaaacagttatatattcacaggaagttgccaaaatggtagggtctgtgtacccttcacccagtttctttgaatggatatatcttacataatcatagtgcagcatcaaaaccagtaaacggacattggtgcaaggtgtatgtatagttttgtgccgtcttattatatatggagattcgggtaatcaccactgcactctagtctgggcaacagagtgagactgtgtctcaaaaaaagaaaaaaagtttaaatactatatatttttctaaaaagaggagatgtttctgatttctcacaatttgattttttcttattgaatgaacttgtagccctaggggaagaacatcagggcattctctcaaatcacctgaagagcagtttaaaaagcaggttccaggcctattcctagagattctggtttagtaggtctgtggtacaaaatccaggtgattctttctcatgctactagttttccagggggcccaggcttgagaaacattggtcctgcagcatcttcctacctttttattgctgatgataaacaagattcacgaggatcatccttgcaggattaaatctttagctctgtgttgtcccaaatctggataatataccactgttcgttaacttaatatacaaattgttggtagggatatccttgtttcatattctaaaactgtgtagtaccacctaaaactttttggatggatttctgtttatatcatgaactattttaatttacaaatcttaatttataggtgaatcagtggctaacctggttagaaactgctgaagaagaagaatcagaggaagaagctgactaaagaaccagccaaagccttaaattgtgcaaaacatactgttgctatgatgtaactgcatttgacctaaccactgcgaaaattcattccgctgtaatgttttcacaatatttaaagcagaagcacgccagttaggatttccttctgcataaggtttttttgtagtgtaatgtcttaatcatagtctaccatcaaatattttaggagtatctttaatgtttagatagtatattagcagcatgcaataattacatcataagttctcaagcagaggcagtctattgcaaggaccttctttgctgccagttatcataggctgttttaagttagaaaactgaatagcaacactgaatactgtagaaatgcactttgctcagtaatacttgagttgttgcaatatttgattatccatttggttgttacagaaaaattcttaactgtaattgatggttgttgccgtaatagtatattgcctgtatttctacctctagtaatgggctttatgtgctagattttaatatccttgagcctgggcaagtgcacaagtctttttaaaagaaacatggtttacttgcacaaaactgatcagttttgagagatcgttaatgcccttgaagtggtttttgtgggtgtgaaacaaatggtgagaatttgaattggtccctcctattatagtattgaaattaagtctacttaatttatcaagtcatgttcatgccctgattttatatacttgtatctatcaataaacattgtgatacttg

SEQ ID NO: 604 - DNA, 4473 bp, Homo sapiens
attgctccttctccatccgggttcttgtgcgtgcgcttctctctgctgggaagatccattgacaccttgtctctttggagaaatcagacccccttgttctgaggcttccagagacaagagctgccgagactttggcttcgctggaggaagtcccataaagatgggaagagtggctgctgctctgggatggtgtgaaggccatcctgcagaggcagaggggtacattggtggtgtccccatgactaaatggatcctacctcttgtccctcccatcatcctgaggatgcctggggactggttcttcagggcatgctttctcgcctgccggccttccaccatgggatgaagcagcaagaaggctcttgccagaggcagacccctcgaccttggacttcccagcccccagaactgcccatgctgtgcagactgggatgtgggggtgcacctcagatgagaaggagagtggtacaggagctacccagctgctgtttgaggaatggatgttgtgtccacagtctgccctcaccccttgtcaacggctgggagcacgtaaactcttgcaaattatttaacctctctgtgcctcagtttcctcactataaatcgtggattgtaatcatgcacctgctcctctgagctgctgtgaggataaaatgcatctttatgaagcccttctgaactggggcggtgcctggcacgtagcaatcaccactcaggagggtcagctcttcctgccaaagggttagttcctggtcccccagggtggggaggccctagaaaggccctgagctttcacaagtttaggtgctttaagtctggggctcccagggtgctggggagcagaccagtgggagtttagtgggcagagtcctgcctggctcacccggccccatccgtctccggtgggctcttctgctgccggttgtacaggaagaagacagtgagcacagcacctaggatgaggaacacggccacggtgcccgccaggagcctggctgcacttcccagacccctctgggggcggggcttttctggaaacaaaagacagggaagaggattagagagagaaactcaagtgacccaaagagagtcagagatgtgagagagtcagaccctgaggcagtactctgcctttgacattgcacccccagctcccctccccatggtgctccagttctaggaggggctcccagccggtgtgggatggaggctcctcctctagttccctatgaccctgtaaccccagaccctgctctgatcctgggatctggggcatggaggtagaacaagggtgagggtatctcctggacaggcagcaggtgctgagatggggtccccaccccgtcattccatttctggccctgcagggaagattcctgttgaggagtttaacttctttcccctccctgtgcaattaaacaagcaaatgaactaatgggtgcttcaccctcccagcttgggacagagggtgaggatcaggagggaaaggcaggagctgggagggtcgatgaagaaggggcacctgggggtgcctcccgggaaaccaagcctcttcagtacagatgggtgaaaagcccagagggctgtggtctaaggtgagggggctgagcccaccttctggacccacctggtcatggacccagaagattgctgggcttgtcgaggtatttcacagtctgagctggagacactggtctgtccctgaagcccaggaggctgcagagactgaccctgtggccaggggcacatgctgcttctcagcgatccaggcttggctgtgaagccacagctggcccttccagttcctccttctgctgggctcgatttctcacctctgacctttacgaccccagcgtggagtggggggtagggactaaggagaaaatcacacacttatgtactccttcctctccactaccgtattacatataattaaacacggagagcacctgaatagagatgccaaattgcagtttgcagtaaacatcatggagccaattttcctaaagtggaattgacaagtcccttccactcactcactcacttactcactcactccctcctcattcactcactcactttctgtctctctccccttctctctgctccattccagtgcccggaaggagggggtatcttgctcccagtaaatttgcaacccctctctggcctgtctgcaaaggctctggccccagcatccatccatccacagctggtggctgtggccgcctttggaaggcagtttcccgtgttgtccaggctggtctcaaactcctgagctcaagtgatcctcccgcctcagcttcccaaagtgctaggattacaagcatgagccaccgtgcctagctccagagtgatcgttctaaactacaaatcagatcaggccacctccctacttaagttcctccaagagttcctccaacagtttgtggcctttatcaaagcgttaagggctgaggcctttcacgacctggttcctggaggaaacgccatgccgcccccagcctggaccacttgcagctcccagacagggagcccctgcttcctctcatcctcaggtagctagtaggagccactctgtctgccagggtctctctttcttccccttctttgccaggccaatccagcctgcaggtttaagctggacgtgcttcctccagagagccctccctgcctcctccactggaatggggttcctcctctggacttcccctgcactctctttcagtctcttttcttttctttttctttttttttttttagacggagtctcactctgtcgcccaggctggagtgcagtggcgcgatctcggctcactgcaagctctgcctcccgggttcatgccattctcctgcctcagcctcccgagtagctgggactacagggacccgccaccaggcccggctaatttttttttttttgtatttttagtagagatggggtttcaccatgttagccaggatgatctcgatctcctgacctcgtgatccgcctgccttggcctcccaaagtgctgggattacaggcgtgagtcaccgtgcctggcttctttcagtctcttttctacagactgtgattgcacgtctgacttgtctccccagccctgcacagtgcctggcatgcagaagtgctcagtaagtgtggtgaatgaatgaaggcttgcctgaatgtgtagtgggcagttctgggagagggtccaccgggcctctggaatctcaccttccactagggggagctctcaccttgagtccagccaccaccacgctggatgctacgaattcagtttccctggacacaactcaaacctatatccccttttcttctcagcacagctgaggcaggctggcatttccagagggctagggtgggagggggagcagtagggaaatgaacacataccctgtccggctcacagagttcaggtttctcttctaccacggttggccccacatggaatccgaacaggaggaagagacaggttcaggacaaaaggctgggatttcagcccttactccctgcctccaggaaacttctctcagaggctttcacccatcatcccctcatggactctgcagccactttgccaagagagggtggcagctgtctctatgagggccctttcatcatccttacagtgcaaacaaaaacacagccatccctcggcatctctgggggattggatccaggacccctagcgaatagcaaaatccaagcatgctcaaaagtcccttatataaaatggtgtagtatttgcctataacctatacacatcctcccatatactttaaatcagctctagattactcataatacctggtacaatgtaaatgctgtgtaaatggttgtaatactgcattatttaggaataacaagaaaaaggtgtacatgttcagtgctgacactactctccattttctttttttctgagtatttttgatctgcagttggttgactccacggatgcagaacccatggatggatacagagggttgactgtataagaagttttctataaatgtctgctgtggactgaactgatggaataagcatccaaaaggaatgccaccggctgaaatgctgaccctcatcaccaagataaaacattgcagggatgcatgaaaattacatttggggagtaaataggcagcccaagtacagagtgaagaagacctgcttagaggtggcacacatgaaaacaactcaaagatctctgtctggagaactcctgcacatccttcaaggcccaggtgaaatgtcgcttcagatcctcccaaacacaatgacccactcccgtcctgtgctaccccagcgctttacacacagctctgcgacagcctgtggccattttggaattggggatacccagcgttcggaattccttagagctgggatgctgggtgtggctgtcacagcattgcagtgccagagtggccaaaaatgtgttgtaagtgaataaatgaattcctcaattc

SEQ ID NO: 605 - DNA, 3880 bp, Homo sapiens
agtctacgacgcctccaaagcgctcaccttccgcatggccgcgcgcatcctgctggggttgcggctggacgaggcgcagtgcgccacgctggcccggaccttcgagcagctcgtggagaacctcttctcactgcctctggacgttcccttcagtggcctacgcaaggtacggccgccccggctccagaccttcctccgaggctccgcggcgcgggcgggcctcccagacccagacgggacgccctcggcgcaccccgcgcgtccgtcacctctgctgggaacggcggcagggcccgggggtgggaggctttgtggcggtggcgtggcggtgggctctgggcctggcctctgtgctggttcgctggtgtgacctggggctggccacacgacctccgtgggacgcgcctgccgcgacgcgctccagcctgagcaagcgcgggccgccagagtttggggtctcggtggcaggcgtcctgccagtcggtcggactccttcccacagcggcgcccctggggccggcctccatcacctcttcggaagcccagatggctgcggaaccgaggagagcgtgagggctgcagatgagccccggtccagcccagcgccagccccggacccaggggtgtgggcgtcagctccaccagccctggacccgctaggtttcgggatcagagaactgctgcttctccagacttcagaacaatgggcaggacccggagagcagctaggatgccccatcccgccttttggtccccctattctgggacttcccactgtttgattccctggttttcagtcacctgcataaaaataatatgtgtaaaggatcatgctataggctgatcaccgtggatacgttttctgatctaatcctcgcagcctgcaaagtgttatgattctcattttattggccaaacttattttattgacttacccaagatcacaccgttagtaggggcacgaacaggactttaacctcatctcctccgactatggaactcaagtgctcaattacagtgctttccccgggggaatgcttttgctgcggctattccctgaactctggagaggcatcccctattgcccacgctcttacagaggctaatgcttacaaatccaatagtgtcctctaagtcagagctttgctgggtgcatcaaggtaccccagcctgagcctagtacagggaaagggcaatgggctgaccctagccgcactgggctctgtgccaggcatggacatggacagctgtgtgactctgggcaattgcttgacctctctgaacttcagcatcctctcctcaggatgacagtaactctgctgtggctcagagggggattgtgataatcaagacagaatgatgtttgtggacagtggacatatccccgaccatttactgagcccagccatatgccaggccaggagctaagctgggaagctgttaacacaaggatgttggcagagccagtgctgagaaggttttctgggtaagtggccgggcttggcccccttagccttcctgccccatctttcttctctccctgaacatcagggcatccgggcaagggaccagctgcatcggcacctggagggggccatttctgagaagcttcacgaggacaaggctgcagagccgggtgatgccctcgacctaatcattcacagtgcaagggagctgggccatgagccctccatgcaggagctgaagggctaccagatccccaagggctggagcgtgatgtatagcatccgggacacgcacgagacggctgcggtgtaccgcagccctcccgaaggcttcgatccagagcgcttcggcgcagcgcgcgaagattcccggggcgcctccagccgcttccattacatcccgttcggcggcggtgcgcgcagctgcctcggccaggagctggcgcaagccgtgctccagctgctggctgtggagctagtgcgcaccgcgcgctgggaactggccacacccgccttccccgccatgcagacggtgcccatcgtgcacccagtggacgggctgcggctctttttccaccccctcacgccttcggttgcggggaatgggctatgcctctgacatgcttgcgctctaggacacggcttggccggtggctatggcgcgcacgcagcgccacccatctgccgctccccattgtagcgtcgcgcgcccactctttcactcgttcaacaatctttcaacaaatgttcgccaaacgcggatgtgtgccggactcgaggaaggaggagggcgagccaccgctgccgcgccagagaagcatctaagcccatgggaagatgccttctgcgctccgcgcccagaggaaggaaaatgtcgtgggccaagcaggaatggagggaatagatagatccccacgaggtgctgcttggcttccccttcccgagccaatccagggagggtgcatggatgggggaaggcgaggtaggggtggcaggggagtgggaatattgcaactcggggacattgcagagacccgacgcacgcggtgggacctgcaacccttgtaaggaagcgggcacgccgtgggcgcaaccctggcctggctttgggccatagaaaaaacacgcagaggatgcctgacggaaggccctctggcagctggcgtctggcttcgtgcgccttggccactctgccggtctcggcggaaactagcaactgtgggcacttccaggctcgaaagggctcaaggtcaccggattctgctggccacttcttaaaaggaaaaattcctaccttaagaaggcatttactcttgtcgtgtatacagaggagaataggcacaccaacacgtctccaacgctggattattttcatgggaggttgagacataattagagaggtttgagatatttgtaccaaaaataggaaggccaagaaataaagtgtcttgggagcggttgagtgaggaggctagggtttatctgggcagctgctccctggggggaaggcactggggtgcagggttggggaggctagggaaggacccaccccacagtacacccagagaggagctgggagctgggcagcctagggcctgggctgcccagacttctctctgagtataaccccggaagctgggctgtgaattgtctccaggtttcagggaccttatttttatttttatttttttgagacagggtcttcctctgtggcccaggctggagtgtagtggcacaaccagctcactgccacctctgcctctcgtgctcaagccatcctcccatctcagcctcccaagtagctgggactacaggcacgtgccacaacgcctagctatttttttttctatttttaatagagacggggggtttcaccatgtcacccaggctggtctcaaactcttgggcttaagcgaaccatctgccccaacctctgttcctgtggccatcaggtagggctgaacactttggcctccttttcatgataagccctagctagacttgaggactctctcaaccattccggtacagaggttccaaccagtgcttaaatcaaagccaaaagcctccatgtcatcattcccaacagcccacttcaatctgccacccagcttccaacagaccggggcagctggacataaggggtgagccagggaagtagctgcctaggcctgagctgaccccttagtgaaccagaagaaagccagtgccctcctaactataagcctctgtagggatggctccagttttaattttccatgggtacatcatgctcagtaattttgagggatatcttagctcctgttttagtagctgcagattctctggggaaggagcagaggaggttccttccctcctgcacttgatatgctctggagggaggcagacaagaaataaactagcaaacaaaaggg

SEQ ID NO: 606 - DNA, 3721 bp, Homo sapiens
atttccttgtcagctactcagtgcacttcttgcacaggctttttttttttttttttctttgagacggagtcttgctttatcacccaggctggtgtgcagtggcgtgatcttggctcactgcaacctccgcctcccgggttcaagcaattctcctgcctcagcctcctgagtagctgggattacaggcgcctgccacctcgcccagctatttttgtatatttagcagagacagagttttaccatgttggccaggctggtctcaaactcccaacctcaggtgatctgcctgcctcggcctcccaaagtgctgggattacaggcgtgagccaccatacccggccacgtttggtttcactttagcctagaaacctgctcgcggctgactggggggtgctctgtggtcccatcttcctaacacagctctgtcttctctgtggggtggcagctgctgcgtttgtttgcctgcttttgtgtgtccaggtcgaccccacctggatccgatcatccacaaccgcaggttgctggaacctcccagtgcagcctggcctgggggcagaggccgggcccagctgtccctcggggttcactgtgctgactccctgcttctgggcctgcctttctctttcttggttttctttataattttgtggtttggagaagtcctgcctcccgtcgtttcctgggccggtcccgggaggtagcacgttgaggcctttcatgtctgaaatgtctgtcgcttccctccgccggaggggcagcctggcctccgtggtgtcacaggtgcagagcctgcccttgaacgtccctgccgcttttgcgtgactgatcctctgtgtgccgtcagctttgcttgaggttttagggtctttgctccctcccagctgtacctggctgtgctgggggcctttttaggctttgggcttgtgtccttcatcgtggggtcatcctctcgtgctctttgttaacttccccatcatcatccctttctgttgctcctgttaatcagatgttgatcctcccagatgagggcgtctttttttttttttttgagacagtttcactcttgtcgcccaggctggagtgtagtggcgtggtcttggctcactgcaacctctgtctcccaggttcaagtgattttcctgtctcagccttctgagtagctgggattacaggtgcacaccaccacgcccagctaattttttgtatttttttagtagggatggggtttcaccatgttggccaggctggtcttgaactcctgacctcgtgatccgcctgcctcggcctcccaaagtgctgggattacaggcgtgagccaccgtgcgcagccccttgctggatattttcatccgtgtggaaggggataaagcgtgccccatggtcacaccaccccctcccgtggcctggcgtccccaccttcgtcctgacctcttctgtctcgtggtccccaggctcctgtgctgctgtgcccctcagggtcctcctgcctcccgagcctccctgctccacatggcccctgcccagccctctccatccctcttgaaggtagttccacagccagacaccctcccgccccccgctggcctctcctctagggcttgctacccacccccatcccctgcttccactgccacccgatgtgtccacgatgccccaggccacctccccacctctgtggcccctgagcctgcacggaggaaagggtatcctctgggcaaggcacagccacccgccaggtcctccctctcaccacatccaggacagtggacgctgctccctgcctcttcctcagagtcctggggtcacacctctacctgcgcggctctcgggggccacccctctcagccccatccggctcctgagcagctttgtccccagagggccccgggtcattcctctgaccaaccaggcacggcgcaccctgcatgcaagcctgggcgggtgctggggacggacgagtgacgcagcagacactgcctccctgaaggcatggcaaggaggccccgagttcctgaagacgcccctggggggcagcttcctggtgtacgagtccttcctctaccgtcgggagaaggcggccggggagaaggtgtattggacctgccgggaccaggcccgcatgggctgccgcagccgcgccatcacccagggccggcgggtcatggtcatgcgcaggcactgccacccaccggacctgggcggcctggaggccctgcggcagcgggagcacttccccaacctggcgcagtgggacagcccagatcctctccggcccctggagttcctgaggacttccctggggggcaggttcctggtgcacgagtccttcctctacaggaaggagaaggcggctggggagaaggtgtactggatgtgccgggaccaggctcggctgggctgccgcagccgcgccataacccagggccaccgcatcatggtcatgcgcagccactgccatcagcctgacctggcaggcctggaggccttgaggcaacgggagcggctccccaccacggcccagcaggaggacccagaaaagattcaagttcagctgtgcttcaagacgtgttctcctgaaagccagcagatttatggggacatcaaagacgtcagactggatggcgagtcccagtgaggcgatgtgggcagaggagctccgagccgcccacccgaggtggcttcacatccacacaggcacttcccatccacctaggtttggcttagcagaaacttcttttcattcttccaaagcatcgatggtcttcgcgtctcctcaggaggtctcccaggaggaattcttggatggtgtcctcatgtcggcggagaacagtgctcagagctggcgcttgcagacgcagctgtcgtggggcagggcggtggcgccttcctgacctttggaagacatgacaaagctgcctggacacggacgcccctgctgtacggccacagcacccctgggtttgcagagcacgcagccttcctagggctttccacctggcgaggccccgctctgctcagcacggtgcaaagtgaatgctgctgtcttggagcctgggcacgtttggggaagttcctgcttcaaactgagctgccccgcataggccaggtcaacccacaccaatctcttctggacaggtgctgggtaggccttcctggtctctggccgcctgctgccagggtgtggccatccccagcaaccggagctggccaaaccagaggcctcgctccgcactccacactttcctttctgtgctccttccaagttaaattaaaccccctctccacgattcccacggcaggcgtcattcccgagatgggagccagtccaggggtcagcaggagccagcgctgggcacacgtgccctggctgaggccagcggcatcctgggtggcccaggtccatcctgggcagcaaaggcgtgtccccttctgtcagacagcttcacagagtgtggcttcaccagtcagagggagcagtccggagaggcaagatgaccccaccgggactgcagagcctcctccttactaacaaggacctgtccgcagccgcgaggtccttcactcccaccctgtaattgtggggggagtgccagcaacaggccagtcccctggcaagttggccacggaacccaccatgcactgcaaggctgtgacagcctgggcacccctgcttctcctctgcttgtacggttcccccaataaatcctattttccatctcac

SEQ ID NO: 607 - DNA, 3706 bp, Homo sapiens
gtccctcactgtctcccacccaccccacacagtcatgtgcccctgccccacagccccacacgtcgagccataccccctcagctgccactgccaccaggccggtgctgagctgggggtcagtgactcatctaatcccttaggcaggtgccctgcacccccaaccccaccctgtcaccccctcagcagtaaaggcctgaggctcgaggccccagaggagctttggacctgttgggtatcttgaggtgtgggattaacgcactgagattgggcagagataagggtttcaggggacaaaaagaaacatttgtttgaaacatgccagagtgtctccaccccgcatcaggacagactgacagagtgggctggggacaggctaccccatatcccttctggctccctgagcgccccctgccctctgacctgggcctccagatcacagccttgtccactcaccagagccctggcaccacggccacaccatgcccggccagtgccctgcccaaccctgctcccttccagattcccacccaggcagccattctcaggtacacaatgtgcaggactcactgtgacctgcccaccaggcccccccgaggcagaccctgcagaggcaccaagcattttgaggctcggaggtgagggtgagcttctgggtggccttcccggagaagggggcttagggctgtgcctgagctcaaggtaggggggattccaacatcccagaggggctgcagaaggccgaagaggcaggatgggtgagctgcaggccccctcgcccagaggcccgtcagaactaccctcagctgccaggcatccggccccaccccggaggaaaggcaacggatggctggggttgggtggagggagccaggccagagcgctgcagggtgcaacttgatcagaagcctgtcacagtgggtgcagtcccaggccagccgccccagggcacctcaggggcgtaaagcctacagaggagccacctcagctctgccctgctcccgtgtccggaggagatgccatcttgctgcatgatgcttcgggctctgctgatcagttccctccttgccctgctctgggcatccccaggccaggcccaggtccccatccaggccaactttgatgccagccaggtgtgcccagccctgtttcctcctcatctccaatgagtcctcccggctttggtgctgcaccccgggtccctgtccacaccctctttgatccaggctcagcagggctaggggcaggggaaacccccacctcacccgctccgtctgactggagtaggggttggctggggaagactgcagcctccatcctaccttttcagttgcatcccccaacactccccagggcccaaaatagggacaagttggttgcctgtgcctcactgtcccccacccaccccacaaagacctgtgaccttgccacagccccacccatccagccgtaccccctgggtgccagctgcagacaggccggtgctgggctggtgggggccagttgctcatgtactgaggcccccctccctcagttctgcatcggggtcgagatgtgtacagcagcccctgccgtggccaggaagcagctgtgtcggggcagaatgtggtgggctcaggcccagggcacaggggcggcctcccagccttccctgcacttgccctgcagttccagggcacctggtacatggtcggggtggtgtcagatgaccaggacttcctggactccaaggacaccatgaagatggctgtggtcttagtgacccccttggggaatggtgacctggccctcaagtttggataccccacgtaagtgaccacacgagcccatcagactcagcctcagaggatggccagcatgaggccacatgaaggtccagagggaccatggtgtccccagcacattgaggtcagaccacgggtcctcgacggctctgtgcggcagagccccagatggcagccacatggagtccagagggacccaggccctggaggaagcactgcctgaggcctggtgttgagaaaagtgtctgcatgtctgtgtctgtgtgtgtatcactgtatgtggctgtgtctctgtgtatgtgtgtctatttctgcatgtgtgtgtgtctgtgtgtgcgtgtgtatgcatgtgtgtctttgtagatgtgtacctctgagtgtgtatgtgtgtatcactgtatgcgtctgtgtgtctgtgtgtctgtgtatctgtgtctggctgtgtgtgtctatctctgtgtgtgtcttgtgtgcgtgtctatgtgtgtgtctgtcagtgtgtctgtgtctgtgtctatctccgtgtgtgtgcatgtgtgtatgtgtgtgtcttctgtgtgtctgtgtctggaagggggacctggaggccctgcattctaggctgtgtgcctgtgaacaggtacttaatacccaccccacccccagcaggagtgtccccacctctaaggtcatcctaaagtcccatgtcctccaaggattgtgagggtgaacaggggaccctgggctcagagacagcaaggtaggctctaggcctgggcgctgggcaggggtggccactcaggggattggggctctttctccccaggccccatggcgggtgccagaaaatggacacgaccttcaccgagggtgctgtaccggggcagttcagcaacccagccatggccctgagtgacatccgagtggccttctccgactaccagcactttgccttgctgtacttggagatgcggaaagggggcctgcggaaccagtggctgcagctctacggtgggcgggctgcggggcggagacccaggcacccccgcttcgggtctgggatgtcacccctgtgcctgcaccagccctttctgcacgcggaaggtggaaccgctggctcctggtgtctgtggccgcgggtcccggcccctccctgcccctctctccctctcttcgcccctccagccccttccctttagcttacccgccctccccaccttcagctcgagcgcccgagctgtttcccgaaggcgcccagaagatgcagctactggcgccccaagtgggcctgagccccagccagggcgtcctgctgccgaagtcgggtgagcggtgccggcagccctgctgggagggccaggccccgggtcacacccctgctggaagggccaggccctggtcactccactgatctcagattcgggacagaagtgcccggggcagacccagcctgtctgggtcgggggagggcgagacgttgcccaggccggtgttcctaggaggagatcgccttggggcaggtcgggggcctccgtcccagggaagggggcgcggggtggcgcctcaggctcgatctctctgcagaccagtgtgcgggcgcgctctcccgggtgagtagaccatggccatgcggagccgcggaccatgggccctcccagctcggtgggctgcaccgcggggccctctaccttcggggcagctagggacgacagcgggggtgatggggcacccgggcggatccgagccgcagcagcctggggaaccgcggggctgcgcgtcgggagggggcggaggcaggggacgccgcccacctgctccttgttttgcagtgaggggtccagcccctgagtgcccgcaggggtcagctgctccgtgcgcccagccctgcccaaagagccccctccctccacaccctggccccaagcgcaataaacaccctgaatgcc

SEQ ID NO: 608 - DNA, 4417 bp, Homo sapiens
attcagaccctgctctttccttccattctcctccttggcccagtacccttgtgcaggttacaatttgcctgtcatatgtggctgcctgattttagatagaagatgtatctcctctgtttcggtgatatctgttgtatgtagacctcttgtttcccaccagtatctgaatggtattatatgatagagcagaagagaaatgtatttgaattaaaaccctagagacaaatatgaataagatgaggcaattaagatgttttcaacatttggtgaagtcttaaaaaagacctactggagcatagaatatttgctgaagttgtataatggaaggagaaatagattttgatttttaggacattatacctggaatggtttagataacttattatttttaaagtcatccaaatgcaatgtaaatatgtaaggttttgtgggcaaatggagcctctgtgtaaaacaggaaaaggcactctttcctctgggcaagtacagtcccacagtgggatgaaccgctcgccgagagacaagggacacatgggatttaaaacttccttggataaagatattcattaattcgttcattcattcattcatgtttgctggaaaaaaaactcttctggattttatctattctttagttaggtgagctttcgatattgtaacactctgagtttgctttaagaccctcaggcagtttgattgcatctacacaagataaacccaaccagcaggatattgtgttttttgagaaaaatggactccttcatggacactttacacttcccttccttaaagatgaggttaaggtaaatgacttgctctggaatgcagattcctctgtgcttgcagtctggctggaagaccttcagagagaagaaagctccattccgaaaacctgtgttcagctctggactgttggaaactatcactggtatctcaagcaaagtttatccttcagcacctgtgggaagagcaagattgtgtctctgatgtgggaccctgtgaccccataccggctgcatgttctctgtcagggctggcattacctcgcctatgattggcactggacgactgaccggagcgtgggagataattcaagtgacttgtccaatgtggctgtcattgatggaaacagggtgttggtgacagtcttccggcagactgtggttccgcctcccatgtgcacctaccaactgctgttcccacaccctgtgaatcaagtcacattcttagcacaccctcaaaagagtaatgaccttgctgttctagatgccagtaaccagatttctgtttataaatgtggtgattgtccaagtgctgaccctacagtgaaactgggagctgtgggtggaagtggatttaaagtttgccttagaactcctcatttggaaaagagatacaaaatccagtttgagaataatgaagatcaagatgtaaacccgctgaaactaggccttctcacttggattgaagaagacgtcttcctggctgtaagccacagtgagttcagcccccggtctgtcattcaccatttgactgcagcttcttctgagatggatgaagagcatggacagctcaatgtcagttcatctgcagcggtggatggggtcataatcagtctatgttgcaattccaagaccaagtcagtagtattacagctggctgatggccagatatttaagtacctttgggagtcaccttctctggctattaaaccatggaagaactctggtggatttcctgttcggtttccttatccatgcacccagaccgaattggccatgattggagaagaggaatgtgtccttggtctgactgacaggtgtcgctttttcatcaatgacattgaggttgcgtcaaatatcacgtcatttgcagtatatgatgagtttttattgttgacaacccattcccatacctgccagtgtttttgcctgagggatgcttcatttaaaacattacaggccggcctgagcagcaatcatgtgtcccatggggaagttctgcggaaagtggagaggggttcacggattgtcactgttgtgccccaggacacaaagcttgtattacagatgccaaggggaaacttagaagttgttcatcatcgagccctggttttagctcagattcggaagtggttggacaaacttatgtttaaagaggcatttgaatgcatgagaaagctgagaatcaatctcaatctgatttatgatcataaccctaaggtgtttcttggaaatgtggaaaccttcattaaacagatagattctgtgaatcatattaacttgttttttacagaattgaaagaagaagatgtcacgaagaccatgtaccctgcaccagttaccagcagtgtctacctgtccagggatcctgacgggaataaaatagaccttgtctgcgatgctatgagagcagtcatggagagcataaatcctcataaatactgcctatccatacttacatctcatgtaaagaagacaaccccagaactggaaattgtactgcaaaaagtacacgagcttcaaggaaatgctccctctgatcctgatgctgtgagtgctgaagaggccttgaaatatttgctgcatctggtagatgttaatgaattatatgatcattctcttggcacctatgactttgatttggtcctcatggtagctgagaagtcacagaaggatcccaaagaatatcttccatttcttaatacacttaagaaaatggaaactaattatcagcggtttactatagacaaatacttgaaacgatatgaaaaagccattggccacctcagcaaatgtggacctgagtacttcccagaatgcttaaacttgataaaagataaaaacttgtataacgaagctctgaagttatattcaccaagctcacaacagtaccaggatatcagcattgcttatggggagcacctgatgcaggagcacatgtatgagccagcggggctcatgtttgcccgttgcggtgcccacgagaaagctctctcagcctttctcacatgtggcaactggaagcaagccctctgtgtggcagcccagcttaactttaccaaagaccagctggagggcctcggcagaactctggcaggaaagctggttgagcagaggaagcacattgatgcggccatggttttggaagagtgtgcccaggattatgaagaagctgtgctcttgctgttagaaggagctgcctgggaagaagctttgaggctggtatacaaatataacagactggatattatagaaaccaacgtaaagccttccattttagaagcccagaaaaattatatggcatttctggactctcagacagccacattcagtcgccacaagaaacgtttattggtagttcgagagctcaaggagcaagcccagcatgcaggtctggatgatgaggtaccccacgggcaagagtcagacctcttctctgaaactagcagtgtcgtgagtggcagtgagatgagtggcaaatactcccatagtaactccaggatatcagcgagatcatccaagaatcgccgaaaagcggagcggaagaagcacagcctcaaagaaggcagtccgctggaggacctggccctcctggaggcactgagtgaagtggtgcagaacactgaaaacctgaaagatgaagtataccatattttaaaggtactctttctctttgagtttgatgaacaaggaagggaattacagaaggcctttgaagatacgctgcagttgatggaaaggtcacttccagaaatttggactcttacttaccagcagaattcagctaccccggttctaggtcccaattctactgcaaatagtatcatggcatcttatcagcaacagaagacttcggttcctgttcttgatgctgagctttttataccaccaaagatcaacagaagaacccagtggaagctgagcctgctagactgagtgactgcagttaggagggatccgacagagaagaccatttccactcattcctgttgtcctaccaccccttgctctttgagggctggctattgagaactggaaagagtaaaatgataacttaccttagcattgccaagaacttcagcagacaacaagcaattctatttattttatgttgtgtatacatcttgatcattagcgagacattaagctttaaccattatggcaccattttgtgagaatgattgttctttcacttgggctgtttgagagcataattatggtaatcatgagattaatgtttcatgatttctacctccaaagtgtgaagacaagtaaaacaatgtttctaaattgtcttattttgttggcggagaagattacaatggctattagtgctacatttggtcaaatgtaatcacttaaatagcttcttgtcaccttaaactaaagcagaataaaaagtatcctttgaaatt

SEQ ID NO: 609 - DNA, 4074 bp, Homo sapiens
cctgtctccttttttcttgttaattctgatgaagggctgtgaagggctggctgcttgcctgacttgaagaaggtgcattccctctgccatgcaggtgaacacacgagactcagaatggctgggggtgttcccaaggtcacatcctggctgtcagcacattgagggctcagaccaagttctttgtgactccaaaatcagtccttttcatgacttgctgacaaacctaaagataaaagttagggccttctttattctttcccttgactgcctttgccagccaatgacggacaacctctgacggctgggatggaggcacccgcaggccagccggagtcttctccggtacttaccagtcagagtggtgagactcacagacgctctctcagaaactggcagcttacactcaacacccggtgcctagttccccaccctgtctcctctaactcctcacctgcctcctgcctgtctcctccttccagttctgtctccttctagttctgtctcctccttccagttctgtcctcagaaaattagacggttttgggtgagccagcaaggaggcaggagtgagtcagcgtgcgtctgttaacacgctgggcttagtggttctagggacctacagaggctccagggtgggcggcagtgggacctggcgcctgcgctttctgttatttacacatggctgtggtgacgcccaaggggcttgcagtactcagcagggcactgagggcgaagctgtcttctcccctggtgacacccctcgggggtcttttgtggtctgggtagctgtgtggagctgaaccggtctgcattcctggaaccagagggattatccaagaccaggaagtcggtgtttattactaggaagctgacggtgtcagtcggggaaattgtgaacggagggccattgccccccgtccctcgtcatacccctgtgtgcagcttcaactcccagaacaagtacatcggggagagcctggccgcggagctgcccgtcagcacccagagacccggctctgacacagtgggcggagggagaggagaggagtgtggtgtagagccggatgcacccctgtccagtctcccacagtctctaccagcccctgcgccctcaccagtgcctctgcctcctgtcctggcactgaccccgtctgtggcgcccagcctcttccagctgtctgtgcagcctgaaccaccgcctccagagcccgtgcccatgtactctgacgaggacctggcgcaggtggtggacgagctcatccaggaggccctgcagagggactgtgaggaagttggctctgcgggtgctgcctacgcagctgccgccctgggtgtttctaatgctgctatggaggatttgttaacagctgcaaccacgggcattttgaggcacattgcagctgaagaagtgtctaaggaaagagagcgaagggagcaggagaggcagcgggctgaagaggaaaggttgaaacaagagagagagctggtgttaagtgagctgagccagggcctggccgtggagctgatggaacgcgtgatgatggagtttgtgagggaaacctgctcccaggagttgaagaatgcagtagagacagaccagagggtccgtgtggcccgttgctgtgaggatgtctgtgcccacttagtggacttgtttctcgtggaggaaatcttccagactgcaaaggagaccctccaggagcttcagtgcttctgcaagtatctacagcggtggagggaagctgtcacagcccgcaagaaactgaggcgccaaatgcgggctttccctgctgcgccctgctgcgtggacgtgagcgaccggctgagggcgctggcgcccagcgcagagtgccccattgctgaagagagcctggccaggggcctcctggacctgggccatgcagggagattgggcatctcctgcaccaggttaaggcggctcagaaacaagacagctcaccagatgaaggttcagcacttctaccagcagctgctgagtgatgtggcatgggcgtctctggacctgccatccctcgtggctgagcacctccctgggaggcaggagcatgtgttttggaagctggtgctggtgttgccggatgtagaggagcagtccccagagagttgtggcagaattctagcaaattggttaaaagtcaagttcatgggagatgaaggctcagtggatgacacatccagcgatgctggtgggattcagacgctttcgcttttcaactcacttagcagcaaaggggatcagatgatttctgttaacgtgtgtataaaggtggcccatggcgccctcagtgatggtgccattgatgctgtggagacacagaaggacctcctgggagccagtgggctcatgctgctgcttccccccaaaatgaagagtgaggacatggcagaggaggacgtgtactggctgtcggccttgctgcagctcaagcagctcctgcaggctaagcccttccagcctgcgcttcctctggtggttcttgtgcctagcccaggaggggacgccgttgagaaggaagtagaagatggtctgatgctacaggacttggtttcagctaagctgatttcagattacactgttaccgagatccctgataccattaatgatctacaaggttcaactaaggttttgcaagcagtgcagtggctggtttcccactgcccccattcccttgacctctgctgccagactctcattcagtacgtcgaagacgggattggccatgagtttagtggccgctttttccatgacagaagagagaggcgtctgggcggtcttgcttctcaggagcctggcgccatcattgagctgtttaacagtgtgctgcagttcctggcttctgtggtgtcctctgaacagctgtgtgacctgtcctggcctgtcactgagtttgctgaggcagggggcagccggctgcttcctcacctgcactggaatgccccagagcacctggcctggctgaagcaggctgtgctcgggttccagcttccgcagatggaccttccacccctgggggccccctggctccccgtgtgctccatggttgtccagtacgcctcccagatccccagctcacgccagacacagcctgtcctccagtcccaggtggagaacctgctccacagaacctactgtaggtggaagagcaagagtccctccccagtccatggggcaggcccctctgtcatggagatcccatgggatgatcttatcgccttgtgtatcaaccacaagctgagagactggacgcccccccggcttcctgttacatcagaggcgctgagtgaagatggtcagatatgtgtgtatttttttaaaaacgatttgaaaaaatatgatgttcctttgtcgtgggaacaagccaggttgcagacgcagaaggagctacagctgagagagggacgtttggcaataaagccttttcatccttctgcaaacaattttcccataccattgcttcacatgcaccgtaactggaagaggagcacagagtgtgctcaagaggggaggattcccagcacagaggatctgatgcgaggagcttctgctgaggagctcttggcgcagtgtttgtcgagcagtctgctgctggagaaagaagagaacaagaggtttgaagatcagcttcagcaatggttgtctgaagactcaggagcatttacggatttaacttcccttcccctctatcttcctcagactctagtgtctctttctcacactattgaacctgtgatgaaaacatctgtaactactagcccacagagtgacatgatgagggagcaactgcagctgtcagaggcgacaggaacgtgtctaggcgaacgactaaagcacctggaaaggctgatccggagttcaagggaagaggaagttgcctctgagctccatctctctgcgctgctagacatggtggacatttgagcagcctgacctgtggggagggggtctctcccgaagagtttctgtttttactcaaaataatgttattctcagatgcttgatgcactgttggaaatgtgattaatttaatcatgcagataaaccatttaaatgtc

SEQ ID NO: 610 - DNA, 4152 bp, Homo sapiens
tgcaagaatgagttaatctcagtgaagatggcagaagctggctccgagttggaaggcgtgtctttggtgacaggtcagcggggcctggtactggtgtcagccttggagcctctgcctctccctttccaccagtggttcctaaagaattatccaggaagctgtggcctttccaggaagagggattggacaggctcctatcagattggcagaggacgctgtaaggccttgacgggttatgagccaggagaaaaggatgaactgaatttctaccagggagaaagcattgagatcatcggctttgtcatacctgggcttcagtggttcattggaaagtcgacaagttcaggacaagtgggctttgtccccaccaggaacatagatcctgattcttattccccaatgacttggttgtttcttcaatatgaagattcatgtctttcttcaattctggaaaattttcagtccttcttcctttgaatattgcctctctctcgttctttttagtctctcttctggaattcctattagaggagcaggaactctgcctttctcagtgatgaggagagatgctccctgttggccctgggaagtgataagcagactgagtgttccagcttcctccacactcttgctcgcactgacatcacatctgcctaccggctcagtgggtttgaatccatccagaatcctccaaatgatctgagtgcatcccagcctgaaggcttcaaggaggtcaggcctggcagagcctgggaggagcatcaggccgtggggtccagacagtccagcagctctgaggactccagcctggaggaggagctcctctcggccacctcagacagctatcgcctgccggagcctgatgaccttgatgacccggaactgctcatggacctaagcactggtcaggaggaggaggctgagaacttcgcccccatattggcttttctggatcatgagggttatgctgaccactttaagagtctctatgacttctccttctctttcctcacttcttccttttatagcttctctgaggaggatgagtttgtggcctacctggaggcatcaagaaagtgggccaagaagagccacatgacctgggcccatgcccggctctgcttcctcctgggccggctgagcatcaggaaggtcaaactctctcaggccagggtgtacttcgaggaggccatccacattctcaatggagcatttgaggacctatccttggtggccactctgtacatcaatttggctgccatctacctgaaacagaggctgagacataaaggctccgccctgttggaaaaggcaggtgccctgctggcctgcctgcctgaccgtgagtctagtgccaagcatgaactcgacgtggtggcctacgtgctgcgccaggggattgtggtgggcagcagcccgctggaggccagggcctgctttctggccatccgcttgctcctgagcctaggccggcacgaggaggtcctgccctttgccgagcgcctgcagctcctctctggacaccctcctgcctctgaggctgtggccagtgttttgagttttctgtatgacaagaaatatcttccacaccttgcagtggcctctgtccagcaacatggtatccagagtgcccaagggatgtctctttctatttggcaggtccaccttgtcctccagaacacaaccaagctccttggctttccttccccaggctggggtgaagtttctgccttggcctgcccaatgctcagacaggccctggctgcctgtgaggaactagcagaccggagcacccagagggccctgtgtctcatcctttccaaagtgtacctcgagcacaggtctcctgacggtgccatccactacctgagccaggccttggtgctagggcagctgctgggtgagcaggaatcctttgagtcttctctctgcctggcatgggcctatctcttagccagccaggccaagaaggctttggatgtgcttgagccactgctatgctccctgaaggagacagagagtctcactcaaaggggagtcatctataacctcctgggacttgcactccaaggtgaaggccgggtgaacagggcagccaagagctatcttcgggccttgaacagagcccaggaggtgggagatgtgcataaccaggcagtggctatggccaatcttggccacctgagccttaagtcctgggctcagcatccagccagaaactatctcctgcaggctgtacgactctattgtgaacttcaggccagtaaggagacagacatggaattagtacaggtgtttctctggttggcccaagttctggtgtctggacaccagctgacccatggccttctttgttatgaaatggcattgctgtttggcttaaggcatcgacatctaaagagtcagcttcaggccaccaaatccctctgccatttctacagctctgtgtccccaaaccctgaggcatgcatcacctaccatgagcactggctggccctggctcagcaactcagggaccgggagatggaagggaggctgctggagtccctggggcagctttatcggaacctaaacaccgccaggtccctcaggaggtcactcacatgcatcaaggagagcctgcgtatcttcattgacctgggggagacagacaaggctgctgaggcctggcttggggcggggcgactccactacctcatgcaggaagacgagctggtggagctgtgcctgcaggcagccatccagacagccctgaagtcagaggagcctttgctggctctcaaactttatgaagaagcaggtgatgtgttcttcaatgggacccgccacaggcatcatgcagtggagtactaccgagctggagctgttcctttagcaaggaggttgaaggcggtgagaactgagctccggattttcaataagctgacagagctgcagattagcctcgaaggctatgagaaggctttggaatttgccaccctggccgccaggctcagcacagtcacagaggcaagagctggtggcctttcaccgcctggctacagtgtactactccctgcacatgtatgagatggctgaggactgctacctgaagaccctgtccctctgtccaccatggctgcagagtcccaaggaggccctgtactatgccaaggtgtattatcgcctgggcagactcaccttctgccagctgaaggatgcccatgatgccactgagtacttccttctggccctggcagcagcagtcctgctgggtgatgaggagcttcaggacaccattaggagcaggctggacaacatctgccagagccccctgtggcacagcaggccctccgggtgctcctcagagagggcgcggtggctgagtggtggtggcctggccctctgaggaaagctgtcctgtctctggacatttggcatggccagactctgaccccactgccctaggctcttaaatactcattgggagggtccgagtccttacctggcctagccccctcatttcacaagaagaagaatgaagtccaggaggagaagggctcattgcaggccacagaaagatttgatggtgcagcgatgagaattcctggttccaggctttgcatctggagcctttaccggttgactgttgccttccacacaaacagcctctgaaaagcactttctccatacataattctggagaagatgagggatcttgccctccaggagccttccttcctcccccaatgaggaaatcagtcactgcactggtgcaaaggcaagcagattggaatttgtgctcttcaccgattttctcagggaaagaccccttccccttgccagcagaggaacctgtagttttttccatttctttcttcagaaccaaagtatgtatcactcctcatgctcacagggattgacaggagagaattcaccaggatcttagctcaaaagacacagcctcagaatggccagatggattgcacgaaacctgacttggattcaccatcttcctcctgccataaggctgtgctcccacataacctcccagaagctccagggaagctttccaagagcaaaggcttggaaattgaatgttaagaaaattatgacataaattacatgtaaatagtgtatatgattaaatattgtccagttacatttacacac

SEQ ID NO: 611 - DNA, 5259 bp, Homo sapiens
tttttttttctcgctcgctcccgttccccggacgcggcggatgagccggccccgctggggaaggctccgggcggcggcgggcggccgggaggaggctgcgtgctcggggctggggctgcgagcggggtgattttgtattaaaatgaggaggaggaagaagaggcacccacagcggcagcggcggcggcggcggcagcagcagcaggagcagcggcggagagggctgcagcccgggcggacgcgcggagccgagcggggcacggcggcggcagcgacagcggccgggatgagtcaactaataatttaatgggggcagagacggcagcgaggggtagagctagcgagggagagagcgagagaagcagccccgtccggggactcgcgctcacactcacgcacacacacaaacacacacacacctctccctgtgccacccagcaacacccggcctcgtcacaacaacaacagccgcggccgccctctatcctgcccgggggcccagccgaaagccagggcgactctagaggacgctgcccgcccccctctttcatttcgggaaactcctgatcagttttgtcggggtttctgggtttcttttcccccaaagtcctagtgccattgtggtgctcgttgtttacctcggactctggacgagtgagagcttggcgactttttggggggagggggcggggagtttgtcgctgcctaggcggtggaggtggctgggggtgccttctgatcttcctcctcctccccctccccccgaacctcttctcccctcacttgctgggaccccagacgctcacagccccgcgtcaatgggcagggagagggtccttgcggctgttgtcagcgagggcagaatcaaaagtggcattttagtgcctttccggggcttttctcgcgaccccctgccccccaccctcgctgtcccccgctagatgccctcgttgggggtgcgaggctgtggggaaaagtttaaggtttgttaatattagtcgcgattgttggcgaggggggtgggggtgattggaagggaggcgaggtggccttcccaatgcgcgttattcggggttattgaagaataatattgcaagtgacagccagaagtagactttctgtcctcacaccgaagaacccgagtgagcaggagggagggagagacgcgaagagaccttttttcctttttggagaccttgtccgcagtgatttttttttttttaagagaatcctcagtcaccacgtcgtttccccagcaccatcacagtgtacagctcataacgggttttgctttgtttttacgatttccccccaacggatcacttgtcagatcaattttatcttcttcctcctccctgcttcccactctcccctcctccccatcgcaaaccccgttctctgaggttagacattttacaaacccctatatgttggttttcgaattgtgattttttttttaaacccctttctcatggctactcttctagacgtttatttctgcccttcccccgcttaggggggcgggggtaggggaaaggaaaataatacaatttcaggggaagtcgccttcaggtctgctgcttttttattttttttttttaattaaaaaaaaaaaggacatagaaaacatcagtcttgaacttctcttcaagaacccgggctgcaaaggaaatctcctttgtttttgttatttatgtgctgtcaagttttgaagtggtgatctttagacagtgactgagtatggatcatttgaacgaggcaactcaggggaaagaacattcagaaatgtctaacaatgtgagtgatccgaagggtccaccagccaagattgcccgcctggagcagaacgggagcccgctaggaagaggaaggcttgggagtacaggtgcaaaaatgcagggagtgcctttaaaacactcgggccatctgatgaaaaccaaccttaggaaaggaaccatgctgccagttttctgtgtggtggaacattatgaaaacgccattgaatatgattgcaaggaggagcatgcagaatttgtgctggtgagaaaggatatgcttttcaaccagctgatcgaaatggcattgctgtctctaggttattcacatagctctgctgcccaggccaaagggctaatccaggttggaaagtggaatccagttccactgtcttacgtgacagatgcccctgatgctacagtagcagatatgcttcaagatgtgtatcatgtggtcacattgaaaattcagttacacagttgccccaaactagaagacttgcctcccgaacaatggtcgcacaccacagtgaggaatgctctgaaggacttactgaaagatatgaatcagagttcattggccaaggagtgccccctttcacagagtatgatttcttccattgtgaacagtacttactatgcaaatgtctcagcagcaaaatgtcaagaatttggaaggtggtacaaacatttcaagaagacaaaagatatgatggttgaaatggatagtctttctgagctatcccagcaaggcgccaatcatgtcaattttggccagcaaccagttccagggaacacagccgagcagcctccatcccctgcgcagctctcccatggcagccagccctctgtccggacacctcttccaaacctgcaccctgggctcgtatcaacacctatcagtcctcaattggtcaaccagcagctggtgatggctcagctgctgaaccagcagtatgcagtgaatagacttttagcccagcagtccttaaaccaacaatacttgaaccaccctccccctgtcagtagatctatgaataagcctttggagcaacaggtttcgaccaacacagaggtgtcttccgaaatctaccagtgggtacgcgatgaactgaaacgagcaggaatctcccaggcggtatttgcacgtgtggcttttaacagaactcagggcttgctttcagaaatcctccgaaaggaagaggaccccaagactgcatcccagtctttgctggtaaaccttcgggctatgcagaatttcttgcagttaccggaagctgaaagagaccgaatataccaggacgaaagggaaaggagcttgaatgctgcctcggccatgggtcctgccccactcatcagcacaccacccagccgtcctccccaggtgaaaacagctactattgccactgaaaggaatgggaaaccagagaacaataccatgaacattaatgcttccatttatgatgagattcagcaggaaatgaagcgtgctaaagtgtctcaagcactgtttgcaaaggttgcagcaaccaaaagccagggatggttgtgcgagctgttacgctggaaagaagatccttctccagaaaacagaaccctgtgggagaacctctccatgatccgaaggttcctcagtcttcctcagccagaacgtgatgccatttatgaacaggagagcaacgcggtgcatcaccatggcgacaggccgccccacattatccatgttccagcagagcagattcagcaacagcagcagcaacagcaacagcagcagcagcagcagcaggcaccgccgcctccacagccacagcagcagccacagacaggccctcggctccccccacggcaacccacggtggcctctccagcagagtcagatgaggaaaaccgacagaagacccggccacgaacaaaaatttcagtggaagccttgggaatcctccagagtttcatacaagacgtgggcctgtaccctgacgaagaggccatccagactctgtctgcccagctcgaccttcccaagtacaccatcatcaagttctttcagaaccagcggtactatctcaagcaccacggcaaactgaaggacaattccggtttagaggtcgatgtggcagaatataaagaagaggagctgctgaaggatttggaagagagtgtccaagataaaaatactaacacccttttttcagtgaaactagaagaagagctgtcagtggaaggaaacacagacattaatactgatttgaaagactgagataaaagtatttgtttcgttcaacagtgccactggtatttactaacaaaatgaaaagtccaccttgtcttctctcagaaaacctttgttgttcattgtttggccaatgaatcttcaaaaacttgcacaaacagaaaagttggaaaaggataatacagactgcactaaatgttttcctctgttttacaaactgcttggcagccccaggtgaagcatcaaggattgtttggtattaaaatttgtgttcacgggatgcaccaaagtgtgtaccccgtaagcatgaaaccagtgttttttgttttttttttagttcttattccggagcctcaaacaagcattataccttctgtgattatgatttcctctcctataattatttctgtagcactccacactgatctttggaaacttgccccttatttaaaaaaaaaaaagaaaaaaaagagtttgttactctattgtatgttacaaaagaactatagactgtggaatgcagtttaaagatgacatatgccaacaaatgccttgtattatatggcactgccgtaattcaaatttgtttttattttggaaataaaagttcactgtacttttttttcattctcattgttacatgattttttaaaaaaaggaaaagaaaatgtgaaacacaatttagtcctcattatttatttgtagatcctgcagcatcatgttgtaattaattttttggaagtttccgttaaatgtaatattgcttctcttgttaccatactgattcttttctatttataaatgtattttgatgggcagtaaaacaaagtgtcttaaaagttttaaatagagaaaatgtgctttacacagttgcctataaaaagtgctctatgttatccaagcaattcatactataagcttcactcttattgttgtatgcaatttttactatcatgcaaataagcttaggtaaataaaactaatagatcaccttagaaaattatgcaattaatgtgaaaataattgatgtttgcaatgtgtcttcctttggtttacaatcaattttaaagctacatctgtataaaatttctgtataaaggtgtatttcttttttatgagtttatggctatgaaaacagctattttgttacagctggctgtttttataagtgtatcacaattttctttatgcagaaatgttctgactaggagtggttattgactgtaactacacaattaaaattgtttgtatcgt

SEQ ID NO: 612 - DNA, 3948 bp, Homo sapiens
tatttgactttcttctagagagatgacagagaccacccgatgtaggagaaacaggttagggtttaagaccagaatagctaggctgcaatctgggttctgcaagttattggctccgagactagggaaagtggcctcccctccccagtttacttgctgggcaaatggagataataagatacacacctcggcacctactgtgcgcaataatggaaaaactggatgggaaggcattttgcagaattacatgttgtgcatatactttactcatgtcattaatataatgcacatttattatacacctactgtgtgccattatgaacaaggtgatctgtcatatgacaatttggaagaaagtccacaggctaaggcagagaagaaatacttgtcagatggttgtactgcacattcatagattatgattagcaacagccagctagttggcatagcaacgtttccccatgaactgctaggcactgttcttaaaataggtatgtcggaggtgtggcggcagtggggacacgctgaggtagtgtggtttgatcgctctgcagaccaaagggctgcaacaaatgcaagacatacaaatggtgacacacatggtgacatacagagggtgacacacatgggctgtgtgctcagagtggccctgccattgcccttcccaggcaagccagcaggtcagtgattaaggtgacagatccggaaacatccattgttggagctggagacagcctcagacttcatctagtgtaagcatccttctcctccccattttacaggcgaggaaactgattcccagatgaggttaactgacatctgcggtccagtgacaaagccacttgactgcaaatgggactgaacgtggttcggatgtcattatgcagtattctccaaccgtgccatggggcaggctctgctgattcagaattttaggtcttggtctgatgcaattagttttctactgggttgcaatctatatggcatcatctagtgatagatgttagtttaaggaattctttcattttgtgtggaattcatgcctgcatttcgccctggggaagccctgaatcccaggatatcttggaaactcacctactttttggctagacttacatgattgatctttaaatccacccttccgtagccttccttacctagtttctcggtgtgaaatcaaacaccaaagctggtcaaaggtttttgaattgctttggaatgagattattatatgagtttagttacccatcattggagagaacagggaacgcaagtccttttacagctggggtcctttctatttgttttactcagcaatttattgagtaaacttttataaacttgagaggggcttttcatcttcaggctggtgagcttcttttaagagattcacagttcccctttggttccagggtgaaattctaggtctgaaacgtgaaaccttctgagaactcagccaacttctgagaatagggtgcgagacatttctgacatattttagacacaacctgtttttctctgttgagacagtgtcatgtggtcggaagggctctgggctgggagtccaggcagggtaagaggggctgcagccctgccacttaccccctccaggtcatttgaaggatgtaaagaccgcattctgtactgatgattcttcaccctggttgcatgttggactcacctgcagagctttttaaaacactgatgcccaagcctctctccaggccactgaaatcaagttgtattgggtggggccctgggcagagatctatttgaaaagctccccagtgattctaatgggcagctgggggagaaccatgggaatacagtcacatagtctctttccactcccccattccctgtgctatttaagttctaaaatgctattgtgggtttcttctgtgctagactcatatttatttatgctcctagctaggaaagaaatgtgtcctcagagtctacaggaggaaacttctcatctctggagaatttttgaccatgagttggctttgtaactctaccctcagagggccttttaaacagctggtggttcttaaagaaatgaaatgcatgatgtgttactgctttgagctccgctgtggcagagcctggagctgagctcttggtgactggtcactgcacaattccatgaaagttcagataatataattgggtggtaaatgacacactaaatgaatctcttgggtgcagttgtttgcatcctaaactccagaatatgcagaaagagatattctgtgatagatatatctgccagttgggtaagcaaacaaaagtagatttgtcttcggcatgtgcaccaatggcaaactgcattcctacctagctttgaaataaattattggaagttctctggtgccttaaggtggtgtagaaggaaaagatccctggggtttgttaatgtatttagtcctcttctctgtgttatgggaatttctaaaaacagataatttgtacgttggacctaaaactgctttcaagaactcagtagacttgggattgaaggattgggttttctctttcccatgtgaacttccctaaatcctactctggcttcagaaagcacagctcctatacaagtctgacttctgcatttttagtgtaaatgtaatgtattgagtaatggaaagactaatggaagaattgatagctcaaaaatgagttttttccaacaccatttttttttgtctctgaaaacaccagcaggctgtgtccaagcatgggctgatgatccctttatgtgatgatagaacaagggaggagagagacaaattaatgggattgttaaaaatggctgaaaacttgatactaactttgagtcagtattttctttttaaagtcgtgtaatacaatatttgtagataggacattgaaagtgatgggggaaataaatgtctatgcagtgacgttatagccattaattctttagtggaaaaggacaaggtctgtacctaacagcagtaggagagtgagttttggggccagacacgcgacggctctgctgccgactaactgtgcaagcttggacagggtacctacctctcttaacctcaaagtcctccatggaaacagtgggtaaggtgtgaagattaaagaaatagcatgcttcttaaagcactcagcatgtcagtggatgttgggagccttccctcacccctttgaaaatgggctctgcacaaacacattttggtgggaggctggggtctatcctaccaacctgagttgggggaataagatgatctcttccacagttcgggtttgcacaaccagcttttgcaggtgaggcagggaagaggcatgagtgtcattggcagagtgataagcgaggctggcaagttcactttggtagaacctctgtggactccttagttcttccaggttgaatcctgggcagaaatcacatgaaagctgtgaagcacagacatcagtttagaaattgtgtactttcccgctgaatcccaaatgcacaataactgtacaccttgcggttgcatgaatctacaaggtctcctatgcgccctcattcataaactcaaggctgagaatgttggcaggccaagtcctgcccctccccggagtgagctgccttggttcacacgggagtggtccagcgacaggacccgacacctcccctccggaagctcttcagcaggacctgcctcgggtcctggggcagctatcctccggggcctgcctgcagtgaaaccatcagtccgtggagatgttcactggattcctgaccagttgtgggtcgggctcaaccctccctctgggttttcaggatttgtaatgatcgctccatttgtgtaaaataggccggcattttctcttgttactgagatgtatttttctatgtgagttaaatgtataatttgtgtaattttgtacattaaaatgtatgctttttcacaattaaagggtttttttcccttc

SEQ ID NO: 613 - DNA, 3938 bp, Homo sapiens
aggcccctgctagacccatggaaagctgtatggagattccacttctccggggtttggtagtgattgggcggggatacctgagagggtgccaggaaagggtccagcagtcaaagagaaggggccaaggagtcgataattatgatgagctctggctttacttgtgcaccttggtctcctgctcggaacccttgaaaagaagctgcagcttttcgaggaatgcaggggcaagcaagactcacacaggcactggcattcttctagatccgatgtcccttgccccaccccttactgtggctctgccttgggtaatcacaacaaatcttcatgacttgcctaggctgtgccaaaaagatgtaaaaggaacccaccagggtaagatgccaacttgcagacgacgatcaactgtgtctgacaaggttgttctggaatcatagttgaagaaacagttggctagactctaacagctgttcacaatttctcgtatctctcctgatggaggacagtgtttttaaagtggctactccaaaaataatcacacaaggcaggatttcatctatccctaatattctcagaaggttcatcagtggcatgatgacagaaaaagtgctacaaaagccatgtgaagaagtacatgtttgcttccccttctgtcatgattgtaagtttcctgaagcctccagagccatgctgaactaaaccttgtgattacattgagcctacctgaatgatccaggataatcgtcccatatcaaggagagcaaagtgaatagtgtggtttgcttagaggacaatgctgctacaaaaacctgttccactccaaggccaactgcagttttgagatgtttgagttgctcccagttttatgctaccatgaatgagaggacggatccaacattcaaatggtcttgggtctgcatcttagctcggccactggatagctgtacaactacggagtcttgctctgctgcccaggctggagtgcagtggcgcgatctcgactcactacaacttccgcctcccggattcaagcgattctcctgccttagcctcccgagcagctggaactacaggcacgtgccaccacgcccagctaatttttttgtatttttagtagagacggggtttcaccatgttagcccggatggtctcaattgttctggagtctttctctaatacactacatacaatccataggcaaattctgttggcgtcaccttcgaaatctaccccaaatcttactatttttacagcacttcaaccaccagtaccttatcaaaaaccacttctatatttcttgtaaattattggaacagccctttacctggtcttcctgtttctgccttttgcatcccttcttccttcctctcctccacacataccactaaaatcgcagcattgcaactacagtaataaatacatcacttctctgcacaaaagcttctggtggcttcccccctcactcaggaagtctttatagtactccagaagatcactttctggccttccctgttgggctcattttctatttctaccttgcccactctgttgcagccacactctcctccctgctgattcgtgaacacactgaccatgctcttgcttcaagaacacttacattgctgttccctctgccaggacagttcctctagtatccactcacctcattcagtttctgcacaaatgtcacttttacaataaagtcatccctaaagaactaatttaaaattgtaccctactaaatagaaatccccttacctcacttagaacactctaaaagtgctctaaaggactaaattagcaatttagccctttagtaccccactgattagcaatccccttaccccacttagagagtgctctactagtactttaggtagtaccatctaaacagtgatgccactgtcagactaaaaatcaccatcataggtagatacattaatttaaatcagataaacgtaatcatctaatttgaacattatatttcatctacaatatccacttattcaacaggtatttattgaccatgctgtacaattttctaggtgcagaagatacatcacttaacaaagaagatcactacacttggttacttggagtttatatttgaattggtaaaatatatggcagaaacggaaagtgctgagaaggaccaaattagtaatgagtaatttagccctttagtgccctactgattagcaatcctcttaccccacttatagagtgctcttctagtactttagatagcagcatctaaacagtagcatctaaaccccttgggattgctaattaccctactttaggaggtaattacatgaggatggtgaagcctttatggaaggaattagggtccttataaaagcacttgaggcagtgggtccactctcttttgctcttccaccatgtgaggacacagcattcaaagcaccaccttggaagcagagataaggctctcaccagacaccaaacctgcctgccccttgattttggacatccagccttcagaactgtgagaagtacatttctattatttatgaattacccagtctggtattttattatagcagcataaagagactgtgatagaaggtatgaatttttgttctaaacgaggactgggggtggtaggaacttgaaaacaatgctaatataacaaatcaattagattgcttctagctattttatttttctttcattaattagtaattccaatccagttctgggtgtgaagttctacaggtaaaacatgttccttttagatattttcctctgaaaagaattggggaaatattgcaaaggaaaaggaaaagggaaaggagtgattctgacatttatgaatttgtgatattatgtactgaaattatgacctgattgtatatttctccctagtctgcatatagggaggttattcagcccttccaccttctgccatgggatggcacagcaagaaggccctcatcagatacaggcccctcagccttggttttccagtcattagaactcattgccatctatattttcactcctgagaagtttgaaaattaaaaaaaaaaaaaagatcatcaagaataagggatgaaccacaaaaagaaagaaaggctggaagaaggttttacagatttttaagaaatataactcatttgcctgagcattctttcaacatcctcattttaaggttacttctaaaaagaagaaatgatttttaatatttccttcatctggagaaataactgtcgctgttcggtattcacagacttcctgctgaggactgctatcgcaataaactctggtctcacgataggcagccatgatgagaaacggcccctgcatagagatggtttgaactgtgtggctccctcctgccccatataaccatcgcgagaagaatgtaacagcggccctccattagtgaaccttttaccgtgattcccgagtcataaccccgacccaccttgaaatctactgctggcattttctcgtcattggtttgacacatgaattagcagtttaagactttgcctccctactaacaccaacatcttatttgtatggctctggcactagttcctgcctccttgtcctctaactctaatcccagttatcacccttaattcagtatgctcttggatctctggttaaatctcttagaactttccattcaaaataacatactttatacttcagagccacccttaggtttggtacttctactatgtccatgaattgaatttttgcatctgtttctctatatatgtatttttcatttaaaatatttgttcttaagtcgtataatttacctggtgaaagaccatacaacagtacttgcatgtagtctccctataactgatgaacgtgcatgtttcttttctccgataaattttatgtcaattttactacattattgaaattcccccagcgtaatgtgataaaatttatcaact

SEQ ID NO: 614 - DNA, 5831 bp, Homo sapiens
agcctcggtgccgcctgccagcccgcggagggaagcggtccccgacccggccccggcccccacgctctggggcgcgagtcctgagaaggcgcctaacgtgtagcgcgcctggaccctctcgagatgctgcccttagagtgggatgaaagtctggggaggaacgccttgtcaccggcaaaaacagcctttctcttggtcttcgtctgcatcctccttttcaaaatatcttgatttcccccgcgcacccctgacccggctgcagcaccggccctccgagcgggaagagccccgtgaaggctccgcagagcgatctaccccgcgctcttgtccgtgcccagagagcgggttccacttggcagggattattttaaactgctaccagcaattcattcacctgacacccgacaccggcagcccagcccgccggaggcgagacaggattgtccggtgcccgctagaggtcgccaaacggagtccttttgcgctggttcttaagtggattcctagtgaaaaggcagacaactgaaaatattatgtctactttgagaattcctccagcaacccatacctaataagaaggatagaagaactcaacaagactgcaagtggcaacgtggaagcaaaagtagtatgcttttatagacgacgtgatatttccaacacacttataatgctcgcagataagcatgctaaagaaattgaggaagaatctgaaacaacagttgaggctgacttgaccgataagcagaaacatcagttgaaacatagggaactctttttgtcacgccagtatgaatctctgcccgcaacacatatcaggggaaagtgcagtgttgcccttctgaatgagacagaatcagtattgtcatatcttgataaggaggataccttcttctactcattggtctatgacccctcattgaaaacactattagctgacaaaggtgaaatcagagtgggacctagatatcaagcagacattccagaaatgctgttagaaggagaatcagatgagagggaacaatcaaaattggaagttaaagtttgggatccaaatagcccacttacggatcgacagattgaccagtttttagttgtagcacgtgctgttgggacattcgccagagccctggattgcagcagttctgtgaggcagcctagtttgcatatgagtgctgctgcagcttcccgagacatcaccttgtttcacgctatggatacattgtatagacacagctatgatttgagcagtgccattagtgtcttagtaccactcggaggacctgttttatgcagagatgaaatggaggaatggtcagcctctgaagctagcttatttgaagaggcactggaaaaatatggcaaagacttcaatgacatacggcaagattttcttccttggaaatcattgactagcatcattgaatattattacatgtggaaaactactgacagatatgtgcaacagaaacgtctaaaagcagcagaagctgagagtaaactgaaacaagtatatatcccaacctacaaaccaaatcccaaccaaatatccactagtaatgggaagcctggtgctgtgaatggagctgtggggaccacgttccagcctcagaatcctctcttagggagagcctgtgagagctgctatgctacacagtctcaccagtggtattcttggggcccacctaatatgcagtgtagattatgtgcaatttgttggctttattggaaaaaatatggaggcttgaaaatgcccacccagtcagaagaagagaagttatctcctagcccaactacagaggaccctcgtgttagaagtcacgtgtcccgccaggccatgcagggaatgccagtccgaaacactgggagtccaaagtctgcagtgaagacccgccaagctttcttccttcatactacatatttcacaaaatttgctcgtcaggtctgcaaaaataccctccggctgcggcaggcagcaagacggccgtttgttgctattaattatgctgccattagggcagaatatgcagacagacatgctgaactatctggaagtccactgaaaagcaaaagcactaggaagcctttggcatgtatcattgggtatttagagatccatcctgcaaagaaacctaatgtaattcgatctacaccaagcctgcaaaccccaactaccaagcggatgctaacaactccaaatcacacatctctgagcattctggggaaaagaaactacagtcatcacaatggtctggatgaactcacgtgctgtgtgtcagactgagctttccctgattcattctacaatccaagacttgctgcactgtcctgctgatgttcacagccgtgcctgggaagaaggcagccccactcccagtacatttcagtgggagacctctgcgtgcatccatggagacgcaatggggcggggaaggaactgtgggagtgcacgttccaaatcctgtgtctccacgtgtggatcagcagcacctcgctttcttgtcagagacctcgctgttacggagcgagacctgctgagaattgaggggctgagggaacccctccacctcctcccttctgcagcgccctgcgccccacccagcaacagcggccacttggcagtggggctgctgcaagctcagagccgctgccaccctgcatgtgtccgctcagctcggtcttatgctgtatagttactaaatatgtacaggagggccatggcatctttctgaatggatttttcttaagaaatgcgccagtgtttatgaggttcaaggtatttccctgtccttgctgttaccgtcactcagctttttctcgataggcttcatccttgtttttttgaaatgggggaatttgctgtttaccctctgcattcctatatgtgaccctccctcctactcctccaaggaacagaattaccgaggttctgacaaaagataagcctgtaaactcatcatctgtgttttgtggttggagagaagctggtgttctgcccggctctgcttggtcacagacagctccagcaagagcagttgttaaaagtgccaagcgtgtgtatcactgtgacaagccgtttgcttactgccctgttcccttgcagccaaaccagctgatgaagaactgctgccaggtgggtcctacagcaggtcacaaatgacctagtttcattttaagcagacagactctgtttggcctagaggtgtggagtgagagaactgtgtttgtgggtatgagtctgtgtggccaaccccatgacccccacccctccagcccaacatcttgtgagcacatgtgacctaggccccgggggacctgcctgctcctttggcttgggctcttcgtgtttcccacctgccctcggcacgagcccttggtggcatcacagttggccactcagctgtgctgagtagctgtgctacttgtgctggcagctgcaaggataggaatagctcagcgcccgatgagctccctgagcagatgtgaggctggcaactcccctgccctctgtttgcaggcacagggtcacagtcccaagaaagacaactggagtctgatctcccagccatctctggggttactaggaggcagctggatggcagatacgagaggcccaaatagccaagctgttgcaagacagagtggctacaattgaattgacaccctgggaagcacgaggtaacttggtaaggataatgatgctgtagatgtctgtgtcctcggaggctgagctctgcttggcagagagagcgtgctgtgtgaggtggagggcggttttgcagacatctcagcttcttttctgaggaggagttggttctcatcttaggcttctgcaagggcgagcatgggatgtctccaccaccacccactcttggagctgtgctgggtcttggcttggggcgctgagggtgggacctgtatcagaagcatttggtgagaggggtggaggtggcaggcaggggttctcctcagggttcccactgaggggtcccttcagcaaagacctgggaggaggtgccgcatcacgtggatgtttcttccctaaagaaaaagacacaggaaagctgtctgtctgtaccctgctctggatttattgtcgtacttggacccagaaggggaaatgattccctcaccctttcactttctctctgaacccctactaagtggtgactgcagattctggaaacaattagctgcccgtgactcagctgccagcttcattttctctgccttttgggagaggccctctcacccaggcccaagagatttggagacaggagtcaggccaggtctgaagcaggagaagggaggcccctcctatctacccagttgacatttggctttgggaaaagcgcagcttgttcgagccacgtgtgccaagcaggcttttccttcctcttgtaagtaaagctcgtggttctgtagtccagtcatcctaggagggtgatgttgactgagacttcacgctctccctttgtctctggaaactgccccctcgttctgacagaatcccccaggcaatggaggaagggtgccgaggcgcctctagtctgtgcctttgccgttggaagcatttggtgctgagagggtttcccagccacccgctccctttctggggccatggtgtccctgctgtgtgtcagtggcatgtcactgtggttcagtgagcacatgggtggacgtgcagagactgtctgcgcagcccccagcagacatgcccctggggtgaggacacaggctctgcaggccatctccccctctggctcagtcatcgcctgcccacccttcacttcttaaaggtgcgcaagagaggagggccgactggagggtgtcgccggaaggtttcagcctgcccttcacaattccccttgtgcacagcccagtttccatctctcagggcccacccaggaaaatggatttcaagtgggggttttcatccagagatttgtttaacacaaaacaagaaaagctgagaggcaaaacaggggagtgaggggcaacccagaggtggggaacaacaacagcaagccgcccccatcctgagactggctgggcaccaggggaggacgcgtcaccagagcctggggccaaggccactgggggacctgccacactgtggacctgtctggtgggggctggagcctcgagaagccatgattcttgtcagaaacatttccccaggcagagagagggggccccagcctctcccctcctcttggcctccagagtcctgcaggtgcctcacagtagtgaaacccagttggaagcagctgccctgggagcctgggacaggcgacccaccgggtcagtcccctgccactcagagcagagcagggggctgagggcaagcaggtggggctgtgcgtggcctcagtgcactcggtgtcatgtctgagcctggtgtttatgccccactgctgtcctaagtccctggcgaggggaggtggaggagctgccccgtgggtgtttggaggttctgttttactctgcctagagaggaaacggctttggggagggagggggaagcctttattctttactgttgtccctgttttcctttgggggaatttactcagttagcagcccctcctcaccattccccccaggaaggccatgtcccagttttctgtccacccctcctgttcctctgcactatgtctctgattttccctgccagggaagctaacccagagcacgcacctgtgctcatgagtgtttccgcaggataattcgttctgagcatgataccacagtgtggattgtctgtctgtaaggagatgccatctactaaccaatttgtattgtgtttccaataaattcctggaaatttt

SEQ ID NO: 615 - DNA, 5136 bp, Homo sapiens
ttctgatgccttatggttacgtgttaaatgaatcccagagtcgccaaaattcatcttcagcacagggttcttcttcaaacagtggcggaggttctggaatcccacagcctcctccgggaatgagcttttatgcagccaaacgagttattggtgataacccatggacacctgaacaattggaacagtgcaaattgggaatcgtgaaattcatagaagctgaacaggtgcctgaacttgaagctgttctccacttggtgattgcctctagtgatacacgccacagtgtggcaacggcagcagacctggaattgaaaagcaaacagagcttaattgactggaataatcctgccatcattaataagatgtacaaggtgtaccttggagatataccactgaagacaaaagagggtgcagttctgaagccagagttgaaaagggaccctgtcagtacaagagtcaagttaaagattgtcccccatctcctccgctctagacaagctgctgaaacgttcccagccaacattcaggtggtgtatgatggactttttggtacaaatacaaattcaaagttaagaacattatccctgcaatttgtgcatcatatttgtataacctgtccagaaatcaagattaagccattaggtccaatgcttttgaatggcctcaccaagctaatcaatgaatacaaagaggaccctaaactactgtcaatggcatattcagctgttggaaaactctccagtcggatgccacatttattcactaaggatatagcgcttgtgcagcagctttttgaagccctttgcaaggaagagcctgagactcgacttgctattcaagaagctttatctatgatggttggagcgtatagtactttggaaggggcacagcgaactctcatggaggcacttgtggcttcgtacttaataaagcctgaagttcaagttcgacaagtggctgtgaaatttgccagtacggtgtttccctcagatcatatcccttccagatatttgctgctactggctgcaggagatccacgtgaagaagttcatggagaagcacaacgcgttaaggtgtcttccaggtagaaacagaaaagaaagtacttctgagcagatgccttccttcccagaaatggtttattacatccaagaaaaggcttctcatcgaatgaaaactccagtcaagtacatgaccgggaccactgtccttccatttaacccagcagcctttggagagatcgttctgtacttgcgcatgtgccttgcgcacagtgcgggggtggtgcccacctctcagagtttggctgatatgcaggatcatgccccagccattgggcgctacatacggactttaatgtcaagcgggcagatggcaccctcatcatctaacaagagtggggagactaaccctgtccagatctacattggcctgcttcagcagctgttagcaggtgttggaggtttgccggttatgtactgtctattggaagctgtgtcagtgtatccagaaaagctggctaccaaatttgtagacaaaacagaatggataaagagtctgatgaataacagtaaagaagaaatgcgcgaactggcagcgttgttttattctgtagtggtatcaacagtgtcggggaatgagttgaaatcaatgatagaacagcttataaagactacaaaagacaatcacagcccggagatacagcatggatccttgcttgcattgggattcacggtgggaaggtatttggctaaaaagaaaatgagaatgtcagagcaacaagacctggagagaaatgctgacaccctccctgatcaagaggaactcattcagagtgctacagaaacaataggctcatttttggacagtacatcacccctcctggcaattgctgcctgcacagccctgggtgaaattggcagaaatggtccacttccaatccccagtgagggatctggctttaccaaattgcatcttgtagaaagcttactaagtagaataccttccagtaaagaaacaaataagatgaaagaacgagcaatccaaacactgggatattttccagttggggatggagattttcctcaccagaaactcctcttgcaaggtctgatggattctgtggaggccaagcagatagaacttcagttcactattggcgaagccattaccagtgctgcaataggaactagttctgtggctgcccgagatgcctggcaaatgactgaagaggaatatactccacctgctggagccaaagtgaatgatgtggttccatgggtgttggatgtgattttaaataaacatatcatcagccccaacccacacgtgaggcaagcagcctgcatctggctcctttcccttgtcaggaagctaagtacccacaaagaagtgaagtctcatcttaaagaaattcaaagtgcatttgtttcagttctatcagaaaatgatgaacttagccaagatgttgcatcaaagggccttgggttggtttatgaactaggcaatgaacaagatcaacaggaattggtttctacacttgtggaaacacttatgactggcaaaagagttaaacatgaagtttctggagagacagtggtatttcaagggggagctcttggcaaaacaccagatggtcagggcctttctacttacaaggaactttgttctctggcaagtgatcttagccagccagatctggtgtataaatttatgaatttagccaaccatcatgcaatgtggaactctaggaagggtgctgcttttggttttaatgtaattgctaccagagctggagagcagctggctccttttctgcctcagctagttcctcgactttatcgttaccagtttgatcccaaccttggcattcgacaggccatgacaagtatttggaatgcgttggtcactgacaaatccatggtggataaatatttgaaagaaattcttcaagatttggttaagaaccttacaagcaatatgtggcgagttcgagaatccagctgtttagctttgaatgatttattgagaggaagacccttagatgacatcattgataaacttccagaaatttgggaaacgctttttagagtacaagatgatatcaaggaatctgtacgaaaagcggcagaactagctctgaaaactctgagcaaggtctgtgtgaaaatgtgtgaccctgccaaaggagcagctggccagagaaccatcgctgcccttctgccttgccttctggacaaaggaatgatgagcaccgtgacggaagttcgagccctcagcattaacacccttgtgaagatcagcaaaagtgcaggagccatgttgaaaccgcatgcaccaaaactcattccagctctgctagagtccttaagtgtattggagccccaagttctcaattatttgagcctccgggcgacagagcaagaaaaggctgcgatggatagtgctcggcttagtgctgccaaatcttctccaatgatggaaacaatcaacatgtgcctgcaataccttgatgtgtcagtgctgggcgagctagttcctaggttgtgtgaactgatcagaagtggtgtaggtcttggaactaagggtggctgtgccagtgtcattgtgtcattaactactcagtgtcctcaggacctaacaccttactcaggtaaacttatgagtgctttgctgagtggcctgacagatcggaacagtgtgattcagaaatcttgtgcatttgctatgggccatttagttcggacctcacgggatagcagcactgaaaaactcctgcagaagctcaatgggtggtatatggagaaagaagaacctatctacaagacctcttgtgctttgactattcatgctattggacgatacagccctgatgtattaaagaatcatgcaaaagaagtcctgcctctggcatttttaggcatgcatgaaattgctgatgaggagaaatccgaaaaagaagaatgtaatttatggaccgaagtgtggcaggaaaacgtacctggatcctttggtggcattcgattatacctgcaggagttaattactattacccagaaggctttgcagtctcagtcctggaaaatgaaagcccagggtgcaattgccatggcatcaattgcaaaacagactagctctctagtacctccatatctcggaatgatactgaccgcattgctgcaaggcctggctggaagaacgtgggcaggaaaggaggagctattgaaagccattgcctgtgtggtgacagcttgcagtgcagagctggaaaagtctgtgcccaatcaacccagcacaaatgaaattcttcaagctgttctgaaggaatgtagcaaagagaatgtcaaatacaagattgtagcaatcagctgtgcagctgatatcttgaaggccaccaaagaggacagattccaggagttctctaacattgtcatacctctcatcaagaagaactcacttgaaagcagtggggtccggacaaccaaaaatgaagaggagaatgaaaaggaaaaggagctccagctggaatatctgctgggtgcctttgaaagcctgggcaaagcctggccgcgaaacgcggagacccaacgttgttatcgtcaggagctgtgcaaactgatgtgtgaacggctaaaactcagcacgtggaaagtgcagctaggagtcctgcaatcaatgaatgccttttttcaggggttaatgcttttggaagaagaacatgccgatcctgaggctttggctgaaattctgcttgaaacttgtaaatcaatcacatattctttagaaaataagacctactcatctgtgagaacagaagctttatctgtgatagaattgctgcttaaaaaacttgaagaatctaaacagtgggaatgtttgacatctgaatgcagagtgctcctaattgagtctttagctactatggagccagacagcagacctgaactgcaggagaaagcagcgttactgaagaaaacacttgaaaatctggaataaattagaaggggaagaaacaaacaagtgccatgttcattgggggttgaagtggtggtgttctttgaaaaaccaagtgggaaaaagtaaagattaatctgtagcatgcatcattccttggctgaaataaaaagaaaaagcctt

SEQ ID NO: 616 - DNA, 4113 bp, Homo sapiens
gatgtggtgacgtcgtgctctcccgggccgggtccgagccgcgacgggcgaggggcggacgttcgtggagggtaggatggtacacacatgggtggctgcttctgcatccccagggagcggagtctgacccggggcccaggtaaagaaactccttccaaggatccaactgtatcgagtgagtgtatagcctcatctgaatacaaggaaaaatgttttctgccacagaacattaatccagacctgacactctccttctgtgtaaagagccgctccaggaggtgtgtaaatggacccctacaggaagctgctcggaggcggctctgggcactggagaatgaggaccaggaggtgcgcatgctgtttaaggacctctcagcaaggttggtcagtatccagtctcagagggcccagtttctcatcaccttcaagaccatggaggaaatctggaagttctccacctaccttaatttaggctacgtatccatgtgtctagaacatctcctctttgaccacaagtactggctcaactgcatattggtggaggatacagagatccaagtgtctgtagatgataaacacctggaaacaatatacctgggactcctgatacaggaaggccacttcttctgcagagccctgtgctccgtgactccaccagccgagaaggaaggggaatgcttgacactttgcaagaatgagttaatctcagtgaagatggcagaagctggctccgagttggaaggcgtgtctttggtgacaggtggttcctaaagaattatccaggaagctgtggcctttccaggaagagggattggacaggctcctatcagattggcagaggacgctgtaaggccttgacgggttatgagccaggagaaaaggatgaactgaatttctaccagggagaaagcattgagatcatcggctttgtcatacctgggcttcagtggttcattggaaagtcgacaagttcaggacaagtgggctttgtccccaccaggaacatagatcctgattcttattccccaatgacttggtgtgtttcttcaatatgaagattcatgtctttcttcaattctggaaaattttcagtccttcttcctttgaatattgcctctctctcgttctttttagtctctcttctggaattcctattagaggagcaggaactctgcctttctcagtgatgaggagagatgctccctgttggccctgggaagtgataagcagactgagtgttccagcttcctccacactcttgctcgcactgacatcacatctgtctaccggctcagtgggtttgaatccatccagaatcctccaaatgatctgagtgcatcccagcctgaaggcttcaaggaggtcaggcctggcagagcctgggaggagcatcaggccgtggggtccagacagtccagcagctctgaggactccagcctggaggaggagctcctctcggccacctcagacagctatcgcctgccggagcctgatgaccttgatgacccggaactgctcatggacctaagcactggtcaggaggaggaggctgagaacttcgcccccatattggcttttctggatcatgagggttatgctgaccactttaagagtctctatgacttctccttctctttcctcacttcttccttttatagcttctctgaggaggatgagtttgtggcctacctggaggcatcaagaaagtgggccaagaagagccacatgacctgggcccatgcccggctctgcttcctcctgggccggctgagcatcaggaaggtcaaactctctcaggccagggtgtacttcgaggaggccatccacattctcaatggagcatttgaggacctatccttggtggccactctgtacatcaatttggctgccatctacctgaaacagaggctgagacataaaggctccgccctgttggaaaaggcaggtgccctgctggcctgcctgcctgaccgtgagtctagtgccaagcatgaactcgacgtggtggcctacgtgctgcgccaggggattgtggtgggcagcagcccgctggaggccagggcctgctttctggccatccgcttgctcctgagcctaggccggcacgaggaggtcctgccctttgccgagcgcctgcagctcctctctggacaccctcctgcctctgaggctgtggccagtgttttgagttttctgtatgacaagaaatatcttccacaccttgcagtggcctctgtccagcaacatggtatccagagtgcccaagggatgtctcttcctatttggcaggtccaccttgtcctccagaacacaaccaagctccttggctttccttccccaggctggggtgaagtttctgccttggcctgcccaatgctcagacaggccctggctgcctgtgaggaactagcagaccggagcacccagagggccctgtgtctcatcctttccaaagtgtacctcgagcacaggtctcctgacggtgccatccactacctgagccaggccttggtgctagggcagctgctgggtgagcaggaatcctttgagtcttctctctgcctggcatgggcctatctcttagccagccaggccaagaaggctttggatgtgcttgagccactgctatgctccctgaaggagacagagagtctcactcaaaggggagtcatctataacctcctgggacttgcactccaaggtgaaggccgggtgaacagggcagccaagagctatcttcgggccttgaacagagcccaggaggtgggagatgtgcataaccaggcagtggctatggccaatcttggccacctgagccttaagtcctgggctcagcatccagccagaaactatctcctgcaggctgtacgactctattgtgaacttcaggccagtaaggagacagacatggaattagtacaggtgtttctctggttggcccaagttctggtgtctggacaccagctgacccatggccttctttgttatgaaatggcattgctgtttggcttaaggcatcgacatctaaagagtaagtatgtcccatgctgctgggaagctatagagagaagtgttggatcaagttttatccatttcctatctcaagtcatctcattcatgtccctgctttgtgttcaggtcagcttcaggccaccaaatccctctgccatttctacagctctgtgtccccaaaccctgaggcatgcatcacctaccatgagcactggctggccctggctcagcaactcagggaccgggagatggaaggaaggctgctggagtccctggggcagctttatcggaacctaaataccgccaggtgagtcagggtcaggaactgtcctagaagcagctttccttccttaaggagaaacagtgttctttcccacaggaagcaagtccaaatgtacatggtataggcagggctttgtgcaaaagagcaagggctctgcagccaccacaatgcatccatcacttattagtggtgtagccttgggcaagctatttaatttctccatgtctcagtttcctcatcagccaaaggaagataataatggcatctatcttatagtgttattgtgaaggataaatgagttaatgctcataaaacactcataactgtgcctgatacatagataggtctcagtaatgccactgttacttgtgtgtttctataaccacctgtcacaggatcatgactgaggctgcataattcagagaagtggcagttataccaaggacagaagaaccttcaggaggtcttcattgccaagggcaactggttttaaagaaaggtcacccccactgaaagcaggggtgtaaaatgtcatggtaaaaaaaagttttatcgggaacttacctttaaaatgaaattgtagattatgaaatgaagtgtgttttcaccttttagttaagaatatttagattacaatttcaactttgcattaagtctcagaataaacatggaataaaaggagtgttgactttttggcttaattgtgctgacaaaatgatgtaacagcacaatggagcattctttgttttgtgattgattttttaggactaccttaaaaatcctcatttttgtaaaaataaatcaaaacttaacagttt

SEQ ID NO: 617 - DNA, 4007 bp, Homo sapiens
ttaataatggaatcacatttataaaccactctgcagctttcctgctcagcagcacgtcatcagctattttcctgtgagcacatgattgccggctgtgcgctggttctccgagccatgttccccgttcacaggctcttacccgcagtgctgccacggcgccgtgtgcatcccaggatcttgcaggtgtccgctggccgccgtctgcagggagtggcccttaagccctcacttggttctgtgtccccaggcttgctctcctggcctcttccctcaccatgccgcgtccccttactctgaccttggccaatcaggacctgcgtgtctggtggattttggaagccacctcactggggacgggggacataggccaggggacagcctgtgagagggctgggccacggggactgcagaggaggagcatccacggcacctagatgcaggagaccctcgtgggcaggagcgtggctggtggcgcggtggcctcaggagcagtgaggccgtcccctcaacctcttctgtggaagcagagatgccactcgccagacggcatccagtaaagggggcctgggaccctctgggggactctcaagtcccagaccccctggtccatgtccttgccactgtgctggccgaggggcccctcagcccacatggggcccagggagagggtcctgcctgtctgggcgggccccttggtgggccctggaggctccagtctcagggagaggaaagcctggtctgccttgacaccctcactcgcgtctccggggtctccagggcctggcccaggcttcccagggctgcgctgtgcttccttggtttctggaatcccttgcagatgacagacaagagaaacgggcctattgatgtctagcccgtgtgttgtttactgttcctggagtgagtggtggaaagccctgcgacgattggttcagaggataaggcctcacctggagagtatgtcttgtttactccgatgaggcctcacctggagagtgtgtctggtttactccaatgaggcctcacctgcagcgtttgtctggtttactccgatgaggcctcacctgcagcgtttgtctggtttactccgatgaggcctcacctgcagcgtttgtctggtttactccagtgaggccttacctgcagcgtttgtctggtttactccgatgaggcctcacctgcagcgtttgtctggtttactctgagcctcacattcctttcagtcgctccgtgaatcactgtctttggtgggtcaggaggaatccactccctgggcctgggcctggaccagtgctggtcagacctgctgtgtggggcctggggacgcttgcaggtgtggactggcagctcatcaggaagagctggggaaggcgtgagaccaagacagcctccggcctggagaaggcgtgaggcctaggcagccacatggctggggacagcgtgaggcccaggtagcctctgagggttgggggaggcatgaggtccaggcagcccctgagggctggggaggcgcaaggtccaggcagcctcaggactggggaggcgcgaggtccaggcagcctcaggactggggaggcgggagggccaggcagcctcaggactggggaggcgggagggccaggcggcctctggtgccgctgcgttgctcctgtgcagcctcggggggccccagggcatctggaggcatctgtgagcgtgtgggctgtcccagctgacgtgggtcctttgctccacaggccaccagcttgggctccccacggagggcagcaagtgggacttggggaacccggctgtcaacctgtccacggtggcagtgatgcccgtgtcagaggaagtgcccctcaccgccttcgccctggagctggagcatgccctcagcgccatcggcccgaccctgctgctgactagtgacaacataaaacggcgccttggctccgctgccctggacagtgttcacgagtaccggctgtccagctggctggggcagcaggaggacacccacaggatcgtgctctaccaggcagatggcacgctcacaccctggacccagcgctgcgtgcgccaggccgactgcatcctcatcgtgggcctggtgaccaggagcccacagtgggcgagctggagcggatgctggagagcacagctgtgcgtgcccagaagcagctgatcctgctgcacagggaggagggcccggcgccagcgcgcaccgtggagtggctcaacatgcggagctggtgctccggccacctgcacctctgctgcccgcgccgcgtcttctccaggaggagcctgcccaagctggtggagatgtacaagcatgtcttccagcggcccccggaccgacactcagacttctcccgcctggcgagggtgctgacgggcaacgccattgccctggtgcttgggggagggggagcaagaggctgtgcccaggtgggcgttctcaaggccttggcggagtgcggcatccctgtggacatggtgggaggcacgtccatcggggccttcgtgggtgccctgtactctgaggagcggaactacagccagatgcggatccgggccaagcagtgggccgagggcatgacgtccttgatgaaggccgcgctggacctcacctaccccatcacgtccatgttctccggagccggcttcaacagcagcatcttcagcgtcttcaaggaccagcagatcgaggacctgtggattccttatttcgccatcaccaccgacatcacagcctcggccatgcgggtccacaccgacggctccctgtggcggtacgtgcgtgccagcatgtccctgtccggttacatgccccctctctgtgacccgaaggacggacacctgctgatggacgggggctacatcaacaacctcccagcggatgtggcccggtccatgggggcaaaagtggtgatcgccattgacgtgggcagccgagatgagacggacctcaccaactatggggatgcgctgtctgggtggtggctgctgtggaaacgctggaaccccttggccacgaaagtcaaggtgttgaacatggcagagattcagacgcgcctggcctacgtgtgttgcgtgcggcagctggaggtggtgaagagcagtgactactgcgagtacctgcgcccccccatcgacagctacagcaccctggacttcggcaagttcaacgagatctgcgaagtgggctaccagcacgggcgcacggtgtttgacatctggggccgcagcggcgtgctggagaagatgctgcgcgaccagcaggggccgagcaagaagcccgcgagtgcggtcctcacctgtcccaacgcctccttcacggaccttgccgaaattgtgtctcgcattgagcccgccaagcccgccatggtggatgacgaatctgactaccagacggagtacgaggaggagctgctggacgtccccagggatgcatacgcagacttccagagcacctcagcccagcagggctcagacttggaggacgagtcctcactacggcatcgacaccccagtctggctttcccaaaactgtctgagggctcctctgaccaggacgggtagaggcctctgctaaagagcccggatgcagcgtcttccgtgggactgtccccaaggctgaggctcctgccaagtcctaggggcctctgtacctgccctgctggaagccctgacttccccggggccccaggctgtgttagggttctctgggcctcttctttgtaccagcagccctgcatacagggccctgtgagcccccctgcagtcctgtgaggcccctgaagctctgtgaggcccctgaagctctgtgaaccccctgcagccctgtgaggccccccgaagccctgtgaggccccccgaagccctgtgaaccacctgctgccctgtgaggcccccaaagccctgtgaactgcctgctgtcctgtgaactgcctgctgccctgtgaggtgtgggagccctgatgctgccgtgtgatgtttcaataaaggtggatctcactgtt

SEQ ID NO: 618 - DNA, 4371 bp, Homo sapiens
aaaagtctgagccccgctccgctgatgcctgtctgcagaatccgcaccaaccagcaccatgcccatgactctggggtactgggacatccgtgggctggcccacgccatccgcttgctcctggaatacacagactcaagctatgtggaaaagaagtacacgctgggggacggtaatggcaccctcgtgtccgggccctgcccactcacgctgagttggcaccaagcaacccatggtggccacctgtggctgcctctgcaggcctcccctgctggagctgcaggctgtcccttccctgagctcccgtgagtgagccctctggccttgcaaggcagaatgctggggcgggatgctggacaccctgtctaattgggttgggtgtccctcagagcttccctaaaccctggaagccttagccgttgtggggtccagagccctcagtgggattctttctccctgaaccctgggatgtgggactgagtggtcagattctagatccacctgtctcagggatcttgccactggctccttgggagggtccccgggaaggagggctgggctctggggaggtttgttttcacttcttccccaccacagctcctgactatgacagaagccagtggctgaatgaaaaattcaagctgggcctggactttcccaatgtaggtgcaggggaaggggcggttttgggggaaagtgcgacgtgtctctgactgcatctcctctccccaccttagaggtgttaagatcaggagtcttctgcccaattcctctcactcttggctgtctacacagcccttgcatgatgttctgtgtcccagctcatttattagtgtgacagtatttctatctcaggcctgccatgagcaggccctggtctcctctctgcccttgcatatgggaaggggatgctggggagcctggtggcccaactgagcttccccggtttcccatctatccagctgccctacttgattgatggggctcacaagatcacccagagcaatgccatcctgcgctacattgcccgcaagcacaacctgtgtggggagacagaagaggagaagattcgtgtggacattttggagaaccaggttatggataaccacatggagctggtcggactgtgctatgacccagattttgagaaactgaagccaaaatacttggaggaactccctgaaaagctaaagctctactcagagtttctggggaagcggccatggtttgcaggagacaagatcacctttgtggatttccttgcctatgatgtccttgacatgaagcgtatatttgagcccaagtgcttggacgccttcctaaacttgaaggacttcatctcccgctttgaggtgatgcccccatcctcctttctctttgatgccccttgttcctttctctcctttcagatgctttcccagtcctggagctacacaaagaataactcgtatgtattgagtacgggcttcatgccaggaatcatgcccagcacattatacctatcgtgtagaatttgaaatttccaacattcctacagggtgacagaattatcttgcccattttagagataagaaaactgagaatgagagggtcagtcctttgctcagggtcccagagccagtggaggctgtgctgggctccctgtgagcctctggatctatgggtggcagtcagggctctcccatttgtgacaaaaggagaagcctcaggcctcatccagcctgggtttcacagcccagaacactttgaaagaggcagagcacttcaggaccacggatgcagctggcaatagtaggactgacacacagtggcattgatgttgagtactaaacctgcaggcagtattcatagccacccccagaagctttgcatgatcggacccccatgtggagaatcctgagatccggagctgtggctggagctggattagggtacatatgtgggtgcccctgttgaagcagtgtgtgttgaagtgctctgtgctggggcactctccttctttatctttcttcctctctttttttccctccaatgttccacgtcttccccctgtgagatgagtagcacactgattttactcctattcaccgaccttctcctctgcatgaggcagggtgtgaggcacagtgggagttgcatagatgactgccccatcctggaaatgagtgcagtgagaggcctgcaggcagagcagcctgtgaggtgtgtgtggcaccacctgggtaccgggcctggggcctgcccctcactcacggggaaccatccctcacctgtgttgaagttgtttgagagcagcaaatcctactttagtacagatttggggatttgaggcattagtccaacaggcttctgagcctagaatctgtttccctttcccactccccatcaagaaatctgcttgctcagctagttcccatcagctctggttctggtccagcctgagcagccttggggttatgtaagaggtggtgggaggggagcggtggggaacagccgagggctggggcatggagcctgcctgggcctggccctggccctttggggagagggagccctggatctctttgaattctttagaagttacatggtcattgaatcctggtaagattgtgtgcagcacacctgagtgtcatgtggcctggctagcagtagtagggctggagatgtgatgggggcacagggacatagggagatttagctcaggtaccaggtggagaagtttggactttatgctttaatgggaatgattagagcctggtctggccttcctttggtggttcacccttaccctattcagtttcatccaggttttgctaagtcattgggtgagatctgtgctctcttcttggctgcacaggtgtgttctgagcccctttgttctgctggaggtcctttctgtgtgtgcaatcctaggcaagccaagaacctccctgtgaaaaaggagaatgtttgtgccgacaaggagtgacaggatctggcatggggtgtggctgggtggaagaggaggagaatttggcaaaaacatgctagaactgaagacagaaccaggctatattccagccctgtcccacttactagctatttgagtgtgaggaagttgctgaacttctgttcttctatatgagaaacggtgataatagaactgaccatggagggtagtcgagtggattttctaagcctgtgttgtaatttctgttggatataaagcacccagcacagtgtagatctttcgtaaatggtagctgttattatggtataacattacttaaaggaagttggaagagttaacttagaagagctggggacctaagagaccgtgtgatgctccagcacttgagcccacatggaaaggctgtggccagggccctgacctgctgtgcctgcagcaaagctacttgagcccttctagacagcagacctggctctggccccttcttcccgccctcagggtttgaagaagatctctgcctacatgaagtccagccaattcctccgaggtcttttgtttggaaagtcagctacatggaacagcaaatagggcccagtgatgccagaagatgggagggaggagccaaccttgctgcctgcgaccctggaggacagcctgactccctggacctgccttcttcctttttccttctttctactctcttctcttccccaaggcctcattggcttcctttcttctaacatcatccctccccgcatcgaggctctttaaagcttcagctccccactgtcctccatcaaagtccccctcctaacgtcttcctttccctgcactaacgccaacctgactgcttttcctgtcagtgcttttctcttctttgagaagccagactgatctctgagctccctagcactgtcctcaaagaccatctgtatgccctgctccctttgctgggtccctaccccagctccgtgtgatgcccagtaaagcctgaaccatgcctgccatgtcttgtcttattccctgaggctcccttgactcaggactgtgctcgaattgtgggtggttttttgtcttctgttgtccacagccagagcttagtggatgggtgtgtgtgtgtgtgtgttgggggtggtgatcaggcaggttcataaatttccttggtcatttctgccctctagccacatccctctgttcctcactgtggggattactacagaaaggtgctctgtgccaagttcctcactcattcgcgctcctgtaggccgtctagaactggcatggttcaaagaggggctaggctgatggggaagggggctgagcagctcccaggcagactgccttctttcaccctgtcctgatagacttccctgatctagatatccttcgtcatgacacttctcaataaaacgtatcccaccgt

SEQ ID NO: 619 - DNA, 3578 bp, Homo sapiens
cttaaagcgggcgcagcattaacgcttcccgccccggtgacctctcaggggtctccccgccaaaggtgctccgccgctaaggaacatggcgaaggtggagcaggtcctgagcctcgagccgcagcacgagctcaaattccgagatgaacatgttgaaccaacaaatgaacctcctcaggacttctgatgggattgggcccattttcctttcactgcgtccctcatgctgtctcctggttgcggcgcaaggaggctgccacggtgctgggatcctttttctccgcagagctgtctggagcaacacctgcggcgatgggaagccatgaccctggtttctcccagatactattacctctgtcccttcaccgatgttgtcaccaccaacctaaagcttggcaacccgacagaccgaaatgtgtgttttaaggtgaagactacagcaccacgtaggtactgtgtgaggcccaacagcggaatcatcgatgcaggggcctcaattaatgtatctgtggaaggaggcaaaaccggaagaccttatggattcaaaacttagatgtgtgtttgaattgccagcagagaatgataaaccacatgatgtagaaataaataaaattatatccacaactgcatcaaagacagaaacaccaatagtgtctaagtctctgagttcttctttggatgacaccgaagttaagaaggttatggaagaatgtaagaggctgcaaggtgaagttcagaggctacgggaggagaacaagcagttcaaggaagaagatggactgcggatgaggaagacagtgcagagcaacagccccatttcagcattagccccaactgggaaggaagaaggccttagcacccggctcttggctctggtggttttgttctttatcgttggtgtaattattgggaagattgccttgtagaggtagcatgcacaggatggtaaattggattggtggatccaccatatcatgggatttaaatttatcataaccatgtgtaaaaagaaattaatgtatgatgacatctcacaggtcttgcctttaaattacccctccctgcacacacatacacagatacacacacacaaatataatgtaacgatcttttagaaagttaaaaatgtatagtaactgattgagggggaaaagaatgatctttattaatgacaagggaaaccatgagtaatgccacaatggcatattgtaaatgtcattttaaacattggtaggccttggtacatgatgctggattacctctcttaaaatgacacccttcctcgcctgttggtgctggcccttggggagctggagcccagcatgctggggagtgcggtcagctccacacagtagtccccacgtggcccactcccggcccaggctgctttccgtgtcttcagttctgtccaagccatcagctccttgggactgatgaacagagtcagaagcccaaaggaattgcactgtggcagcatcagacgtactcgtcataagtgagaggcgtgtgttgactgattgacccagcgctttggaaataaatggcagtgctttgttcacttaaagggaccaagctaaatttgtattggttcatgtagtgaagtcaaactgttattcagagatgtttaatgcatatttaacttatttaatgtatttcatctcatgttttcttattgtcacaagagtacagttaatgctgcgtgctgctgaactctgttgggtgaactggtattgctgctggagggctgtgggctcctctgtctctggagagtctggtcatgtggaggtggggtttattgggatgctggagaagagctgccaggaagtgttttttctgggtcagtaaataacaactgtcatagggagggaaattctcagtagtgacagtcaactctaggttaccttttttaatgaagagtagtcagtcttctagattgttcttataccacctctcaaccattactcacacttccagcgcccaggtccaagtctgagcctgacctccccttggggacctagcctggagtcaggacaaatggatcgggctgcagagggttagaagcgagggcaccagcagttgtgggtggggagcaagggaagagagaaactcttcagcgaatccttctagtactagttgagagtttgactgtgaattaattttatgccataaaagaccaacccagttctgtttgactatgtagcatcttgaaaagaaaaattataataaagccccaaaattaagaattcttttgtcattttgtcacatttgctctatggggggaattattattttatcatttttattattttgccattggaaggttaactttaaaatgagccctatcactgagaaatacgtgtttcatgatttaactctgtgtgtgtgtgtgtgtgtattttttttttggttgtcttcagctgacagtatgaaaaatgaaactgctgaaaaagctgagcacctggtcacccttggccttccattgctttggccttcagtaaaaagcagcctcccttctaggtcagggaaccatgccattgagactagtaacgggcgttctgggcacagtcccactgcgcacaggtttgagaggacaagttcatcagaaggaaggcagtccttagaagtcacatacgttgagccacgttgctcctaagcctggctctgtcaagctgggtcaggggccttgaaactggagaagtggaagtctatggttggtctgagtaagtaacttcctgtcttcatgaaaaaagttgactttgaatcccaggtactcacagaaatggtgaacagacttagttgttacccaggcacccatggattgtgttgagtgtgcagacagggaggccaccccaataggaattcgtctccaggatttttcccatgtgtcccccagtacttataaaagggagtgaaaagaccgagctgtaaggcatgtgccttctgccacctgactttccgtgaggggactaaaatttactaattgtagttgctgcagccagttaagtcctgtagcttccaggccctcatgtctttgataggagagtgcttaggtggtccccaacagtgcctaggggtacagtacagtcccattacactagagcagggctctatttatttttaaaggatatggccgtgtgttttgataaaactttattcacaaaaacagccgggtcatgggatttggcttgtgagtctgtaacagttcttaaaaagaatatctgagaaactactctgttttagacctttgaaggtgatttagagttttgtgtacatctaggagaaggtgttcagcttctcagaggatgtggacattttggttgcagctaaaaatcagtctctgaagtctctctcccttctagaggttaggacttggtgaacatgtttgtgggccttttgactgagtggcagaaggaaactgctcaggaagagaaacaggtgactgatgggaaggttgattattttctcagtcatcctggcagccaaaaatgtgccaggaaaagaaagaatgtggagcacgcgtggctcctggaggacttggagatgcatgcacatttagggtgttttccctagaattacat

SEQ ID NO: 620 - DNA, 4759 bp, Homo sapiens
atttgccccagctaagcagcgagagcttgctgaagcccagagggctgtgggaccatgagggcagctctctggaccctgggactcgggccccttcttctgaatctctgggcagtccccattggtggaccaggtgctctgaggctggcgtacagacacagcacgtgcgacggagtggtgttggtccgacaccacggggcatggggatacgtgtgcaaccaggagtggacgctggcagaggcctctgtcgtgtgcaggcagctgggctgcggccctgccgtgggcgcccccaagtatgtcccgctgcctggagagatggcccagccctggcttcacaacgtgtcctgccggggcaacgagtcctccctctgggagtgcagccttggctcatggtgccagagcccgtgcccccacgcatgggtggtggtcgcgctgtgctccaacggcactttccgggagctccggctggtgaagggccgcagtccctgcgcgggactccccgagatcagaaacgtcaatggggtggaccgcctctgtgtcctgcatgtggaggaggccatggtgttctgccgggagctggggtgcggccctgtgctccaggccccccgccgggacgtgggcgtcgtcaggaagtacctggcctgcaggggtaccgagcccaccatccgcagctgcagactggacaacaacttccgcagcggctgcgacctgcggctggacgcagaggtggtctgctcaggtgaggctgccacctgatgttcccagtgacccttgggatgatgctgggcccggacctggggagggcagggagaaggggggtgggcgttcccacggatgggcccccctgtcctgcatgagacattgggcgcagaggtgggaaagggcctcagctctcacgctggttctcagcagagtggagctgagtttctggtggccccacagaggtgtcctggctcagaacccgcaggccatctaggggtcctggctgccgctgcaagtctgagctgcctcagctgtgatctctgcatgtctaacatggatcggggttgggtagaggtcacttcttcccagccctgcctcaactgtgtgtgagctgcactggcctcacagctcctggccttgttgtgcatatgaggagcagctgaaatgaggtggatagtctgcctgctgcggtaccccagagagggtggtgctcagtggaccaaggggtgccctgacctcgcctctgggattgcagagggtgttgctgtcatggccccggacaggcagaggctgtgaaatacgtgagcacctgcagcaggtgaccctgaccctgaccttggtgatgcggccaaggacgtctgctctgctctgggtgccgggtggaagggcctgtggctgcaagttcctgcctgtgcttggtagaccctctgcctagatgcaggtgatggctcctggctgaagccttctgcagtctgaggctcagggccaggctgttgacctgagaacacctgtctcctgcctgagaggacgtctgcccccaggacacaccgaggcccgactggtgggcggcgagcacccctgcgccgggcgcctggaggtgacctggggcaccgtctgtgatgcggccctggacctggccacggcccacgtggtgtgccgggagctgcagtgtggggcggtcgtgtccacgcccgagggcgcccgcttcggccggggctcggggccggtgtggacggaggccttccgctgtgcgggcaacgagtcgctgctgttccactgcccacgggggcgtgggagccagtgtgggcatggtcacgacgcggggctcaggtgctcagagttcaggatggtcaacggcagcagcagctgtgagggccgcgtggagttccaggtgcaggggtcctgggcacccctctgtgccacccactgggacatagcagatgccaccgtcctctgccaccagctcaactgtggcaacgcggtggccgcacctggaggaggccattttggggacggggacgctgccatctggcctgatgcctttcactgtgaggggacagagtcctacttgtggaattgcccagtaagcaccctgggggccccggcctgtgccccgggaaacacagcctccgcggtctgctcaggtctggcccacgccctgcgactgagggaaggacagagccgctgtgacggccgcgtggaggtctccctggatggcgtgtggggccgcgtcctggacgatgcctgggacctgcgcggcgcgggcgtggtgtgccggcaactcgggtgcagaggggcccagcaagcctatgacgcacctgcccccagccgcggatccgtccaggtggcgctgagccgcgtgcgctgtctgggcaccgaaacccgcctgactcagtgcaacgtgtccgcgaccctgcaggagcccgcggggacctcgcgggacgccggcgtggtgtgctccgggagcctcagggtgcggctggccgcggggccggggcgctgcacgggggcgcgtggggcaccgtgtgtgacgatgcctgggagctgcgggacgcgcacgtggtctgcaggcagctgggctgtggccgcgccctgagcgccctgggggccgcacacttcggagccggggcagggcgcatctggctggacgagctgggctgccagggccacgagtctgcgctgtggcagtgcccgtcggcgggctgggggcggcacgactggaggcacaaggaggacgccggcgtcttctgctcaggattgtcagaggacaggccacaggctgctggggagcccctcaactgctcctcctggctcggctgcccagaggagggcgcactgcgcgtgcgcgggggcgaggaccgctgctccgggcgcgtggagctctggcacgcgggctcctggggcaccgtgtgcgacgatggctgggacctggcggacgcggaggtcgtgtgccgccagctgggctgtggtcgggccgtcgccgccctgggggccgccgcctttggccctggctccgggcccgtgtggctggacgaggtggggtgccggggcagcgaggcgtccctgtggggctgccctgcggagcggtggggacgcggagaccgcgcgcacgaggaggacgcgggcgtgcgctgctgggagcctggcccaggccccccactgcctgcagctcccttccggacattctgggtggtcagtgtcgtcctgggagcccttcttggtcttctccttctgggcctcatggcttttctgattctgcctcgagtcacacaagccatgcagaggggtctgggaagatccgaggtatctcctggagaagccatctatgatgtcattggggaaatgccgctagcaggactgtacgaggaaatcatggaggccgaggctgtgctccaagatgaggaggacggaagtgtggtgaaggtggacacagaagccgcagtttcaggggaggtgtctaacctcctggagggacagtctatacgtgcggagggaggacacagcagacctgtttctcagggatatgacgaggctgcgtttcctctggaggagatgacgttgtaaagcaacctgaggatgagatacaccagctggctgtcgaaatcacagctcttcattttcttgtacaattgtagtggatttcgtgagaacaccttggatgcctttctcttgcaatgtcctccatgtccatgtaaaatccagtccttccaggccctgcctggctctaaacctcatccccttcgagggccatctgctgtggacagttgtgctgtgtaaccttcagatttcccacacattacagcaaatgcaaatacacatagaaatcagtggttccatttgtggtttagagacacatggtgccatcttcatcttccgctccacagctcgcttctggcacccagcagtgggttgcagagctccccatgccagaaccttcctctttttttcttaaaaactcttcttaattgaatccaaagtatcttttaaatgttctacttgtgtaatcatgtcatctgtgaatattcagatttatcttctccttccaatccgtgtacatttaatctctttttctgtgccttatttcgggggctgggacccttcagtccagtgttgaagagaggcagccagtggaggtcttgtctcattcaaggactcagagcaaatgtgttccacatttaatttcactatgaaatataatatttgatgttcagttttgtagatgctatttatcagatcaaggaaagcccagtctatacctaatttgttaagggttttgctttttatcataagtgttgacttttatcaaattcttttttgtatctattaagatgatagatgattgattttcatatgttaaattaaccatgggttaaacaaacttacctttatcatgatatattattctttttgtatttcacaggaattagtttggtaatatgttgggtcaatgtttaaaaaagaaaatgatgtgtaatttttttcttttattgtagtatttctgtttaatttttggtatgaggattattcaggtctcataagagttaggagtatattctcttttaaaaaatatttgctaatttacactcccaccaacagtgtaaaagtgttcttatttctccacatcctctccagcatctgttgtttcctgactttttaataatcgccattctaactggcatgagatgatatctcattgtggttttgatttgcatttctctaatgaccagtgatgatgaactttttttcatatgtttgttggctgcataaatgtcttcttttg

SEQ ID NO: 621 - DNA, 4231 bp, Homo sapiens
ttctagtctgggccagcatctccagggctgggcataggctcttggcagagctttcctttcagtatcttttctgctgacttggagtgaggccacgtacatggacctggggacggggtccaggaggtatccaggaaggagaactggctcctgggccgcacaggatgggagcacggggccagagggcaggacagtctcggcctgtgccaaggctctgagggctaagaaggccacgggagtgaaccagagccaccctggggaggccagggcaggtgcagcagaggcaaggaaccttccccagggtgccacaggaggcagacaggaggcagagggctgtcctcaggcaggtgccccaggggagcagaggagcagccagagactgcatgtattagggtggggagtggggacaaaagcctggggtcctggggctcaccagggaaaggggagctgaggctctctggggagctctgctttaaaggggcacagaaaccccagggtgtgaggactgggtggggacatgtcagcagcatggccaggcagccaagggatcagagcctgctgttttagggggtgagagtaggatgatgacaggggcagggctcattctccatattggggtcctggagggtccaggctcacaaccaaggtcctttggccaggggtagatggggttgaacctctggcacctactctggaggcatctgccctgggcctgctgagtgcatggaggctggtggcccggcatgctgacagttctcctggccctgcagatcctggcagccctggagaaggatgagcaggcgcggcggcagcggctgcggagcaagctggagcaggtggtggacacgatggccctgagcagctgagccccagctgtgatcatccagcatgatgcagcgtgaggacagctgagctgggaccgggacagccctcaccgcatgcgtgtggagtgtccggtggtgctcgggccgccgcagtgcagcgactgcccggccctccctcccctgcctcacccggtcgggtcccggctcttcctgtgtggaggtgatggtacctgccacaccacagctgcgcacacagctgcttgctcaggggccgggacagcactgggtgctcaggctggccaaggaccttcattgcctggcaagagctgcccagtggccttcatgggagaagggctgacctctgaggggctgaggggtgaggccagggccctccagggggaggggtagccagcttgggctgtccccttgagaccaggacaagaggctgggggtgtcagcattcccagctttccaagctgcccccaggcggcagagtctgagggtcccggggcccggttggcagctggagaaagaggcaaaaagcccgtagccgggcaagaggagctcaagtcggtctgggcccgttgccaccgactcccacctccagcacccatgcccgctgcaccgctgccatcctcagattcaccgcgtgctctgcgcggccgaggccggagcaccacatccacctcgccccagagaggctctgctccctcctatggaggggctgtgggccaggctgctcagactcctgggtggcttccagacggaccgggcagcccctctccgtcctcagggctgtgcctctgggagccactgggccaggggccccgggtcgcagagagcacgttcccgttatttattcccctccgcgtcctacacaggctgccctggcagctgtcttcaagggtaggctgagctccccaccctggagcccctgagggcggcccctgagcactcctctctctccactctctctgtccctgccccagcggcttccagtgtggcatctcagcagtgtcctggcccctccagagcagtgggacatctggggactgtttttgtgtttaggggaaaaaattctgctgcactctgcttgggccttgaggtctgtggcagggctcctctggcccgcagtggcctggatctatctgggccatgagtgacgggcagtgaccagagggactggaggccagcggtgtccacccttgccctcagcaagagagaatgcattcttaaaagaaagctgtacatgtatatatatgcatatatatatatgtggctctagcctcaggctccagccccagtggggtactgtacagttaactgaagaagaattttaaagacgatttgaacaagaaaatgaaggcagtgggaaagcaatgccaaatggttgtggagaaagtggccggagcctccctggagtggagcagccctgaagcctgtgccccccgacctgcgggccgctgttttggtttgacatgacaaggaaaggacttcctgctgaccctgagagcctctggggtgccgcggcaccacggggcatgcatgattgtgctagcgtttagtctgagttgatctttttaaaactgcaagtgttgaatactagaggttgttagacccttttttatgttttttaactaatcagtcacttgtaaaagcaaacaagcggtccatccccttttcaaggtcacttttttgatggtaccgaagatcccatggacattaagggacagctaactgtggccagactcagccccatgtccttggccaggcccaaggagaggactcggccccatggggtgtgccagtcttgcagtccgccccacctgagtagcgtgagccagatgacgccacagagacccgcctcttccctgaacgcgggtcggtgtggaatcagtgactgctgactcagggagctccttggccccgtgggcactgtgccagggctggggccttctgctgctgccacacccagctcaggcctgggccagcccctgcccccagcccactgagggggtgggcttactccctgggcagtcttgggggccagagctgaggccagtccatattacagtggctgggctgtttttttcagtagcccctagcattggctgggattcctgttcctgggtgcgcctccacctcccttctgatgtttcctggctatggtggggtgggaacctcagtttcccccaaagtcttccctggatgctggcttcaggttgaagtccctggttcttccagttcctcacgggttaggtaggggctcctgcatcaccttcagaatccagttccaacccccactctccttaggctttgtgctctgctctgccctgccaggctgcccttgtccatgtgagtagcatgggcgggtggtggggacggcagtggtgatgaagggggtgcaccacaggcctcatgaagcagttcccacatgggcgtgtggctggggcgtggccaccacagagcacatggctgtgtctaggcgcaagcactttagcagtatctgtttacatgcgcaaggatcaagccgactacctgtgctgtctactgggacagcagtctccgagctactccgtacctccctctgccaggtcgtggagttaggccccagtccctacttgtcactggttcccactgtgctcctaactgtgcagcacctgggagctctggcctggggctggaggccctggtaggagctgcagttggaggccgttctgtgcccagcagcggtgagcggctcccatgggccctgtgtctgcagggagccagggctgcggcacatgtgctgtgaaactggcacccacctggcgtgctgctgccaccacttgcttcctgcagcacctcctaccctgctccgtgtcctccctctccccgcgcctggctcaggagtgctggaaaagctcacgcctcggcctgggagcctggcctcttgatatacctcgagcttcccctgtgctccccagccccaggaccactggccccttggcctgaggggctgggggccccacgacctgcagcgtcgagtccgggagagagcccggagcggcgtgccatctcggctcggccttgctgagagcctccgccctggctttctccctgtctggattcagtggctcacgttggtgctacacagctagaatagatatatttagagagagagatatttttaagacaaagcccacaattagctgtcctttaacaccgcagaaccccctcccagaagaagagcgatccctcggacggtccgggcgggcaccctcagccgggctctttgcagaagcagcaccgctgactgtgggcccggccctcagatgtgtacatatacggctatttcctattttactgttcttcagatttagtacttgtaaataaacacacacattaaggagagattaaacatttttgct

SEQ ID NO: 622 - DNA, 4218 bp, Homo sapiens
acgggcagccgttaggggcggggtctgcagccgcccgcgcgcggctcgcgccctcccctttgtgtcgccatggcggcggcagcggcgacgagaacggcgagcgaggggtcgagcgcggccggggcctgaggaggctacgcgaccatggtggctctcagctcctcgaggccccttcccgcggctggctgactgcgcccatttccactacgagaacgttgactttggccacattcagctcctgctgtctccagaccgtgaagggcccagcctctctggagagaatgagctggtgttcggggtgcaggtgacctgtcagggccgttcctggccggttctccggagttacgatgactttcgttccctggatgcccacctccaccggtgcatatttgaccggaggttctcctgccttccggagcttcccccgccccccgagggtgccagggctgcccagatgctggtgccactgctgctgcagtacctggagacactgtcaggactggtggacagtaacctcaactgcgggcctgtgctcacctggatggagctggacaatcacggccggcgactgctcctcagtgaggaggcgtcactcaatatccctgcagtggcggccgcccatgtgatcaaacggtatacagcccaggcgccagatgagctgtcctttgaggtgggagacattgtctcggtgatcgacatgccacccacagaggatcggagctggtggcggggcaagcgaggcttccaggtcgggttcttccccagtgagtgtgtggaactcttcacagagcggccaggtccgggcctgaaggcggatgccgatggccccccatgtggcatcccggctccccagggtatctcgtctctgacctcagctgtgccacggcctcgtgggaagctggccggcctgctccgcaccttcatgcgctcccgcccttctcggcagcggctgcggcagcggggaatcctgcgacagagggtgtttggctgcgatcttggcgagcacctcagcaactcaggccaggatgtgccccaggtgctgcgctgctgctccgagttcattgaggcccacggggtggtggatgggatctaccggctctcaggcgtgtcttccaacatccagaggcttcggcacgagtttgacagtgagaggatcccggagctgtctggccctgcattcctgcaggacatccacagcgtgtcctccctctgcaagctctacttccgagagcttccgaaccctctgctcacctaccagctctatgggaagttcagtgaggccatgtcagtgcctggggaggaggagcgtctggtgcgggtgcacgatgtcatccagcagctgcccccaccacattacaggaccctggagtacctgctgaggcacctggcccgcatggcgagacacagtgccaacaccagcatgcatgcccgcaacctggccattgtctgggcacccaacctgctacggtccatggagctggagtcagtgggaatgggtggcgcggcggcgttccgggaagttcgggtgcagtcggtggtggtggagtttctgctcacccatgtggacgtcctgttcagcgacaccttcacctccgccggcctcgaccctgcaggccgctgcctgctccccaggcccaagtcccttgcgggcagctgcccctccacccgcctgctgacgctggaggaagcccaggcacgcacccagggccggctggggacgcccacggagcccacaactcccaaggccccggcctcacctgcggaaaggaggaaaggggagagaggggagaagcagcggaagccagggggcagcagctggaagacgttctttgcactgggccggggccccagtgtccctcgaaagaagcccctgccctggctggggggcacccgtgccccaccgcagccttcaggcagcagacccgacaccgtcacactgagatctgccaagagcgaggagtctctgtcatcgcaggccagcggggctggcctccagaggctgcacaggctgcggcgaccccactccagcagcgacgctttccctgtgggcccagcacctgctggctcctgcgagagcctgtcctcgtcctcctcctccgagtcctcctcctctgagtcctcctcttcctcctctgagtcctcagcagctgggctgggggcactctctgggtctccctcacaccgtacctcagcctggctagatgatggtgatgagctggacttcagcccaccccgctgcctggagggactccgggggctggactttgatcccttaaccttccgctgcagcagccccaccccaggggatcccgcacctcccgccagcccagcaccccccgcccctgcctctgccttcccacccagggtgaccccccaggccatctcgccccgggggcccaccagccccgcctcgcctgctgccctagacatctcagagcccctggctgtatcagtgccacccgctgtcctagaactgctgggggctgggggagcacctgcctcagccaccccaacaccagctctcagccccggccggagcctgcgcccccatctcatacccctgctgctgcgaggagccgaggccccgctgactgacgcctgccagcaggagatgtgcagcaagctccggggagcccagggcccactcggtcctgatatggagtcaccactgccaccccctcccctgtctctcctgcgccctgggggtgccccacccccgccccctaagaacccagcacgcctcatggccctggccctggctgagcgggctcagcaggtggccgagcaacagagccagcaggagtgtgggggcaccccacctgcttcccaatcccccttccaccgctcgctgtctctggaggtgggcggggagcccctggggacctcagggagtgggccacctcccaactccctagcacacccgggtgcctgggtcccgggacccccaccctacttaccaaggcaacaaagtgatgggagcctgctgaggagccagcggcccatggggacctcaaggaggggactccgaggccctgcccaggttcctacccccggcttcttctccccagcccccagggagtgcctgccacccttcctcggggtccccaagccaggcttgtaccccctgggccccccatccttccagcccagttccccagccccagtctggaggagctctctgggcccccctgcaccactcgacaggggagagaacctgtactatgagatcggggcaagtgaggggtccccctattctggccccacccgctcctggagtccctttcgctccatgccccccgacaggctcaatgcctcctacggcatgcttggccaatcacccccactccacaggtcccccgacttcctgctcagctacccgccagccccctcctgctttccccctgaccaccttggctactccccccccagcaccctgctcggcgccctacaccgcctgagcccctctacgtcaacctagctctagggcccaggggtccctcacctgcctcttcctcctcctcttcccctcctgcccacccccgaagccgttcagatcccggtcccccagtcccccgccttccccagaaacaacgggcaccctggggaccccgtacccctcatagggtgccgggtccctggggccctcctgagcctctcctgctctacagggcagccccgccagcctacggaagggggggcgagctccaccgagggtccttgtacagaaatggagggcaaagaggggagggggctggtcccccacccccttaccccactcccagctggtccctccactctgagggccagacccgaagctactgctgagcaccagctgggaggggccgtccttccttcccttcaccctcactggatcttggcccaaccaaatcccttgttttgtattttcttgaaccccgaccactaccccaggtttctaactttgtaacttgcttctgatgtgggtccctaacctataatctcagcttccctaccctggactgaagggtctgcccatccccccaccaccctccatcctgggggccctcgcacaaatctggggtgggaggggctaggctgaccccatcctcctctccctccaggagcccccagcatgtcctgacctgtgcacggggatggggggacaactcctacccttctttccccacatgccccactaaaccatctgacaacattaatgaataaaatggtgaaaatgtg

SEQ ID NO: 623 - DNA, 3686 bp, Homo sapiens
caccctgtcgcccaccaagcgcctggtccacgcgtccgagcagtacagcaagcactcgcaggagctgtatgccacggccaccctccagaggccgggcagcctggcaggtaaaggctcgctgccacctggcgcgactcacctgggcgcgtggcggggacgcggaagcagcagcccggcttgagcagaagcgaagccgggcgcgctgtctgccaggttgtagtagttgcaggagacagagaacgccagggctttcctggaacaactggttcccgagcctcatacagcagccagcatgggcacctgggcccagagttgcgggccctgcagtccccagaacaccacatagatcccatctatgaagaccgcgtctatcagaagccccctatgaggagtctcagccagagccagggggaccctctgccgccagcacacaccggcacctaccgcacgagcacagccccatcttcccctggtgtcgactccgtccccttgcagcgcacaggcagccagcacggcccacagaatgccgccgcggccaccttccagagggccagctatgccgccggcccagcctccaattacgcggacccctaccgacagctgcagtattgtccctctgttgagtctccatacagcaaatccggccctgctctcccgcctgaaggcaccttggccaggtccccgtccattgatagcattcagaaagatcccagagaatttggatggagagacccggaactgccggaagtgattcagatgttgcagcaccagtttccctcggtccagtctaacgcggcagcctacttgcaacacctctgttttggagacaacaaaattaaagccgagataaggagacaaggaggcatccagctcctggtggacctgttggatcatcggatgaccgaagtccaccgtagtgcctgtggagctctgagaaacctggtgtatgggaaggccaacgatgataacaaaattgccctgaaaaactgtggtggcatcccagcactggtgaggttactccgcaagacgactgacctggagatccgggagctggtcacaggagtcctttggaacctctcctcatgcgatgcactcaaaatgccaatcatccaggatgccctagcagtactgaccaacgcggtgattatcccccactcaggctgggaaaattcgcctcttcaggatgatcggaaaatacagctgcattcatcacaggtgctgcgtaacgccaccgggtgcctaaggaatgttagttcggccggagaggaggcccgcagaaggatgagagagtgtgatgggcttacggatgccttgctgtacgtgatccagtctgcgctggggagcagtgagatcgatagcaagaccgttgaaaactgtgtgtgcattttaaggaacctctcgtaccggctggcggcagaaacgtctcagggacagcacatgggcacggacgagctggacgggctactctgtggcgaggccaatggcaaggatgctgagagctctgggtgctggggcaagaagaagaagaaaaagaaatcccaagatcagtgggatggagtaggacctcttccagactgtgctgaaccaccaaaagggatccagatgctgtggcacccatcaatagtcaaaccctacctcacactgctctctgagtgctcaaatccagacacgctggaaggggcggcaggcgccctgcagaacttggctgcagggagctggaagtggtcagtatatatccgagccgctgtccgaaaagagaaaggcctgcccatcctcgtggagctgctccgaatagacaatgaccgtgtggtgtgcgcggtggccactgcgctgcggaacatggccttggacgtcagaaataaggagctcatcggcaaatacgccatgcgagacctagtccacaggcttccaggagggaacaacagcaacaacactgcaagcaaggccatgtcggatgacacagtgacagctgtctgctgcacactgcacgaagtgattaccaagaacatggagaacgccaaggccttacgggatgccggtggcatcgagaagttggtcggcatctccaaaagcaaaggagataaacactctccaaaagtggtcaaggctgcatctcaggtcctcaacagcatgtggcagtaccgaggtctgaggagtctctacaaaaaggatggatggtcacaataccactttgtagcctcgtcttcaaccatcgagagggaccggcaaaggccctactcctcctcccgcacgccctccatctcccctgtgcgcgtgtctcccaacaaccgctcagcaagtgccccagcttcacctcgggaaatgatcagcctcaaagaaaggaaaacagactacgagtgcaccggcagcaacgccacctaccacggagctaaaggcgaacacacttccaggaaagatgccatgacagctcaaaacactggaatttcaactttgtataggaattcttatggtgcgcccgctgaagacatcaaacacaaccaggtttcagcacagccagtcccacaggagcccagcagaaaagattacgagacctaccagccatttcagaattccacaagaaattacgatgagtccttcttcgaggaccaggtccaccatcgccctcccgccagcgagtacaccatgcacctgggtctcaagtccaccggcaactacgttgacttctactcagctgcccgtccctacagtgaactgaactatgaaacgagccactacccggcctcccccgactcctgggtgtgaggagcagggcacaggcgctccgggaacagtgcatgtgcatgcataccacaagacatttctttctgttttgtttttttctcctgcaaatttagtttgttaaagcctgttccataggaaggctgtgataaccagtaaggaaatattaagagctattttagaaagctaaatgaatcgcaagttaacttggaaatcagtagaaagctaaagtgatcctaaatatgacagtgggcagcacctttctagcgtgagctgtagagtaacgagaagtgctttatactgaacgtggttgatgggaggagagacgaggcattcgggccggtggggcgtaagggttatcgttaagcacaagacacagaatagtttacacactgtgtgggggacggcttctcacgctttgtttactctcttcatccgttgtgactctaggcttcaggttgcattggggttcctctgtacagcaagatgtttcttgccttttgttaatgcattgttgtaaagtatttgatgtacattacagattaaagaagaaaagcgcgttgtgtatattacaccaatgccgccgtgtttcctcatctatggttctaaatattgcttcaatttcaaacttttgaaagatgtatggatttccagtttttctttactttctcccagtatgttttaacaaaaaaaaaaaaaaaagcaggaaaaaaggaatatttagcagtattgttcgttctgatatgtgaatttgtttgtgacaactaaacaaggcattcagcagtttctgacaattaacatacatcattccacactccttgtcaacaaagtgctttttcactgcctaaaattttagatgtagatatttgaaatagattttttcatttataccagttttctttatgatgatacagtgttaaaagaaaataaattacaattgatctgtc

SEQ ID NO: 624 - DNA, 4213 bp, Homo sapiens
aactcggctgcggctccatggtctgagttgtcagccgttgttttttcgtgctcgctagtcgccgccgccgctccgccatggggaagcgacagcaccaaaaggacaaaatgtacattacctgtgctgaatacactcacttttatggtggcaagaagccagctgtcaaaactatcaagactacaataacaagagcactgtcataattttaatggaagtaaaaaatctcccacaaacaaattttcgtcgtttaccttttgaccactgcagtctctctctgcagccctttgtctacccagtctgcactcccgatggcatcgtctttgacttactgaacattgttccatggcttaagaagtacgggaccaaccccagcaatggagagaagctggacgggaggtccctgatcaagctgaacttttccaagaacagtgaggggaagtaccactgcccagtgctgtttaccgtgttcaccaacaacacccacatcgtggctgtgaggacgaccggcaacgtctacgcctatgaggcagtggaacagctaaatatcaaggccaagaacttccgggacctgctgaccgacgagcccttctcccggcaggacatcatcaccctccaggaccccaccaatttggacaagttcaatgtctctaacttctatcatgtgaagaataacatgaaaataatagacccagatgaagagaaggccaaacaggacccgtcttattatctgaaaaatacaaatgccgagacccgagagaccctgcaggagctctacaaggagttcaaaggggacgagattctggcagccaccatgaaggccccggagaagaagaaagtggacaagctgaacgctgatcttgctatgttgtctaggctggtcttgaattcctggcttcaagtgagagcctcctgccttggcctccgaaagtgctggaattacaggcccactattccacagggaaggtcagcgcttccttcacctccaccgcgatggtcccggagaccacacatgaagcagctgccatcgacgaggatgtgctgcgctaccagtttgtgaagaagaagggctacgtgcggctgcacaccaacaagggcgacctcaacctggagctgcactgcgacctgacaccaaaaacctgcgaaaacttcatcaggctttgcaagaagcattattacgatggcaccatcttccacagatccatccggaactttgtgatccaagggggcgaccccacaggcacaggcacgggtggggagtcatactgggggaagcccttcaaagacgagttccggcccaacctctcgcacacgggccgcggcatcctcagcatggccaactccgggcccaacagcaacaggtctcaattcttcatcacgtttcgctcctgtgcctacctggacaagaagcataccatctttggacgggttgttgggggctttgacgtactgacagccatggagaatgtggagagtgaccccaaaactgaccgccctaaggaggagatccgcattgatgccactacagtgttcgtggacccctatgaggaggccgatgcccagattgcgcaggagcggaagacacagctcaaggtagccccggagaccaaagtgaagagcagccagccccaggcagggagccagggcccccagaccttccgccagggcgtgggcaagtacatcaacccagcagccacgaagcgagcagcagaggaagagccctcaaccagtgccactgtccccatgtccaagaagaagcccagtcggggttttggggacttcagctcctggtagcggtaggttggccgctgtggaccttggtggggttgcagggctgggggcccatgtccacatctccatttccagcctttctagcctgccctctgctgccagccaataaattgcttgcctgctgcctgcatcccctttcctggcccctgggagcccacagccttcccatcccttaacctgttgccaagggccttggccctgtttccaggacctggcccagccagagcccactgctgggaccttcaagcacaaggcctgccctacacccaggctggtgcctcaggcctctcctctagtaggcaggccaggttagtgaggaaggactgtgtctccagattgtggtttcctctttaagacagggtcttgctctgttgcccaggctccagtgcagtggtgtgatcatggctcactgcagcctcgacctcctgggctcaagcaatcctcctgcctcagcctcgcaagtagctgggactacagccgtgcaccactacatccagctgtatatgtctggttttcttacccctacttctgtcatcttctcagggacagcctatttatacaaccagtgtggtcccctgaccaacgccattacctgggacaagttttcagaccccagacttactgagcctaagcctctgcagggtgggcttctcggtctgttttgacaaaacttcaggggcttctgaaggctggtgttggacggcagcattgagtttcctgccgtgccctgcctgagctctcagggccctgctcacctgctctggctgtgaaccacctgggcttcatctcaagcctgcctggcgtctctgtgcccctgtgagaatcttgaggggacccacactgggttgaggccagtgtctcctgctgtgagaacaagtggatgtccctctccccgccctcctgctgaagtggccttgctgctctcaggcccggccactgggctccaagactctgctcctcctgtcagtcactgactctgatggccttgggccggctgcatcagcagcccttaaagaaagacccctccctcaacccccatttttctgttaaatgtgcccctggctggctttttcttcgtcttcagcccaggccagtggtcagtgttctcatgtcatggactctccttgcctgacacttgcctcttgggctccctgttgccctcaggccaccccccacttctagttcttcacactaagccctaacttaggccttgttcttggttttctcatttttgttgccccaaatcttgaacctgtcagcaacttgcaggctgtacctctgcccttccttttctcatcaatcactgatgctgaagctgcaggcctgagccctttgtctccctggatgctgggtggcgcctcatctgcatctctgcctcaccccatccactgccacaggctgcctgatgaccactagaggtatgtctgcccctcgtcaccctgctgcacaccaatctgtggcccttcatcatgctaagaacaagaactgcgccatggctggctccttctcttctccagcccatccctctgcagcctgtcatccctgtctgtgaccattggtcgggcccctgggctctagagtgacttttgacgccctccatccctcccgccaggcactgtcctccgcaaggcctggtgcagccctggcagtaactggcttgtaagaggctcagacaccaagctgggcctgcagaggaggggcacagtaggacacagtgactgcccaggtgtccacacacctgtaggcctctgagccagcgtccagggtacaggtgcgggtggtggggatgaaggcctgaccagggagggagaagcaggtttggagaggaccctgtgcccaccctgacagacaccctggctggccctgactgactgtattctctggccacattcaagtcccccattggtgggggcagagaagtaggaccaggccatccttggctccagagctcgaagaccccaagacagccctctgctctcagcggcgccacagagagcctgggctcagccttctgcatcaggacatggcctcgtccactgagggcacgatttaaacatttgacatcagaagctttatttgtaaacctcacacagataaggaccaagggctggcggtgtggccagaggacaggggaagctgaaggccccgtgcttgagctcggcagtcctgctccttgcagtgaagccaccatgggtgaccgtccagcctcacccggtggcctgcacagtgagggaagggcttcagggccatctgctcccagggcaggggacaggccaccaaggacctttggcaaatgaaggtttacatttctgtagtttgtttgttttagagcttaatttgtagttttttagctattaaaaccatttgaatttttaacgacctgatgagggcatcaggtaaattaaaggattttgggaagattctt

SEQ ID NO: 625 - DNA, 5282 bp, Homo sapiens
accctgctctgtgcaggcgattcacagcacctcatctttttggttaggtccttggatttaatagtctttgaggtcccttcagcttttacaaatgaagattctgaatgaacttatttctaactaactcttaatttgcgaatgttggaaaatcatcaaatggcagaggctaactggcagcctgtctcattagtgagcctgagaggagcttccctaccttgtgtgattgtgttgggctttaggagggtgaatttggaatgtctcggtgttcctacatccagctcggctctgtccttcacctgcgtgtggtactctgtgatcatcacagcaggcatggcctacatcttcctgatccagctgatcaacatcagctacaatgtgactgagcgggaagtccagcaggccctccgacagaagactgggcgccggctcctctgcgggctcatcgtggacacaggccagtacaataggggcttcctgcggaactggcaccagttctccaccctgggcacacgtgcattccaccaccctgccgaggacattgtctgaagtgccttctatgtggctctctgagggatgatggctcctccttccgtctcccttccattttacacttcagtgtccatttctatccccagtttcttaaaggcattatagggccatgctcaggtttagagactggagtgggaagaagttaatttttctgacgccacaacttaagagacttttatactgaggcagtaaaagtagagccattcctttccagtcacctttttaattgactcagttgcctgaacttgagaaggatgtggattgctaatgcacaaattgatagaagcaattcccatccattagtatggaggaaagagtgttggattgggatagtttctagtccctctttcgattcttaatagccatgtgacccctagctgagtcactttcccaagtctcagggtcatctgcaaagtggggtactgatgcctgccctggctacctcacagagccgtcatgagggtcacgtgagggaagatggatgtggaaagcactaaaaaacaactcaagagccatggaaatacaaagtattaggaaaatattatgatggaagaaaaacgtttatagtctagaatattgaagccaatattattagggtaatcagttttcagcatataccttgttgtacagttatgagaatttctccttcttattagacatgaactactcaaacagagaagatgaccagatggattgatgctaagttgtctcatcttgaaaagacagttgacaacagttataaagataattattgctagtgtaatgtagtgtggccatgagtttaggtgatgagttcttctatttatattttataaattctgcttgggtttcttataaataactccaacaggcattcatgtgtttttcctcttcccatgtttcaccaggtaaggtgctagcacacttgtgactgtggctggaagaggagaacagacactcctgtggggatgctttactctcttttctggtaggaaggctgagtaacatcacgggctcgattattttcttcatgtatttcaaatgctgtcagttatagcactaaattgtgaaaatcagccttctggcattcacattattctggtatgaactttgaggagttgagtgacatcttcccacttaacttgcacattaattctcaattacccctccctaaataacagtatctcactaagagagaagaaacagggtatatgtggtttccactattaatggattactgttcttccctggctcttccgacaataacaagttgtttctttaatcatatcttaaaaccgaaaatgtataaaagattaaatatttatgtacaatgggttgttctactatagaattaagatgagggaatttcagatgaggaaaatacccttttgaaatgttagttttgaacatgtactgttgtgcaatcccaaagataattcatgactccttaaatttgccttggcttatagcttaatatagggaaaatattgccagcgttttcagtcattctgtgcatgctgctttaagcaagagatttatatttgttgagaggaaatattgctacttcctgcacttccaccctctgcagccggcaccgtccctactgttgccattaattggagctgtccttaagatggtcaccatattcttattcaggctgttgtcattttccccagagatggtttgtttaacgaatgataggctctgtgcctggggatgttagcagactctggggtttgtacagtgatgccttctccctggcccagagctgaatattcatctagaattaaagttggatttgatataacaaatttctttctatacaggttttacataagagagacagtaataatgtcaaggatagcctgtgtgggcagaaattggtagccgtgcttttgaatgtcagctgtagagccaactctgattatctagccattgatcatacaaattgatagaaacattagtcagtaattttagcttcttgccaaattgttcacaacatctaaatgtaatgtgatgtgatgaagataagtagtacaaagagaccaaaataatttgggagaattaggaatgatgacaatttttttttaacaacttacctctaatagggttacttggatgagccaactcagcttccttcccatggataggaagggactctgtgtattattcaggtttattggcacgaagatacttgttttaagttccttgagaacccatgatggacagttgacagaatgcttaaacctgtcaaaagatgagtgattttgtgtgggaaaagccttcccaggcgtctgtaccgaaaggagcagcaaacaaggggctaatccatgagcagtgttctgtaggctctgtgacatctttggtttataggattttggagccttttatgatctggaactatttgaggggtttcattataggccttggttctctccaggggccagatgagtttattgtggaatctttgaaaggacaaggcctctgtgaatgaatcagtcccagggaagcatttggtggtggcggcagtggaggattgcccggtgaacctataaatcagcagtctcttgggcagaggagcaagcccctcgaacatgatttcaaacaagcaggtcctcttctctcatctcatgtccttagtctctgttaatgaacatactggatgtggagtttaataaattacctactatcatctggccacttagattattatcacaccactgtggactgttcctggggggagaagaacagaccgatttgaaagattcaagggagaaagattaaggatcaggattgcatgaaagaagaaaatccttcaatatttaaaatgtttcttacaatacccacggagcacttttatggttccagccgagcgttcctgaaatgaactgaccattaacagcgcctctttgataggttaccctgatgctgctaaagtaaagccttaagtgtgtttttgggacaacgtgctgcttattccacctcagccacatatgtgtttgtgtttaggatattgtaaatctttgctaagtagtgttttccttggtgaatgaagtcattgttgtcttcaagtgtaccatctgcctagcaaaaaaattgctacaaactttctcttatgcaatagtccttggtacttctaatatttttagcaagagacaattttctgtactagaatcttccactgccagaaaacacagtgccagtaaggttctacataccactgaccatctgcttaatagacatgtatttcctttgagtaggacattagcttttgattataaagctcaactagtataagcaaaaatataacatctagaagcacagttttagccaggatgtttaaaaattacagttttgtgagacttaagggtctttttaacctaggtaagtttatatgacctaacttaattgtagccatattctggtaccttccattttgaaaagtagaggttgcttaagcaagcaatggataataagagacttttcctgaggcacctgtttggaatctggttttctcagcggcagcttgacatgtgcacccttttgtattaaacactgcaagggtgatgcaggggagcaggaaagccatcctaaactcactactgagtacgattcagtatgttcctgtggatgtctgctgtgactaatataaatttcttgcagaatcagctacacttaattatgttgctgatagacaagcatccacgcttcagctggcactaagtgttttcattgtaggatcagcagcaggttaaagactgaacggttagtgaagacaaatgtcttaagaggctgcgatgtctaggttgggcttgtgacttcttagtggcctagccttcttgatggcaccttgaaagtgaacttctagaaatctacatttaaaaggcaaagctttaaaagcagagctagtctattctagttactgatgcaactaaaattctgtatttcttaagatggagccactgacgagatgtcacagtatagagcctgcagtctcaactcattgtgatcctaatggtctgggtgattggatggtttgagttgttagggattttgagtttttcattttattgcatatctgggttggatgttagactaaaggaaacccaggaatatttacctggtgttacatttaatatttaatgtaactggtctagcaacattaagggggatttctgaagccaactccggaggctgtgggctgcacattttgcactgtttttatatacttgtattcatatcctcttatcacctcagcctcagacacaaggccttttacatggaaattttacaaattacttccatttatgtaaaataacgtcctgtgaccaagttgtttaaatggaaaataaagtgctttctttaaggaaaatagctggtgtttcttggagtgtctcctgaagtcttctgatttctgaaaaccctgcattatacctgtgctgcctctgtggctccctcaatgtctctatcctgtggccctgtccctagccctaaactgttatgttcccggtggcaatttctccagttttgtgggtcagggatactgcttgttggggcattatgttaacagtaacattttgaaacatactttcatgatagtccagcaaaaaacagcatcaaaactatttccattgtatctctttagaaggctctgtattcggtaaaaagtctagctggcgccattggaatatgggctgctaaagactcaatttctagttgatgtttgaggtgaggcaaaaataaagctaaagtag

SEQ ID NO: 626 - DNA, 3729 bp, Homo sapiens
gtacgattcaaccaccaagcaagccagaaacgagtgctctcaaaacactggcactgttgcagcagggttggttggaggctgaacattgatggcaacagttggtgtgatggttaatactgagtgtcaactggagtggattgaaggatgcaaagtactattcctaggtctgtctgtgagggtgttgtcaaaggagattcacatttgagtcggtggactgggagaggcagacccaccctcaatctgggcgggcaccatctaatcagctgccagcgtggctagaataaatcaggcagaggaaggtggaaggactggacttgctgagtcttccggccttcaactttctcccgtgctggatgcgtcctgccctcgaacatcggactccaagtccttcagcttttcagctcttgcatttacaccagtggtttttcaagggctctcgggcctttggccgcagactgaaggctgcactgccggcttccctgcttttgaggttttgggacttggactgatccaccactggcttcctggctcctcagcttgcagatggcctattgtgggacttcaccttgtgactgtctggcaatggatacctcggagatggggagcatatctggctgcagccagctgcagatgaatcatctgaggacactgaattcagcggcgaggcgctagggactcaaatgaactggaaaggccaggaatagcagcacatggagggagcgccatccagcgtggagggaagacgctgcccagctgtgccactgcccagcagcctccgggcaaggtcctgcttgagctgactctccagcagccgagaaggtctgtgccagccatgcacacacccctgagcgtgtcccctgccaggactaagcacgggcagcctctggacatctgcaaattaaaaagaagacacccctgctctttccagctgtatgaaccagtcccggaccagacgcctgtgtctgctaagggttttctcacttatttgctaaacccctgtccctgctctaagaagagcacctaacctgcccacctccccgtatacggtctcccccggcaatgaaatgagaagcacttttggcctcatgtttacttgatggatggacaaaacacagaacatgacgcagtcaccaccgccgatggccacagagtgacaggtgattgcgggaaattaaacagccctccctaagtcatccatcatgagaacctcattccttccctcggccaagggtcggcagtgctctcgcggagcaattcatcaccggcgggccatgtcatcgcaggccgtcgcctctccgggaagccgggatcgaccaggcccggctcgcccgcccggaaatgccttttaagcgccatcctaagtgggaatttaattgaagtgtaataaggcatctaatgtgagattaagaggcaaggccacctggaatgagccgtcacttaaataattactttgctttctcggtcacagctccctcaccagtgaccgtgtggtcatttagcatcagtatcggaggtagaggcggtcctgggggctcgccaggtcctgtttcccagcccgccttctgggcagtgggagaggtggaagaccagcctggtggggaagtggggtcacgtggccggtcctggccaatgagatgcgcagtcccttttcagaactgggcccgggtctctctgcgccttgctcttccctgccctccccaggacgaacgcaggcctggcactgggctgacggagtggccgctgcccgggtcacgccatagaggccagcacttgcagcggcttggcctggccccagagcagtttctatgtgcgtgaaaggaccgaagattcaggtcaccatagcgtaacgcagaccagatggacaccccacatagggcccctgcagcctgcgagctaggggtgctgcctgcaaagaggaaggacgtggggtttgcttcacctgcctccagtttggatgagacctcgggacccacttccagtgtttccattttagagggaagggcaagaagctatatttcaagaaggggggccatgccccgccacctggcagcggagcctgagctgaacctgcttggccctcccaaccttctcagagctcctgcctaccaggacctgctgtaggagcttttggggtcttggtgacccagtcagagccactcggtcacaggatcagctgctgcctggtgagtgccctcttaccggcttccccctaaggccactggtaaggctgggacctttatgggtagagaggcccggctggtcacgaccactgacctgtgaacatcattctgaagtcgacggcactgacttgtaagtggagggggcagatccagtagaaaacacaccgcgggttttgtaggtggtgggaagtctttcaacaggcatttttggacagcctgctgtgcgcacggcacccagtgttctgtgaatcttgccattgatctcaaggccagccagatgcccatgaaatatcgggcacgttgggcagcaggcttttattttggtctgagttcagcctgctgttattacttcctcatcttttcctttcaggtttccaaaagcctgggcccgtggtgaatcctggctgggaggaactttgagggcacccctgggctcctcccctgtgccctgccccccgccgacgccatccctgatagtgcccagattctccttaacttatttccaggagcggcagcgctggctttctcagtgcctctggggacaggccgttcaccccgcccgccactactcgggccacttttgacccccgggagtattcggcaacaagtctggcaagagcatcagtgtgggtggccagtgaccacgtgcagcacttggcctgcagcaagagccagctgcatgggctgggctggagtcaggggcttgtctggacctcatcaggatgcagaggagggatctggcctggaggaccctgccctgcacgtccgcctcagagccagggtgaccctttgcctttgtccttgaagaaatgcatttcagggactcaatgtccctgattgtcccgatccagagtccagagcaggagaggctgtcactccctcccctgtccctggaacattagaacagcccatgggaggggcaacactgtccttgggagacctcagtcctcatccatcccaccctgaatgtcaaagccacgtgacggagttcaaccagcttcctccaagctggccatgcctttccacacccgtctttggcgggttcccttctgaaattcctcctcttcctcccacatgcgccttcccacgacctccatgcttctaaggagcaatcgtgcctcctggatgcctctctgtcagctttcaatgtggggaataaagacctacggaagtgttggcaagccagttaaaaatagccccatctattaaaaggtgaaaacgtggtgagaaacacaggcagggtgggggtgaatgtgctgcctgcctcagccctgccctctttctggaagagccagccctccccagactcggcagcccaatcagatgccctgaccccaccagccacctccaacccacgcgagccctttgggtggcggccctggctgcccagtgagtatctatctcaagcctgtgtggatgtcagtttgctttttaatcttgttcccttgatacatatcagcttttaaatcaaggaatgtgtcttcccaaatgaagaggcttttattaggcaccctgtatcgctttcaaaagaaaaagtcacattaattcc

SEQ ID NO: 627 - DNA, 4582 bp, Homo sapiens
acaggcgccggcggtccccgccagctagcagcccggcgaggcgctggcccacccatggtcctcgggcggcggcccctgcgcccagccctgcgcgtagcctccgtctctcgcccggggccgccgagcccccgacacgggcgagatgctgaacggcgcaggcctggacaaagctcttaagatgtccctgccgcggaggtcgaggatccgctcgtccgtgggacctgttcgttcttctttgggctataagaaggcagaggatgagatgtcccgggccacgtctgttggcgaccagctggaggcacccgcccgcaccatttacctcaaccaaccgcatctcaacaaattccgcgacaaccagatcagtacggccaagtacagcgtgttgacatttctacctcgattcttgtatgagcagattagaagagctgctaatgccttctttctcttcattgccttattacagcaaattccagatgtatctccaacaggaagatataccaccctggtgccattgatcattattttaacaattgcaggcatcaaagagattgtagaagattttaagcgacacaaggcagacaatgcagttaacaaaaagaaaacaatagtgttaagaaatggtatgtggcataccattatgtggaaagaggtggcagtgggagacattgtgaaggtcgtcaatgggcagtatcttccagcagatgtggtcctgctgtcatccagtgaacctcaggcaatgtgttatgttgaaacagctaatctggatggggagacgaaccttaaaatacgtcagggtttgagtcacactgctgacatgcaaacacgtgaagttctgatgaagttatctggaactatagagtgtgaagggcccaaccgccacctctatgacttcactggaaacttgaacttagatgggaaaagccttgttgcccttgggcctgaccagatcttattaagaggtacacagcttagaaatactcagtgggtctttggcatagttgtttatactggacacgacaccaaactcatgcagaattcaaccaaagcgcctctcaagagatcaaatgttgagaaggtgactaacgtgcagatcctggtgttgtttggcatcctcttggtcatggccttggtgagctcggcgggggccctgtactggaacaggtctcatggtgaaaagaactggtacatcaagaagatggacaccacctcagataattttggatacaacctactgacgttcatcatcttatacaacaatcttattcccatcagtctgttggtgactcttgaggttgtgaagtatactcaagcccttttcataaactgggacacagatatgtattatataggaaatgacactcctgccatggccaggacatcaaaccttaatgaagagcttgggcaggtgaaatatctcttttctgacaagactggaacgcttacatgcaatatcatgaactttaagaagtgcagcattgccggagtaacctatggtcacttcccagaattggcaagagagccgtcttcagatgacttctgtcggatgcctcctccctgtagtgattcctgtgactttgatgaccccaggctgttgaagaacattgaggatcgccatcccacagccccttgcattcaggagttcctcacccttctggccgtgtgccacacggttgttcctgagaaggatggagataacatcatctaccaggcctcttccccagatgaagctgctttggtgaaaggagctaaaaagctgggctttgtcttcacagccagaacaccattctcagtcatcatagaagcgatgggacaggaacaaacatttggaatccttaatgtcctggaattttctagtgacaaaaaaagaatgtctgtaattgttcgaactccttcaggacgacttcggctttactgtaaaggggctgataatgtgatttttgagagactttcaaaagactcaaaatatatggaggaaacattatgccatctggaatactttgccacggaaggcttgcggactctctgtgtggcttatgctgatctctctgagaatgagtatgaggagtggctgaaagtctatcaggaagccagcaccatattgaaggacagagctcaacggttggaagagtgttacgagatcattgagaagaatttgctgctacttggagccacagccatagaagatcgccttcaagcaggagttccagaaaccatcgcaacactgttgaaggcagaaattaaaatatgggtgttgacaggagacaaacaagaaactgcgattaatatagggtattcctgccgattggtatcgcagaatatggcccttatcctattgaaggaggactctttggatgccacaagggcagccattactcagcactgcactgaccttgggaatttgctgggcaaggaaaatgacgtggccctcatcatcgatggccacacactgaagtacgcgctctccttcgaagtccggaggagtttcctggatttggcactctcgtgcaaagcggtcatatgctgcagagtgtctcctctgcagaagtctgagatagtggatgtggtgaagaagcgggtgaaggccatcaccctcgccatcggagacggcgccaacgatgtcgggatgatccagacagcccacgtgggtgtgggaatcagtgggaatgaaggcatgcaggccaccaacaactcggattacgccatcgcacagttttcctacttagagaagcttctgttggttcatggagcctggagctacaaccgggtgaccaagtgcatcttgtactgcttctataagaacgtggtcctgtatattattgagctttggttcgcctttgttaatggattttctgggcagattttatttgaacgttggtgcatcggcctgtacaatgtgattttcaccgctttgccgcccttcactctgggaatctttgagaggtcttgcactcaggagagcatgctcaggtttccccagctctacaaaatcacccagaatggcgaaggcttcaacacaaaggttttctggggtcactgcatcaacgccttggtccactccctcatcctcttctggtttcccatgaaagctctggagcatgatactgtgttgacaagtggtcatgctaccgactatttatttgttggaaatattgtttacacatatgttgttgttactgtttgtctgaaagctggtttggagaccacagcttggactaaattcagtcatctggctgtctggggaagcatgctgacctggctggtgttttttggcatctactcgaccatctggcccaccattcccattgctccagatatgagaggacaggcaactatggtcctgagctccgcacacttctggttgggattatttctggttcctactgcctgtttgattgaagatgtggcatggagagcagccaagcacacctgcaaaaagacattgctggaggaggtgcaggagctggaaaccaagtctcgagtcctgggaaaagcggtgctgcgggatagcaatggaaagaggctgaacgagcgcgaccgcctgatcaagaggctgggccggaagacgcccccgacgctgttccggggcagctccctgcagcagggcgtcccgcatgggtatgctttttctcaagaagaacacggagctgttagtcaggaagaagtcatccgtgcttatgacaccaccaaaaagaaatccaggaagaaataagacatgaattttcctgactgatcttaggaaagagattcagtttgttgcacccagtgttaacacatctttgtcagagaagactggcgtcagcagccaaaacaccaggaaacacatttctgtggccttagccaagcagtttgttagttacatattccctcgcaaacctggagtgcagaccacaggggaagctatctttgccctcccaactcgtctgcagtgcttagcctaacttttgtttatgtcgttatgaagcattcaactgtgctctgtgaggtgtgaaattaaaaacattatgtttcaccaatatttaaacatcagtactagttgtcctgggagaaagggaaaggagttttatgttgcgtgagaggcccatcctgtgtaattggagcagggcacacttgcttcctgttgagttaactcagaggttaagtccaacgggccacatgcagacttcactgtaggcaggttgctctcctgctttgattcctgttttgtgtgtaaaattggcataaacttcttgattgcagtgaaatcacaaaattctctatcggggtggtcaacctgagaacatttatttgaacctcttagccacatttccagcagggcaaaccaactgatgccctggaagagtcttccgcaccctctccaggtgcactcggcccagtcctgccgccgtgtccaggcgcccctcacccccacacctgctgcatggctggccacaccactcagtgcatggcggccgatgggcagccaacccaaacccgcgcctttccttgttccactgcagactcagatacagatgcgaaaaattccttcttccaccgcccttctcgttctgtaaagaaagaaaagaaacatagcctttctgcatat

SEQ ID NO: 628 - DNA, 4857 bp, Homo sapiens
agaggggaaaagaacgtcaggagagtgaacgggagcaaataaaacgctgtccattctgactggaagggccagagccgtgtctaagggcgggggccgggaggtggcccgcggtggtgtctctaccaggacgaggcctggggtatctgaagaggggatgacgtccaggcgctttgctaaagggaagccagaagggtatgagttgctagggtcagagatggggctttcggctcgagtctttccctgcagggcagagagtccgaagagcccgagaaggcagggaggacagtgggcctggtccttccccggccggcagagggagtcccgagatggaacgtccagctctcctctaacgaaaagcgtttgcatggctgtctcgccaattctgtacctcccggggctgaggaagagccgaggtgactagaagctagcgacaagtgccggccacctccgacgccaggcgccgggcttggagcccgacgggccgaattctcgcgagagcggccgccgccatttttccattgattgcagcgggctgggggaggggccgacgacgaagtcggctgtggtagcggcggcggcggcggcggagccctgggtcggtgtctgcgcgctggtgtctgaggcccaggctgaggcctccgctattgctggagcgcaggcggcggagaggatgactgccgctgccattctctcttgagctagcgagccgccgccaccccccaccctcccccggcagggcggagaggagcggccggagtcagcgatggtgcccggcgaggagaaccaactggtcccgaaagaggcaccactggatcataccagtgacaagtcacttctcgacgctaattttgagccaggaaagaagaactttctgcatttgacagataaagatggtgaacaacctcaaatactgctggaggattccagtgctggggaagacagtgttcatgacaggtttataggtccgcttccaagagaaggttctgtgggttctaccagtgattatgtcagccaaagctactcctactcatctattttgaataaatcagaaactggatatgtgggactagtaaaccaagcaatgacttgctatttgaatagccttttgcaaacactttttatgactcctgaatttaggaatgcattatataagtgggaatttgaagaatctgaagaagatccagtgacaagtattccataccaacttcaaaggctttttgttttgttacaaaccagcaaaaagagagcaattgaaaccacagatgttacaaggagctttggatgggatagtagtgaggcttggcagcagcatgatgtacaagaactatgcagagtcatgtttgatgctttggaacagaaatggaagcaaacagaacaggctgatcttataaatgagctatatcaaggcaagctgaaggactacgtgagatgtctggaatgtggttatgagggctggcgaatcgacacatatcttgatattccattggtcatccgaccttatgggtccagccaagcacttgctagtgtggaagaagcattgcatgcatttattcagccagagattctggatggcccaaatcagtatttttgtgaacgttgtaagaagaagtgtgatgcacggaagggccttcggtttttgcattttccttatctgctgaccttacagctgaaaagattcgattttgattatacaaccatgcataggattaaactgaatgatcgaatgacatttcccgaggaactagatatgagtacttttattgatgttgaagatgagaaatctcctcagactgaaagttgcactgacagtggagcagaaaatgaaggtagttgtcacagtgatcagatgagcaacgatttctccaatgatgatggtgttgatgaaggaatctgtcttgaaaccaatagtggaactgaaaagatctcaaaatctggacttgaaaagaattccttgatctatgaacttttctctgttatggcccattctgggagcgctgctggtggtcattattatgcatgtataaagtcattcagtgatgagcagtggtacagcttcaatgatcaacatgtcagcaggataacacaagaggacattaagaaaacacatggtggatcttcaggaagcagaggatattattctagtgctttcgcaagttccacaaatgcatatatgctgatctatagactgaaggatccagccagaaatgcaaaatttctagaagtggatgaatacccagaacatattaaaaacttggtgcagaaagagagagagttggaagaacaagaaaagagacaacgagaaattgagcgcaatacatgcaagataaaattattctgtttgcatcctacaaaacaagtaatgatggaaaataaattggaggttcataaggataagacattaaaggaagcagtagaaatggcttataagatgatggatttagaagaggtaatacccctggattgctgtcgccttgttaaatatgatgagtttcatgattatctagaacggtcatatgaaggagaagaagatacaccaatggggcttctactaggtggcgtcaagtcaacatatatgtttgatctgctgttggagacgagaaagcctgatcaggttttccaatcttataaacctggagaagtgatggtgaaagttcatgttgttgatctaaaggcagaatctgtagctgctcctataactgttcgtgcttacttaaatcagacagttacagaattcaaacaactgatttcaaaggccatccatttacctgctgaaacaatgagaatagtgctggaacgctgctacaatgatttgcgtcttctcagtgtctccagtaaaaccctgaaagctgaaggattttttagaagtaacaaggtgtttgttgaaagctccgagactttggattaccagatggcctttgcagactctcatttatggaaactcctggatcggcatgcaaatacaatcagattatttgttttgctacctgaacaatccccagtatcttattccaaaaggacagcataccagaaagctggaggcgattctggtaatgtggatgatgactgtgaaagagtcaaaggacctgtaggaagcctaaagtctgtggaagctattctagaagaaagcactgaaaaactcaaaagcttgtcactgcagcaacagcaggatggagataatggggacagcagcaaaagtactgagacaagtgactttgaaaacatcgaatcatctctcaatgagagggactcttcagcatcagtggataatagagaacttgaacagcatattcagacttctgatccagaaaattttcagtctgaagaacgatcagactcagatgtgaataatgacaggagtacaagttcagtggacagtgatattcttagctccagtcatagcagtgatactttgtgcaatgcagacaatgctcagatccctttggctaatggacttgactctcacagtatcacaagtagtagaagaacgaaagcaaatgaagggaaaaaagaaacatgggatacagcagaagaagactctggaactgatagtgaatatgatgagagtggcaagagtaggggagaaatgcagtacatgtatttcaaagctgaaccttatgctgcagatgaaggttctggggaaggacataaatggttgatggtgcatgttgataaaagaattactctggcagctttcaaacaacatttagagccctttgttggagttttgtcctctcacttcaaggtctttcgagtgtatgccagcaatcaagagtttgagagcgtccggctgaatgagacactttcatcattttctgatgacaataagattacaattagactggggagagcacttaaaaaaggagaatacagagttaaagtataccagcttttggtcaatgaacaagagccatgcaagtttctgctagatgctgtgtttgctaaaggaatgactgtacggcaatcaaaagaggaattaattcctcagctcagggagcaatgtggtttagagctcagtattgacaggtttcgtctaaggaaaaaaacatggaagaatcctggcactgtctttttggattatcatatttatgaagaagatattaatatttccagcaactgggaggttttccttgaagttcttgatggggtagagaagatgaagtccatgtcacagcttgcagttttgtcaagacggtggaagccttcagagatgaagttggatcccttccaggaggttgtattggaaagcagtagtgtggacgaattgcgagagaagcttagtgaaatcagtgggattcctttggatgatattgaatttgctaagggtagaggaacatttccctgtgatatttctgtccttgatattcatcaagatttagactggaatcctaaagtttctaccctgaatgtctggcctctttatatctgtgatgatggtgcggtcatattttatagggataaaacagaagaattaatggaactgacagatgagcaaagaaatgaactgatgaaaaaagaaagcagtcgactccagaagactggacatcgtgtaacatactcacctcgtaaagagaaagcactaaaaatatatctggatggagcaccaaataaagatctgactcaagactgactctgatagtgtagcattttccctgggggagttttggttttaattagatggttcactaccactgggtagtgccattttggccggacatggttggggtaacccagtgacaccagcactgattggactgccctacaccaatcagaagctcagtgcccaatgggccactgttttgactcggaatcatgttgtgcactatagtcaaatgtactgtaaagtgaaaagggatgtgc

SEQ ID NO: 629 - DNA, 4166 bp, Homo sapiens
agatgatagcaatgcctcggggagcttcctcactctgtcctctgtctgcctttcagctgtgagaggaactgcaggccagttaatgccagcaaagacattctgctcagggtcaccatgggggaggactctccagtggctatgttcagctggtatttggacaacaccccaacagagcaggctgagcccctcctggatgcctgcagactcagaggattttggccaaggtccttaaccctcctccagagcaacacctccacgttgctgttgaacagctcgtttctgcagtcccggggagaggtcatccgaatcagagccacaggttcctgcctacactgtggccctgaacctgccctcccatcagtgtatctgccacttggagaggagaacaatgactttgtgctgacagtagttatttctgccaccaatcgtgcaggggacacgcagcagacccaggccatggctaaggtggcactcggagacacatgtgttgaggatgtagcattccaggctgccgtgtcagagaaaatccccacagctctgcaaggcgagggtggccccgagcagctcctccagctggccaaggctgtgtcctccatgctgaaccaagagcatgaaagccagggctcaggacagtcactgagcatagacgtcagacagaaggtacccgtgggaagctggggggctcctttcattcccttcctctggggccccagggtctgcgtgcggccatttgggctgtggatcaaggttcatggatcaggggagaaacctgtggtgtctcccaagcggctgacaccacctccctctctggtcttttgggtgagtgacataaagtgaagaaaatgccttcttccttggtaacctgctttctcggctggccctcatggaggcacaggcctctgggatggggggagtttagaacacatcaccccctgcctttcatgtttcagatgacaaggcagagccccagagcagaaaggggactgtcctcggtcacatgggtagcggtttggagttggaccacagatggcgtcccggctttgtcacttaccattcgcattgtcacaggccagggaccaaacctctctaagtctcagtttccccatatagaagaatactagtctcctcatacaattgtagtaagagttaaataagaattacgatcactgcaactaaaaaactagataagaccgtcaacattcaatcagttttaatctacaaaaatggccgttccatgtgttacaacctagtatgataagctattgcagaacgtatgattgtgtccactcccagcgtgtgccacatgagtttgtgttcgtgtgtgtgcatgcacacacccacacacacacccctgtgggcacggagaagagaagaaagacttctcttggctccctgaaaggtttgcaggaaggtactgagtgtggtgctagaggcctggtaggtacttaatacaggaagccggattgtcattgtggtcgcttaccgagagaaactaacatgtatcaagcacctgctatgagctgccaggccctgaattagggcttcatggatctgtaatccccactacaaccctgggacgtaaatggtgaggcctccatctatgttacagctgaggaaacagagggtaagagaatcagaggtgcctgcctgtgtccctgtgtctggtaagtggtgaagcctgggttcaaacccagtttagaggttccccctccacctccagccctcttaccccagaccccctgccacatacatacacattggctctcacacatcatacatacacactttcacacacactcttatgcacacacacacactcaaacatgttcacacacacacactcacaaacacattcacatactcccacacacatactcacacacttatacgcatatacatacatgctcacacactcactcatatgactcatactcacacacatacacacactgacagatgctcacacacacacactcatatacacacatacacatgcacacacaaactcacacacatgctcacacacatacactgacacgctgtcacacacacacatactcccacacacaattatgctttcacacatacacatacatacacactcacacactttcacacacacgcagctctcattcttggtcacattcactctgagaagtaccaatgggaagcttcccctggacatcctgtggtccccaagcacacagaccacacagcctaacccaaggtctccccatgaaatgcccggggcctggcacaagacagatgtcaaactctcactgggcagctgagaagatgttaacaagggctctgttgagacaggtgtgtgcagggcttagggaacaaactagacagcgtggaggaccccagaggcccggcctgccgtgagcaggatccagggggcggctgcccacagagggactctctggtaggagctgtggcttttgaagaatgaggcggccagcccccggtgacctggccgggggcatcaggagaatgacccctcccagctctctctcctcctgccatctcgtcccctgctgggctcctgctgggtgagtccatttgccggagggtccagagccggtgacatctttacccagggtaggtgacaaacgatggggttagggcctgcagaagcaaatgtgagattacccattatctgagtttcccttctggaatattctgcaaagagtctcctgccacactgacctattctttcctcaacccaagacacagccgggatggaggcctggctgtccctggaatggatggcagatgcactcatacttggaagcttcgggaaagcctgtcaggctgagccaggtgtgagcaacaggccacggtgtctctgccccatcaaaagtggctgctgcttaaatctaagtcattattaaaattaaataaagttacaaatgacagttctactgggcagtgctgaaatgatgttcttagtttttctctgctcctaccaaagcccctcaccagcccctcattagtgctttgtagtgtagaaagcacttgaccctgaagcccgtggcctggcccaagacaggagtggagggctgggtaggggggttcttgtccccactgctgcaaaggcacacagggaccccaagcctccggtgagacctcccatccatgccagaccaacagtcatccagtttctgaatttcatgccattctggtcacaggtgccacggtgagacacaatttattttcaaatagtgccaaattctacagattcaatttgaagatttggagaaagcttgagacatcctatatatgtttgctagggctgctgttacaaatgaccacaaagatcatggcttaacgcaacacgcatttattcactttatagttctggaggccagaagtttaaaatggggtccactaggccaaaagtaaggtgatggcagagctgcaaacctggaggctccaggagagaagccattccttgccttttccgggttctagaggccgcctgcactccttgactcctatcttcaaagccagccacgcagcatctccaaagtcctctcctctccctctgtctctccccacccttacctcatcctctttccctctctttttcttccccctacccctgcctccatcacccatctcctgttctgattaacgttcctacctccctcttagaagggtcgtatgatgacgttggtcccacctgttcggataatctctccatctcagaatttttaacttaattgcttctccaaaatgacttagtcaaagtgccttttgccacattcagtaacatattcacaggtttcagggatgtgaatgtgggcatcttgagggggctgttatctgcctaatcacacatcatacaaggcagacagaggtctgcagggctttagaaaccaccagtgaggccaggtgcggtggctcacgcctgtaatacctgcactttggaaggctgaggcaggtggatcacttgaggtcagaagttcaagaccagcctggccaacatggcaaaaccctgtctctactaaaaatacaaaaaattagctggtgatggtggtgcgcacctgtaatcccagctactcaggaggctgaggcccgaacccaggaggcggaggttgcaatgagtcgagatcatgccagtgtactccagcctgggtgacagagcgagactctgactc

SEQ ID NO: 630 - DNA, 4773 bp, Homo sapiens
taacaatagcagagcaagactgacaacaataattaaaataagagaataaagaagatgtagtcagaggccattctgaatgcattcagattctcagtgtgtatgaggaaggctgcctgtaattaagagggaatctttaaccagtttcagtgtagtagtgaaaaagtgcttccatctgacactctccgcagtgctctggcaaagactttccaggatgaacaacgtttccagctgggaattatggatgatgctgcagagtgctttgaaaacctcctgatgagaattcacttccacattgctgatgaaaccaaagaggatatatgtactgcccaacactgcatttcccatcagaaatttgcaatgacattgtttgagcagtgtgtatgtactagctgtggtgccacttctgatccgctgcctttcatccagatggtacattatatctccaccacttccctttgcaatcaggctatttgtatgctggaaagacgagagaaaccttcaccaagcatgtttggtgagctgctgcagaatgccagcaccatgggggatctgcggaactgtccaagcaactgtggagagaggatcaggattcgccgtgtgttgatgaatgctccacagattatcacgattgggctggtatgggactcagaccactcagacttagcagaagatgttatccacagcctgggaacctgccttaagctgggtgatctgtttttcagagtgacggatgaccgggccaagcaatctgaactgtacttagttggaatgatctgttactatggcaaacattattctacattcttttttcaaacaaagattcgcaaatggatgtattttgatgatgctcatgtcaaggagattgggcccaaatggaaggatgtggtgaccaaatgcatcaaggggcattatcagcccctgctgctgctttatgcagatccccagggtaccccagtttccacccaggacctgcctccccaagctgagttccagtcatacagcaggacatgctacgacagtgaagattcaggacacctgactgatagtgaatgtaatcagaaacacacatccaagaaagggtcactgatagagcgcaagaggagctctggtcgggttaggaggaaaggcgatgagccccaggcctcgggataccacagtgaaggagaaacactgaaagagaagcaggctcctagaaatgcctccaaaccatccagcagcaccaacaggctgagagattttaaagagacagtcagcaatatgatccataacagaccatccctggcttctcagaccaatgtaggctctcactgcaggggcagaggaggagaccagcctgacaaaaaacctcctaggaccctgcctttacactctcgtgactgggaaatagagagtaccagcagtgagtcaaaatccagttcttccagcaagtatcgtcccacatggagacccaaacgagaatctctgaatattgacagtatctttagtaaggacaaaaggaagcactgtggctatacccagcttagccccttttctgaggattcagctaaagaatttataccagatgaaccaagcaagccaccttcttacgacattaaatttggtggaccaagcccccagtacaagcgctggggcccagcacggccaggctctcaccttttagagcagcacccccgactaatccagcgaatggaatctggctatgaaagcagtgagaggaacagcagcagccctgtcagcctggatgcagccctgcctgagagctcaaatgtctacagggatccaagtgctaagagatcagctgggttggttccttcctggcgtcatatcccaaagtcgcacagcagtagcatcctggaggtagactccacagcatccatgggtggctggacaaagagtcagcctttctctggtgaggagatatcttctaaaagtgaactggatgaattgcaggaagaggtggccaggagggcgcaggaacaggaacttcgaagaaaacgggagaaggagttagaggcagcgaaagggtttaaccctcatcctagccgcttcatggacttggatgaactgcagaatcaggtgagcagcctatcccgctccaagtattgttaagccaagaggcccaactggaatccggcatggatacagagtttggggccagttctttcttccattcacctgcttcctgccatgagtcacactcatcactatctccagagtcatctgccccacagcacagctcccccagtagatctgccttgaagcttctgacttcggttgaagtagacaacattgaaccctctgcattccacaggcaaggtttacctaaagcaccagggtggactgagaagaattctcatcatagttgggagccattggatgccccagagggtaagctgcaaggctctaggtgtgacaacagcagttgcagcaagctccctccacaagaaggaagaggcattgctcaagaacagctgttccaagaaaagaaggatcctgctaacccctccccggtgatgcctggaatagccacctctgagaggggtgatgaacacagcctaggctgtagtccttcaaattcatcagctcagcccagccttcccctgtatagaacctgccaccccataatgcctgttgcttcttcatttgtgcttcactgtcctgatcctgtgcagaaaactaaccaatgcctccaaggccaaagcctcaaaacttcattgactttaaaagtggacagaggcagtgaggagacctataggccagagtttcccagcacaaaggggcttgtccgttctctggctgagcagttccagaggatgcagggtgtctccatgagggatagtacaggtttcaaggatagaagtttgtcaggtagtctaaggaagaactcttccccttctgattctaagcctcctttctcacagggtcaagagaaaggccactggccatgggcaaagcaacaatcctctctggagggtggggatagaccactttcctgggaagagtccactgaacattcttctcttgccttaaactctgggctgcctaatggtgaaacttctagcggaggacagcccaggttggcagagccagacatataccaagagaagctgtcccaagtgagagatgttaggtctaaggatctgggcagcagtactgacttggggacttccttgcctttggattcctgggtgaatatcacaaggttctgtgattctcagcttaagcatggggcacctaggccaggaatgaagtcctcccctcatgattcccatacgtgtgtaacctatccagagagaaatcacatccttttgcatccacattggaaccaagacacagagcaggagacctcagaattggagtctctgtatcaggccagtcttcaggcttctcaagctggctgttctggatgggggcagcaggataccgcctggcacccacttagccaaacaggctctgcagatggcatggggaggaggttgcactcagcccatgatcctggtctctcaaagacttcaacagcagaaatggagcatggtctccatgaagccagaacagctacaccttgccgaggcctcagcagggagtgtggggaggatgagcagtacagtgcagagaatttacgtcgcatctcacgcagtctcagtggcaccgttgtctcagagagggaggaagctccggtttcttcccacagttttgattcatcaaacgtgaggaagcctttggaaaccgggcaccgttgttccagctcctcttccctccctgtcatccatgacccttctgtgtttctcctcggtccccaactctaccttccccaaccacagttcctgtccccagatgtcctgatgcccaccatggcaggggagcccaatagactcccaggaacttcaaggagtgtccagcagtttctggctatgtgtgacaggggtgaaacttcccaaggggccaagtacacaggaaggactttgaactaccagagcctcccccatcgctccagaacagacaactcctgggcaccctggtcagagaccaaccagcatattgggaccagattcctgactactccagggtgcaatcctcaactaacctacactgccacactaccagaaagaagcaagggccttcaggttcctcacactcagtcctggagtgatcttttccattcaccctcccaccctcccattgttcatcctgtgtacccaccatctagcagtcttcatgtacccctgaggtcagcttggaattcagatcctgttccagggtcccgaacccctggtcctcgaagagtagatatgcccccagatgatgactggaggcaaagcagttatgcctcccactctggacacaggagaacagtgggagaggggtttctgtttgttctatcagatgctcccagaagagagcagatcagggctagagtcctgcagcacagtcaatggtaaaggttattcctttcctttcctggagctacacctttctttgtaaaactgtactgtgggccgggcgcggtggctcacacctgtaatcccagcgctttgggaggctgaggcgggtggatcacgaggtcaggagattgagaccatcctggccaacatggtgaaaccccgtctctaccaaaatacaaaaaattagccaggcgtgacggtgcgtgcctgtagtcccaactactcggaaggctgaggcaggagaattgcttgaacccgggaggcagaggttgcagtgagccgagatcgcaccactgcactccagcttggcaatagagtgagactccatctc

SEQ ID NO: 631 - DNA, 4979 bp, Homo sapiens
aagctgagctccctgggtgatggctccttccacaagttctaacgtcccactgaaagcaagctgcaatttctgttgcttcttgtatcaattgcatgaaaggacgggcagtttcttttgatcctctggcatgccaaggcctgaatgccagtcctgggagccttaccagccctctaagaagaatcagaagcctgaccgggcgggaagtcctgacgcccttcccaggattgggcactgcggcagccccggcacagggcggggcccacctcaagccacattctcttgtcctgcccatcacagcgctgccaccaccgcctctggccctcagagggcggcaggcaacctctaagcttcctcctttcctctcttccccctttcctccctccctatgcccctgggtgcccgatccaggcttcaaagagacagctttcctgtacgcggtgtcctctgccgccctcacccacaccctggcccgggcctgcagcgctgggcgcatggagcgctgcacctgtgatgactctccggggctggagagccggcaggcctggcagtggggcgtgtgcggtgacaacctcaagtacagcaccaagtttctgagcaacttcctggggtccaagagaggaaacaaggacctgcgggcacgggcagacgcccacaatacccacgtgggcatcaaggctgtgaagagtggcctcaggaccacgtgtaagtgccatggcgtatcaggctcctgtgccgtgcgcacctgctggaagcagctctccccgttccgtgagacgggccaggtgctgaaactgcgctatgactcggctgtcaaggtgtccagtgccaccaatgaggccttgggccgcctagagctgtgggcccctgccaggcagggcagcctcaccaaaggcctggccccaaggtctggggacctggtgtacatggaggactcacccagcttctgccggcccagcaagtactcacctggcacagcaggtagggtgtgctcccgggaggccagctgcagcagcctgtgctgcgggcggggctatgacacccagagccgcctggtggccttctcctgccactgccaggtgcagtggtgctgctacgtggagtgccagcaatgtgtgcaggaggagcttgtgtacacctgcaagcactaggcctactgcccagcaagccagtctggcactgccaggacctcctgtggcacccttcaagctgcccagccggccctctgggcagactgtcatcacatgcatgcataaaccggcatgtgtgccaatgcacacgagtgtgccactcaccaccattccttggccagccttttgcctccctcgatactcaacaaagagaagcaaagcctcctcccttaacccaagcatccccaaccttgttgaggacttggagaggagggcagagtgagaaagacatggagggaaataagggagaccaagagcacagcaggactgaaattttggacgggagagaggggctattccatcttgcttcctgggatgaatggcttggagccagcatgttcttgggaggtgaactgctgggctaggaatgccaaggcaggcagtgccagctggaagtgaaggcgggagcctggctgagatgggtcaatcgggtcctgtggccctgctcaggtgcagtgggctccaggtgtcacacacctccaccactcccctggttttgctgtgccagagatggggagaaagcacaggtggtagaagccatccgttcagagaaaggagagctttctgtgcttgagtggacccgagtgagatctgtgccctggagccctgtgtccttgatttggcttttcaaatatgcctccgctgaggcctcattcttgtctcgagagctgggttatgcacactcacccagccgtgctcaaaactaccaccagtgcaggtaagacaggtgggagaactagccaccaaggcgggactcagtgcacctgaggttgaacagggagacaacggcccctccctgtgttccctgctggccaaaggaatcttcactcccagcgcagaggaggagggcaacagcttcctggtgcctggcagtgacgtggcgagctcagtttctcagctggctcttgagtgagctttggtgacttcctgtggctggggcctgcctggtctgtgacacccccataccagctgagttcacaatactgaagaacagctggctcacgagctatgacttgaagttacatttctattcttgtggctgctcatctagttaaggcttttgccctggctggggttataggtgcttgagtccttgctaagcctggctcctgggtagcctccttcagttcctaatggcctctcacttggccctcactttggctcttacttgaggaggagacgtgactttgataatttcctcagatcctgtggacattttcagcagcacctgccaaggccctctgtgaaaggaggagagactggtacctccacacaggcacacatggatgcacagcccctggaccaggctgggggttcctgttgcacatgcctctcttgttcaggatgaagaccttgcaggggtccccttgctggaggcattgtacttccccagagtggggcccgatgccacccaggaggaaatgacttctttcgggaagcccttggccactttgctggccctgccacgcccatctgtcagcttcctttctccctaaacctagagttgctgacccttcaccaacacaggaaatttcagaatcagctgaatgctcagaaacctcgcctgtgccagctccaggacaaaggcccgctgactgtgccctggccaactccctgagacctccaagggcgaggaggagctgcccagtctccagtggatcagggcagtctgctggatgctggaaggatttttgactgcagaggcccggctgagaagccaaactgacctgagcccctctcgttaaaatgacattgctgacccaagcacctggcccacaccttggcagcaggagaaaaatggggagagggctggttttctcctttcttccacttccccacagcatggagattttctctgccttcccaatccatcttgctcctccgagaccccaactctgcctccacccaggctcagtgctgggcgtaaggcagcagggacctcactggcagagcagggggcctgggagcaacgtggaggccagagcaccctgatccaccaacatgccacctgcattctgacttcatggctggcagtgccagggtcgtgggagggcaaagggcaggctctaaggcatctaggcagtggctggctgctaacatggacaccccaagtcaatggcacagtgcaggttctgagggctccttggcttgtggggtcttctctgtctgtctctctccctctcttcttccttgctctcatccctttcttttccagttacccctgaagacccacctcggccctcttggggcccctggggactagagtgaccactgacccctcattctacagctttaagggaaatgctcacagggtatttttgtctacctcaaatatatagtttttagagcaaaggagaataatttatatagctaagatatatgagaaagtatttatattatttatatagttgctatatttcacagacagcacaggtggggtttgtgtattttcccggaaaccctctgtctggggagatacagcctgacctgaccgggtcccccactgagcaggaggccgggtcgctgggaaggaggacaaacctgtattccatgactgggtctgtctcggagctggtaagcacatgtccgctctgtgatgagccctggtgggctccatccagaccctccttgtgatgtttttgtagattttctgcccttctgggtccaggcccccttcttctgctctggcaaaagtgtcttactcataatgataatgacaacgagaattcccacacctggcatttgtaaagcactttgctatttagaaacaaaaacttttacccctttcatctcacttgatttctccgttatctctgtgaggtaggtggggccacattactgtggccattttatagatgaggtccagagatggagagctgtgctcaaagtcacacctaagagacttgttcaatgaatatttactgaacatctccatagaccaggcactacgggctgacctgctctgagcccaggagccccaaagcctggataccactgtgagcccaagaactcagggaagcagttccttcccaggctgtgatcccagccttttggatctggatggcatgttggcacttcccccaagtggagtcccatgtctcaggggctttggctgcctgagaaggctggagagaccaggaacccatggaggccactccaaggggtccttctgcccacactgcccaagaagcttgggctacaccactgggcccctcccaacctacagatgaattttgattgctctcatttgtgttttgcttgtaaaaatgaattgttttccactggatttctggctgcttttgcaaaagtcagctgcgctggcagactgggcctgcatgtcctcctgcaggcagctagagtgagggagtctaatggacaggatgccccaagtgcccccgttgctcatggatgcccctgcctgcctctcatgagcacatagtcctgtcccctggtctagataagcccagctttcctggtacccttcatcacctggcagacagacagccccatgccaaccctggacattacttgcttttgaacctttcctttctcaacaaccatgaacttcaaatgctttctgtctcaggacgctttagaataacaatggaagccatcacttattgagcaccccttatgtccatttattcaaccaatgattatttagggatctcttattgagcaccaggcagcatcctgggtgcttggtgcagcaaggaacaggaccaagtctctgcctcatggggctgacatcctagtgggtgagaaagacaataaaccaataaatgacatggc

SEQ ID NO: 632 - DNA, 5395 bp, Homo sapiens
ttgcaaatacatttttccattctgtaggtcgttgccttactctgttgatgtttccttcattatgcagaagctttttagcttaatgtaataccatttgtctgtttttgcttttgttgcttatacttttgaggtcttaatccacaaaattcttgccaagatcaatgtcatggagctttcctcttatgtcttcttttagtagtttgataattttggattttacatattttacatttaagtttttacttcctttggggttggtttttgtacatggtgaaagatgggtcaagtttcatccttttgcatgtggatatccaggttttccaacaatggatactgaagagactttcctttcctctctgtgtgttcttggtgtctttgtggaacttctgttggctgaaaatgcagagatttatttctgggctattattttccatggagctgtgtgtttgtttttaatggcagtactaagcccttttagttactatagctttgtgatatgatagtaaattagtgtgaatactctcagctttttgtttgttggtttgttttgtttcacatattgctttgggtattttgagtctttggggttccatatcaatttaagggttgcttttttgaaaatttctgtgaaggatgctgttatttttgacagggattaaattgaatttctagatcagtttggatagtatggacattttagcaatattaattcttgtggtctgtgaggacaaggtgtcttaaaatttctttgtgtgttcttcagtttacttcatcattatttgtatagtttgcagtgtagttatttttttacctctttaaatttattgctagagatttttttcagctgttacaaatgaagtttttattttgtttttttcagataattttctactaatgtatacaaacaccactgatttttatattgattttgtatcctgcaaatttactgaatttgttagttctaacaccatttttacggaggccttagcatcctcttaaaaaagaagtgttttctttaagacttttttataaatcttcaaacagggataacataactttctcttttccaatttgaatgtttttttaatttcttttcctgcctcattgctctggctgggacctccggcactgtgttagttgacagtggcaaaacagggcattatttttgagtttacaatatggacctcttgtgaccaggaataccagaggcagcatgttctaagacacagttgtcttcttatgtatgttttgctcagtttgcctctcctcatcgtatcctactccctactcactctggcaaatctctgacccaacaggagtatgcgaccagtggttggaacctgaatgtgatgccagtgctagatcagtctgttctctgtcacatcaatgcagacatctcaggcatgaaggtgccctggctgtacgtgggcatggttttctcagcattttgttggcatattgaggatcactggagttactctattaactatctgcattggggtgagccgaagacctggtatggtgtaccctccctggcagcagagcatttggaggaggtgatgaagatgctgacacctgagctgtttgatagccagcctgatctcctacaccagcttgtcactctcatgaatcccaacactttgatgtcccatggtgtgccagttgtccgcacaaaccagtgtgcaggggagtttgtcatcacttttcctcgtgcttaccacagtggttttaaccgaggctacaattttgctgaagctgtcaacttttgtactgctgactggctacctgctggacgccagtgcattgaacactaccgccggctccggcgctattgtgtcttctcccacgaggagctcatctgcaagatggctgccttcccagagacgttggatctcaatctagcagtagctgtgcacaaggagatgttcattatggttcaggaggagcgacgtctacgaaaggcccttttggagaagctttccttacaaggttgagtccacatcagggctcagtgttggctgaggtggggtgtccacaaccctactcctagtctttacagtatatgtgggttgaacacccccagggcgtcacggaggctgagcgagaggcttttgagctgctcccagatgatgaacgccagtgcatcaagtgcaagaccacgtgcttcttgtcagccctggcctgctacgactgcccagatggccttgtatgcctttcccacatcaatgacctctgcaagtgctctagtagccgacagtacctccggtatcggtacaccttggatgagctccccaccatgctgcataaactgaagattcgggctgagtcttttgacacctgggccaacaaagtgcgagtggccttggaggtggaggatggccgtaaacgcagctttgaagagctaagggcactggagtctgaggctcgtgagaggaggtttcctaatagtgagctgcttcagcgactgaagaactgcctgagtgaggtggaggcttgtattgctcaagtcctggggctggtcagtggtcaggtggccaggatggacactccacagctgaccttgactgaactccgggtccttcttgagcagatgggcagcctgccctgtgccatgcatcagattggggatgtcaaggatgtcctggaacaggtggaggcctatcaagctgaggctcgtgaggctctggccacactgccctctagtccagggctattgcggtccctgttggagagggggcagcagctgggtatagaggtgcctgaagcccatcagcttcagcagcaggtggagcaggcgcaatggctagatgaagtgaagcaggccctggccccttctgctcacaggggctctctggtcatcatgcaggggcttttggttatgggtgccaagatagcctccagcccttctgtggacaaggcccgggctgagctgcaagaactactgaccattgcagagcgctgggaagaaaaggctcatttctgcctggaggccaggcagaagcatccaccagccacattggaagccataattcgtgagacagaaaacatccctgttcacctgcctaacatccaggctctcaaagaagctctgactaaggcacaagcttggattgctgatgtggatgagatccaaaatggtgaccactacccctgtctagatgacttggagggcctggtggctgtgggccgggacctgcctgtggggctggaagagctgagacagctagagctgcaggtattgacagcacattcctggagagagaaggcctccaagacctttctcaagaagaattcttgctacacactgcttgaggtgctttgcccgtgtgcagacgctggctcagacagcaccaagcgtagccggtggatggagaaggcgctggggttgtaccagtgtgacacagagctgctggggctgtctgcacaggacctcagagacccaggctctgtgattgtggccttcaaggaaggggaacagaaggagaaggagggtatcctgcagctgcgtcgcaccaactcagccaagcccagtccactggcaccatccctcatggcctcttctccgacttctatctgtgtgtgtgggcaggtgccagctggggtgggagttctgcagtgtgacctgtgtcaggactggttccatgggcagtgtgtgtcagtgccccatctcctcacctctccaaagcccagtctcacttcatctccactgctagcctggtgggaatgggacacaaaattcctgtgtccactgtgtatgcgctcacgacggccacgcctggagacaatcctagccttgctggttgccctgcagaggctgcccgtgcggctgcctgagggtgaggcccttcagtgtctcacagagagggccattggctggcaagaccgtgccagaaaggctctggcctctgaagatgtgactgctctgttgcgacagctggctgagcttcgccagcagctacaggccaaacccagaccagaggaggcctcagtctacacttcagccactgcctgtgaccctatcagagaaggcagtggcaacaatatttctaaggtccaagggctgctggagaatggagacagtgtgaccagtcctgagaacatggctccaggaaagggctctggtaagacaggtgtggtttgggtaggctgttggctaaacataactgagtgacccatgtatttgtcacctctgttgtggccatggaggataagaccaagagtggcctctaacccagtctgtccctgcacctttcaccgcaccaccttccgcccagacctggagctactgtcctcactgttgccgcagttgactggccctgtgttggagctgcctgaggcaatccgggctcccctggaggagctcatgatggaaggggacctgcttgaggtgaccctggatgagaaccacagcatctggcagctgctgcaggctggacagcctccagacctggacagaattcgcacacttctggagctggaaaaatttgaacatcaagggagtcggacaaggagccgggctctggagaggcgacggcggcggcagaaggtggatcagggtagaaacgttgagaatcttgttcaacaggagcttcagtcaaaaagggctcggagctcagggattatgtctcaggtgggccgagaagaagaacattatcaggagaaagcagaccgtgaaaatatgttcctgacaccttccacagaccacagccctttcttgaaaggaaaccaaaatagcttacaacacaaggattcaggctcttcagctgcttgtccttctttaatgcctttgctacaactctcctactctgatgagcaacagttgtgacagtggcaccaaaggtcatttgtggctgtttttgtttgtttgtttcttaaatcctactatctcctggcctggacctcagaaggagctttttgcctatctataatttttcactgccaatttttgatatcctctctcctagagttactgttaaaaggttggttcgtaaagtccacaccccgatgctcagaagtgtcttgccagcaacattcctgctagcatacaggagtgatttcctaaaccagtttcattctagtctgaatagggacaaacaaatcttgaggaagcccaagtgcgtacctttatttttgcccccgccaccctctttctatacttcaatttttgtttgttttttgtttttttgtccctgtcataaaatattttggtgcttcaaaacttgtaccttcattgtacatccttttcttttctccccttgggtcttattataaaagaagacaatgtacgttgtaattaccaaaaagaatagggaaaaacaagaatttcatgactctacctgtggtctatctttaatttcatttcttttgttaaaaataaaacaatgagtatgtttgg

SEQ ID NO: 633 - DNA, 5401 bp, Homo sapiens
gaggagcccagggacatatttcacagctaagtcaactgcttttcttcaaattcagatttaatccttgagtgaaatgagtcactggctcatccagttaagatcatcacccactttcctaacaaaacttctcttcaaagaaggactcgctcatccatcaggtggacctccacaggaacaaatcatatccatgtcaggcggcaccaaacctaaatctgcttctgcctcagcagacaggacatgagattagtgccaccatcaaggacttgaaagatgcaggggtgatgattcccaacccattcctgttcaactctcccatttggcctgtgcggaagacagatggatcttggagaacgacagtgaattatcataagcttaaccaagtggtgactccaattgcagctgctgtagcagatatggtttcattgcttgagaaatgtgtacctggtatgcagccattgacttggcaaatgcctttttctccatacctgtccataaggcccaccagaagcaatttgccttcagctggcaaggccagcaatatacctttacagtcctacctcagaggtatagcaactctccagctctgtgtcataatcttattcggagagaccttgactgctttttgcttctgcaaagtatcacactggtccattacattgatgacattatgctgattggatccagtgagcaagaagtagcaagtacactggacttgttggtgagacatttgtatgccagaggatgggaaataaatccgactaaaattaaggaaacttccacctcagtaaaatttttaggggtacagtggtgtggggcctgtcaagatattccttctaaggtgaaggataagttgctgcatttggccactcctacaaccaagaaagaggcacaatgcctactgggccgatttggattttggaggcaacatggtccttatttgggtgcattactgtggcccatttatcaagtgacctctaaggctgccagttttgagtggggtccagaacaggagaaggctctgcaacaggtccaggctgctgtgcaagctgctctgctacttgggccacatgacccagcagatccaatggtgcttgaggtgtcagtagcagatagggatgctgtttggagcctttggcaggcccccataggtgaatcatggcagaggccgctaggattttagagcaaggccctgtcatcttctgcagataactattcttcttttgagagacagctcttagactgttactgaactttggtggaaactgagcatttgactatgggtcatcaagtcaccatgtgacctgaactgcctatcaggaactgggtgctttctgacccacctagccataaggtgggtcatgcacagcagaattccatcatcaaatggaagtgatatatacgtgattgggctcgagcaggtcctgaaggcatgagtaagttacgtgaagaagtggctcaaatgcccatggtgtctacttctgccaccctgcctgctccccccccagggtgcactgatggcctcatggggagttccctataattggttgacagaggaaaagaagacctggttcagagatgattctgcatgatattcaggaaccatgcaaaagtggacagctatagcactacagcccttttctaggacatccctgaagggcagcagtgaagggaaatcttcccagttggcagaactttgagcagtgaacctggttgtgcacttagcatggaaggagaaatggccaggtgtgcgattatatactgattcatgggctgtagccaatggtttggctggatggtcagggacttggaagaagcatgattggaaaattggtgacaaatttggggaagaggtatgtggatggacctctgagtggccaaaaactgtgaagatatttgtatcccacgtgagtgctcaccaacggatgacctcagcacaggagattttaataatctggtggatagaatggcctgttatgtggacaccactcagcctctttccccacccacccctgtcgtcgcccagtgggcccattaacaaagtggccatggtggtagggatggaggttatgcatgggctcagcaacatgtacttccactcaccaaggctgatctggctacggccactgctgagcgcccaatttgccggcagcagagactaacaccgaacccttgatatagcaccattactcatggtgattagttacctggtggcaggttgaatatattcaacctcttccatcatggaaagggaagaggtttgtcctcactggaatagacaattactctggatatagatttgcctatcctgcacacaatgcttctgccaagattaccatctgtggactcacggaatgctttatccactgtcgtggtattccacacagcattgcctgaccaaggcactcactttatggctaaagaagtgtagcagtagacttatgcttatggagttcactggccttatgttccccatcatcctgaagcagctggattgataagagtggtggaatggccttttgaagtcacaattacaacaccagtgaggtgacaatactttgcagggctgggacaaagttatccagaaggccgtgtatgctctaaatcagcatccaatatatggtactgtttctcccatagccaggattcgtgggtccaggattcaagggatggaagtggaagtggaaatggcaccactcaccatcacccctagtgatccactagaaaatttttgctcctgttcccacgacattatgttctgctggcctaaaggtcttagttccagaggaaggaaggctgccaccaggagacacaacaacgattccattaaactggaagttaagattgccaccaggatactttgggcttctcctcctgtctttaagtcaacaggctaagaagggagttacagtgttggctgggatgattgactcagactatcaagatgaagtcagtctactactccataactgcggcaaggaagagtatgcaggtaatacaggaaattcattagggcatctcttagtattaccatgccctgtgattaaggtcaatgggaaactacaacaggcaggactacaaatggcccagacccctcagaaatgaaggtttggatcactccaccaggaaaaaaaaccacaacctgctgagctgcttgctgaaggcaaagggaatacagaatgggtagaagaaggtagtcatcaatatcagctacgaccacgtgaccagctgcagaaatggggactgtaattgtcatgagaatttcctccttcttttgctaaaatcatgtttgtgcatgtatacacttgtactaagaaaatatcttcattttatttcctttttctctatgatgtgacataagatttattgacttcatagcagcatttaagtattgttaactttatataatagtatttgggttggggattggtgcctttctggttgtatgaagaatagttgtattatgttaggtgtaattatgacattattgtctttaagattatgtatgacctcaggaggtgtgtatgggttcaagttgacaggggttggagttgtgattgttaatgctctgtgtcaacttgattggattgaaggatacaaagtactgatgaatcccctaatgattttggtaaaaatcattaagttaaggtggatacacatcttgtcatatgatcaaatggtttcgcgaaaaatcaataatcagacaacaagatgtgcgaactcgatattttacacgactctctttaccaattctgccccgaattacacttaaaacgactcaacagcttaacgttggcttgccacgcattacttgactgtaaaactctcactcttaccgaacttggccgtaacctgccaaccaaagcgagaacaaaacataacatcaaacgaatcgaccgattgttaggtaatcgtcacctccacaaagagcgactcgctgtataccgttggcatgctagctttatctgttcgggcaatacgatgcccattgtacttgttgactggtctgatattcgtgagcaaaaacgacttatggtattgcgagcttcagtcgcactacacggtcgttctgttactctttatgagaaagcgttcccgctttcagagcaatgttcaaagaaagctcatgaccaatttctagccgaccttgcgagcattctaccgagtaacaccacaccgctcattgtcagtgatgctggctttaaagtgccatggtataaatccgttgagaagctgggttggtactggttaagtcgagtaagaggaaaagtacaatatgcagacctaggagcggaaaactggaaacctatcagcaacttacatgatatgtcatctagtcactcaaagactttaggctataagaggctgactaaaagcaatccaatctcatgccaaattctattgtataaatctcgctctaaaggccgaaaaaatcagcgctcgacacggactcattgtcaccacccgtcacctaaaatctactcagcgtcggcaaaggagccatgggttctagcaactaacttacctgttgaaattcgaacacccaaacaacttgttaatatctattcgaagcgaatgcagattgaagaaaccttccgagacttgaaaagtcctgcctacggactaggcctacgccatagccgaacgagcagctcagagcgttttgatatcatgctgctaatcgccctgatgcttcaactaacatgttggcttgcgggcgttcatgctcagaaacaaggttgggacaagcacttccaggctaacacagtcagaaatcgaaacgtactctcaacagttcgcttaggcatggaagttttgcggcattctggctacacaataacaagggaagacttactcgtggctgcaaccctactagctcaaaatttattcacacatggttacgctttggggaaattatgaggggatctctcagtacaaagtactgatcttgggtgtgttggtgagggtgttgccaagagatattaacatttgagtcagtgggctggggaaggcagatccacccttaatctggtgggcacaatctaatcagctgccagcgaatataaagcaggcagaaaaatgtgaaaaggagagatgggcctagcttccagcctacctctttctcccatgctggatacttcctgcccttgaatattggactctaaggtcttcgctttcaggacttggattggctctccttgctcctcagcttacagatggcctattgtggtaccttgtgatcatatacgtttatacttaataaattcccctttatatatatatatctatgtatatcctattagttctttccctctagagaacgctaatacaccatccttgattaaatcccttcaccctctctccatctttgtaaaaattctcctcattaaattattgttcagtg

SEQ ID NO: 634 - DNA, 3526 bp, Homo sapiens
atttttctggctccgcgggcagcggggccgtggcgctcggacggtctgggattcgggcgccgccgcggaaccggaataagaagggagagcgcccggctcggtcctcggtctccaccgcggcccggaaggaatccgggcagcctccgcggagatacttgccagaactaatacagctgatgaaatacctgaccttttctgctccagcttgagtattcaaagacagtagccatctgacttcagttatttattcaagatgcagaaaagacaaggatattgcagttattgccgtgtgcagtataataacctggaacagcatttgttcagtgctcagcacaggagtttgaccagacagagtagacgtcaaatatgtaccagtagtttgatggaacgtttcttacaggatgtactgcagcaccacccatatcattgtcaagagagcagttcaacacaagatgagacacatgtgaatactgggtcatcgtctgaagtggtgcatttggatgatgctttttctgaagaagaggaagaggatgaggataaggttgaggatgaggatgctaccgaagagagaccatccgaggtttcagaacctattgaagagttacattccagacctcataaatctcaggaaggcacgcaggaggtttcagttcgaccatcagttattcaaaaactggagaagggacagcagcagcccttggagtttgttcataaaattggggccagtgtgagaaaatgtaacctagtagatattggtcaggctacaaataatagaagcaacttggtacgccccccagtgatttgtaatgctcctgctagttgtttacctgaaagctctaacgatagaccagttacagctaatacaactagtttaccaccagcagctcatttggattcagttagcaaatgtgacccaaacaaagttgagaaatatcttgaacagccagatggggcctctagaaatcctgtgccatcatcccatgtagaaactacttcattttcgtatcagaaacataaagaatcaaataggaaatctttacgcatgaattcagataagttggttttgtggaaagatgtaaaatctcagggtaaaactttatcagctggcttgaaattccatgaacgcatgggtactaagggctccttaagagttaaatctccttccaaattagcagtaaacccgaataaaactgacatgccttctaataaaggaatctttgaagatactattgcaaagaaccatgaggaattcttttctaacatggattgtacccaagaagaaaagcatttggtttttaacaagacagccttttgggaacagaagtgctcagtgagttctgaaatgaagtttgattgtatctctcttcagtcagcatctgatcagccccaagagactgcacaagacttaagtctttggaaggaggagcaaattgaccaagaagataactatgagtctagaggttcagaaatgagttttgattgcagttcctcttttcattcactgactgaccaatctaaagtgagtgccaaagaagtaaacctttccaaggaagtacgtactgatgtacagtataagaataataaatcttatgtttctaaaataagttctgattgtgatgacattcttcacttggttaccaaccaatcccaaatgattgttaaagaaataagtcttcagaatgcaaggcatattagcctggttgaccaaagctatgaatctagtagttctgaaacgaattttgattgtgatgcttcacctcagtccactagtgactacccccaacaatctgtaacagaagtaaaccttcctaaggaagtgcacattggtttggttgataagaactatggttccagtagctctgaagtaagtgctgattctgttttcccactgcagtcagtggttgacagacccccagtggctgtcacagaaacaaaacttcggaagaaggctcataccagcttggttgataactatggatcgagttgttctgaaacaagttttgattgtgatgtttctcttgagtcagtagttgatcatccccaactgactgtcaaaggaagaaacctgaaaggtagacaagtccacctaaaacataagaagcgtaaacccagtagtgctaaagcacatcttgattgtgatgtctcacttgggacagttgcagatgaatcccagagggctgttgaaaagataaatcttctgaaggagaagaatgctgaccttatggatatgaactgtgaatcccatggtcctgaaatgggttttcaggctgatgctcaattagctgaccagtctcaagtagccgaaatagagcgtcagaaagtggatgttgaccttgagaataagagtgttcagtctagccgttcttctctgagttctgattctccggcttctctttatcattcagctcatgatgagcctcaagaagctttggatgaagtaaatcttaaagagttaaatattgacatggaagttaggagctatgattgctccagctctgagttgacttttgattctgacccgcctcttctgtcagttactgagcagtctcatctggatgctgaaggaaaagaacggcacattgacctggaagatgagagctgtgagtcagatagttctgaaataacttttgattctgatattcctctttattcagtaattgaccaacctgaagtagctgtttatgaggaagaaactgttgatctggaaagtaaaagtaatgaatcttgtgtctctgaaataacttttgattctgatattcctcttcattcaggaaatgatcaccctgaagtagctgttaaagaagtaattcagaaagaagagtacattcacttagaaaggaagaatgatgaacccagtggttctgaaataagttcggattcccatgcccctcttcattcagtgactaattctcccgaagtagctgttaaaaagctaaatcctcaaaaagaagagcaggtacacttagaaaataaggaaaatgaacctattgattctgaagtaagtttggattataatatcatttttcattcagtgactggacgttctgaagatcccattaaagaaataagccttcacacaaaagagcacatgtacttagaaaataagagtgtttttgaaacaagtttggattctgatgtccctcttcaggcagcgactcacaaacctgaagtaattgtcaaagaaacatggcttcaaagagaaaagcacgctgaattccaaggtagaagtactgaattcagtggttcaaaaacaagtttagattctggtgtccctcattattcagtaactgaacctcaagtagctgttaacaaaataaacagaaagaagcaatatgttctagaaaacaagaatgataaatgtagtggttctgaaataattttggattctaatgttccacctcagtcaatgactgaccaacctcaactagcttttttgaaggaaaaacatgttaatctgaaggacaaaaacagtaaatcaggtgattctaaaataacttttgattctgaacaacttcaggaagcggtt

SEQ ID NO: 635 - DNA, 4695 bp, Homo sapiens
agggcaacgcgagggaagaaggtggcggctcccactcgcttctccctcgggtcgggtccgagctgccaggccgcatgccactccctgacggggcgcggaccccggggggcgtctgccgggaggcgcgcggcgggggctacaccaaccggaccttcgagtttgacgacggccaatgcgcccccagggtccaggtggagttctacgtcaacgagaacaccttcaaggagcggctcaagctgttcttcatcaaaaaccaaagatcgagcctgaggatccggctgttcaacttctccctgaagctgctcatctgcctgctctacattgtgcgcgtcctgctcgatgacccggccctgggcatcggatgctggggctgcccaaagcagaactactccttcaatgactcgtcctccgagatcaactgggctcctattctgtgggtggagagaaagatgacactgtgggcgatccaggtcatcgtggccataataagcttcctggagacgatgcttctcatctacctcagctacaaaggcaacatctgggagcagatcttccgcgtgtccttcgtcctggagatgatcaacactctgcccttcatcatcacgatcttctggccgccgctgcggaacctgttcatccccgtctttctgaactgctggctggccaagcacgcgctggaaaacatgattaatgacttccaccgtgccatcctgcggacacagtcagccatgttcaaccaggtcctcatcctcttctgcaccctgctgtgcctcgttttcacggggggttgcaggacctgcggcatccagcacctggagcgggcgggcgagaacctgtccctcctgacctccttctacttctgcatcgtcaccttctccaccgtgggctacggtgacgtcacgcccaagatctggccatcgcagctgctggtggtcatcatgatctgcgtggccctcgtggtgctcccactgcagttcgaggagctcgtctacctctggatggagcggcagaagtcagggggcaactacagccgccaccgtgcgcagacggagaagcacgtggtcctgtgtgtcagctccctcaagatcgaccttctcatggacttcctgaacgagttctacgcccacccccggctccaggactattacgtggtcatcctgtgccccacggagatggatgtccaggtgcgcagagtcctgcagatccctctgtggtcccagcgggtcatctacctccagggctctgcactcaaagaccaggacctcatgcgagccaagatggacaatggggaggcctgcttcatcctcagcagcaggaacgaggtggaccgcacggctgcagaccaccagaccatcctgcgcgcctgggccgtgaaggacttcgcccccaactgccccctctacgtccagatcctcaaacctgaaaacaagtttcacgtcaagtttgctgaccacgtggtgtgtgaggaggagtgcaagtacgccatgccggcgctgaactgcatctgcccggcgacctccaccctcatcaccctgctggtgcacacgtcccgcggccaggagggacaggagtctccggagcagtggcagcgcatgtatgggcgctgctccggcaacgaggtgtaccacatccgcatgggtgacagcaagttcttccgcgagtacgagggcaagagcttcacctacgcggccttccacgcccacaagaagtatggcgtgtgcctcatcgggctgaagcgggaggacaacaagagcatcctgctgaacccggggccccggcacatcctggccgcctctgacacctgcttctacatcaacatcaccaaggaggagaactcggccttcatcttcaagcaggaggagaagcggaagaagagggccttctcggggcaggggctgcacgagggtccggcccgcctgcccgtgcacagcatcatcgcctccatggggacagtggccatggacctgcagggcacagagcaccggcctacgcagagcggcggtgggggcgggggcagcaagctggcactgcccacggagaacggctcgggcagccggcggcccagcatcgcgcccgtcctggaactggccgacagctcagccctgctgccctgcgacctgctgagcgaccagtcggaggatgaggtgacgccgtcggacgacgaggggctctccgtggtagagtatgtgaagggctaccctcccaactcgccctacatcggcagctccccaaccctgtgccacctcctgcctgtgaaagcccccttctgctgcctgcggctggacaagggctgcaagcacaacagctatgaagacgccaaggcctacgggttcaagaacaagctgatcatcgtctcggcagagacggccggcaatgggctgtacaacttcatcgtgccactgcgggcctactacagatcccgcaaggagctgaaccccatcgtgctgctgctggacaacgagcccgaccaccacttcctggaagccatctgctgcttccccatggtctactacatggagggctctgtggacaacctggacagcctgctgcagtgtggcatcatctatgcggacaacctggtggtggtggacaaggagagcaccatgagcgccgaggaggactacatggcggacgccaagaccatcgtcaacgtgcagaccatgttccggctcttccccagcctcagcatcaccacggagctcacccacccttccaacatgcgcttcatgcagttccgcgccaaggacagctactctctggctctttccaaactagaaaagagggagcgagagaatggctccaacctggccttcatgttccgcctgccgttcgccgccggccgcgtcttcagcatcagcatgttggacacactgctctaccagtccttcgtgaaggactacaagatcaccatcacccggctgctgctgggcctggacaccacgccgggctcggggtacctctgtgccatgaaaatcaccgagggcgacctgtggatccgcacgtacggccgcctcttccagaagctctgctcctccagcgccgagatccccattggcatctaccggacagagagccacgtcttctccacctcggagccccacgacctcagagcccagtcccagatctcggtgaacgtggaggactgtgaggacacacgggaagtgaaggggccctggggctcccgcgctggcaccggaggcagctcccagggccgccacacgggcggcggtgaccccgcagagcacccactgctacggcgcaagagcctgcagtgggcccggaggctgagccgcaaggcgcccaagcaggcaggccgggcggcggccgcggagtggatcagccagcagcgcctcagcctgtaccggcgctctgagcgccaggagctctccgagctggtgaagaaccgcatgaagcacctggggctgcccaccaccggctacgaggacgtagcaaatttaacagccagtgatgtcatgaatcgggtaaacctgggatatttgcaagacgagatgaacgaccaccagaacaccctctcctacgtcctcatcaaccctccgcccgacacgaggctggagcccagtgacattgtctatctcatccgctccgaccccctggctcacgtggccagcagctcccagagccggaagagcagctgcagccacaagctgtcgtcctgcaaccccgagactcgcgacgagacacagctctgagccagccctgcacggagctcaggccaccaagcccggggtcctcaggaaggacgtggaggagcgtgtgaggacacggtggcactagcgtgaccctggggatggcacactctactcaccatggctcctgggactccaccctggaaaggagcccctcatgcggggggagggccagctcacccctgggcacctgcaggctagtgaggagagttttttaacctatttttacacgtcgatgcagtccacttctctttacacagatgtaccgcaactcgtgaccagggctggctgggagggcaacgcagggactggacgccctacagggccgagcccaggctgtgctggagggtggggctggggtgcatggggaggggagcagaacccagaacccaggagccccgcgtgggccacacccaactcagagccggcctgagcgttcacggccaggcagcctcgcttccttgcagccaagggctgggggccagggctgctgttctgcactctggggtgggtgagggggaccctgggctgtttgctgtcccaagccccttctggaagttagaagcagcaaagggcccggggaagccgggcatgtgagaggggtgcgtccccaggtcccccagagggccctgtcgccgaggacctttctgaaggaagcagaagacgccatttcctctacttcacactgaactgtcccagccactgcatctagggggcattgggcggaagatggtgcatttccatggaccattttacacttaccttttaaagcaaagcctcattttctaaacccctgacttgtgaagcacaattcagcctccgggctgggccacgtggagagagaggatcttctcagcaaggcgagatcccgggcggcggctgacatcaggagcgccaccctgcgtcctttgctgctggttccttactggtttgtacggtcagcgctggaaacttctattaaatggatgcattctggaggcatgaagtt

SEQ ID NO: 636 - DNA, 3498 bp, Homo sapiens
gattggccggacgtggtggcgtacacctgtagtcctagctacccggagggctgaggcaggagaatggcgtgaacccggtgggaggagtttgcagtgggccgggatcgcgccactgcactccagcctgggcgacagagcaagactcggtctcaaaaaaaaaaaaaaaaaaaaaaaaaggcaggccttactccgtcccaaactgaaaggattaaatggctttacctgggagaagataaccatcctgccctccattgctacccccacatactgtccatgttctcagggggtactgtgagtcctgggatctttggggttgcccacctgcctgtggtagttatggagaccccccaggtgttgaggcagggctggggtgtccccttccaaccaggctgtcaaggccccaactccggggcagaggcagtggcagggcagccagggttgcgccagagcctgagcaggttgaggtggggtcaggcagggctgggagtcagggcaggggcagcagcagtggacccgctatgcacacatcgtcttctccaaggtttgtgtgcagaacatcctgcccatgctgccccagcagcttcagttggcacctgccccagtccagcctctgggaaccatgcagcagctcccagcggccctgcacccaccaccagcatccgtttcacctgcagttgaagatccgtgaggtgcccagaagatcatgcagtcatcagtcccacggagcagcccgtgaggctgaggctcctcccactggaccgccccccaactggcaccactgctgcccctgcccctactctcagcctcacgtgactctcgggcagaggcagtggtggggcagccagggcagcgtcaagagtctgagccaggtgaggtgcggtcaggacccccacagggctgggagtcagggcaggggcagaacaaaccttggaggggaagatgcgtgcatagtgggcctggagggcggctgtggcctagtggacaggaagaagcagtgggcctggaagagctgcatgatcagggccggcactggtccagggcacgtgcagtgaagaggacagcgccttctcggtctccggttccctgagcctgtccttggcttctccacctgtacaggcaaaggggaagctgtccccatcacacatggcacacttgggggtgttgggctttggactgcagctggagcatcttctcatcttgcatttgggcgtggtggggtcctccagtgtgggatccatgtccgtggggttccctctgccccgaccccgaaagcccagtcagtttctcttcaggctctgccccccgggtggctcagcccagctcctgcctaggaaagccttagtgttgggagggaccctgatgactgaggagcctggtagctccaggtcgcccacactttcaggtctcttgcaccagaaggtggcaggatccattgggaggaaacaggtcaccttggaaggcgtccctgggcccccatccccaggggtaggggccgtagggggcccgctctgctgccttgaccagactcctgggcattgaaggctcctgggcccagtaagaaggaggtgggtgccaaggttgaggaggaagcatccgagtatgtgtaggaggaggacaaggtgggaccatagactttgccaaaagctgcaggtggatcgggggaccctgggggctcaggatccagcaaggggcggcaggagtaaaggaggaaggaatgacaggtgcaaataccttcccaccaaagcccttgttgccctctggctcctccccagagttgtccccactctcagtcggtcacccactccttgaacttgagatcggtgtcagtggtgctaaagccatcatcagcaatgacatcatcaccccctcctcctcatggatgaccgtgtgctcctcgtcacttgctatgtcctcactggccatgtgctgggaatgagcagctcaggtgggcagcagcagggctgcccactggtcacctccctcaccaggggctgcaaagtggcctggagctccatactgagtagaaggctttgggccagagtatgatgcagtgccagacaccacctgtgtcagttcccgtagtgcctgacggtctatttccctgccgtccaggctgtgtaccccactgtgggagaaggcttgggccaggctaagccaggttccctgactgtgtgcagccattctgccccacagaagctgctccttggtatccgagctctgaagtgtttgggctgcaactgacaggagttcagaggacaccccaggggcagtggcagtgcccgtctctgatattctccgctcccacgagcccttgttacactcctgctagcccctggcttgtgggcttggcctctgagctggacttctttcggtccttgttgcaagtgggccaccttcacctggaaggccaggtcgtggtatttctgcgtctcattgggccccagggtgtaccaccgcttgctcagcatctggctgacggtccggttgtcctggttggggtgaccctggtgcgccctgccagggcctggtgccgcttgctgaagatcatgaccgccactcatgggccaccggatgtggtccttgtcccatttgttggggctgcatccatccttctcagaagatgagtcctgttccttgcgcagggcactgagggactgggcctgacatcatctgggtggtagaggcaactgggtgtcaggagacatgatggagaggaaagcatcatcatggtcattctctgtctcactgtccagcagggactcccctgaggggcccagggctcctcctccatggtgggaggtgagcttttaccaggttccaccacccccaaagtgtgtggggttgcgggccctgggctttcagggcaggtggctccagggggccacccagggtcagcactccctgtcccacctggtggacactcatgagcaacagctgctgacttggcaggttctttgctctggttggaggccactgagtgactggcaggttgctggacctcacatagctgcagggaggggtcaggaaggggacagagtaccaggagaacacagccacagagcaaggttccacgttcctccacacaaacatgctgacgccactggaggcctcgctggacgcagacatcaggggcctgtgggccaagtacatggtctgggcagggggttcctggcaggggctcacacctcctcagccccctcctcagccaaggcagcttggacccatggaagtggggatggaaggggagcatgaggccaggcctcaagtttttgtttttgtttttttttttttttgagatgcagtttggcaggctggagtgcagtggtgcgatctcagctcactgaaacctccacttcctgggttcaagcaattctccggcctcagcctcccatgtatatgcacctttactgctgaatattatatattttcttatgctttcatgtgattgattagcattctttttttttttctttttgagacagagcaagactcggtctc

SEQ ID NO: 637 - DNA, 3833 bp, Homo sapiens
acaatataataataatgtaacataaaattaccatgtcattggtgggacacacaatttactaaagtgtaaaaaccataacataactcttggaatctctatagaactacaaaatatagttgatgcttgaacaatgcaggcattaggagtggcaactccacaaagttgaaaatctgcatataactttagactctccaaaaacttaacttctaatagcctaccattgaccagaaactttactgataatgcagtagattatcacatattttgtatctgcattatatactgtatttttaaaataaaataatctagagaaaagtgagtattgacggggcgtggtggctcatgcctgtgatcctagcattttggagggctgaggtgggtggaacacctaaggtcgggaattcgagatcagcctggccaacatggcgaaatcccgtctctactaaaaatataaaagttagctgggtgtggtgtcaggcacctgtgatctcagctacttgtgaggctgaggcgggagagtcgcttgggcccagggaggtggaggtttcagtgggccgagatcacaccacttcactccagcctgagcaaaagagcgagactccgtctcaaaaaaaaaaaaaaaaaaaaaaaaaagtgaatgttaagagaatcataaggaaaagaaaatatatttactactcattaagtgaaagtggagcatcctaaagatcttcatcctcatcatttccagattgagtaggctaaggagggggaagaagaagagggcttggtcttgctgtctcagtggaggcagaggcataagaaaaacgtggataaatggatccatgcagttcaaacccctgttgttcaagggccagctgtatgcttaaacacatccctgggggttgtaaaactaatgttactgttgttttcattttgcaatttttccatcttgatataaaagcaaaagtaaagctaatctatgtacaatttattataggtcaactgagaatggcagaggactcatcccacctttgccacatggtgacttgccccactcccccaggtgaccttgctcgtgcatgtggatatttgctcagattaagaatgtttcccacaaaattgcttactctctttcattctgtccgtggttgcttgtggtttatttgttgataactgagactatttaaagattgccaaaacaaaagccatttcttttctccccgaatagcctcattttttctattccctttttcccctcctattaacatttctggggactctaaagcagagctcaagatggttcaggaccacggagagcgcaaggaaggggaactaccaaagcactttagtcatgcaggtggggaaagagatgatcctaaaattgtttttgtttttctgtttttttgagagggagtctcgctctgtcacccaggctggagtgcagtggcacgatcttggctcgcttcaacctccgcgtcccgggtccaggcgattctagcgcctcggcctcctgagtagctgggattgcaggtgtgcaccaccatgcccagctaattttttgtatttttggtagagactgggttttgccatgttggccaggctggtctccaattcctgacctccggtggtccacccccctcagtctcccaaagtgctgggattgcaggcgtgagccaccacgcccagccaatagtggaattgttgccggacaatatttatttaaaagacattattgtaaagagtaacagtgtaattctggctccttgaaatttgaggggaatgatttttctggacattcgaccagtgctttctaaatttctccactgaattctatctaatgacagatgagaggacactgaaagtaggagtagccataagtcaccagtgcaaaatgtcttttgaagtttgcatttattgattgctaccatttatgtaaagttttacagttttgacagtcatagggttcaccaatccaccatagaagagaattaagtcatgcggacacagcagggtttagaatggatgagtagaggagtgtgtgcaggctccagtccccaaagtctctaggactgtcctagaacctgcagctcatctgtcaattctgtcaactactcaggatcctctcaagaattatccccccatacccaccttttaaatttcctcaagctagtttcatttgagttttgtcacttgcaactgaatgagccctgctaatgcagatagattcaattgagaaggggaattctaggctaggagtacaaggttacaggcaaggagacaggaacatagcttgggatttcctggggcagtgagaaaactgactttaaaaaaatggaatggtttctaaaatgtttgtacaacttctctgtatggcaatggggtaggagtataaattctttcagcttcttctgagggcagctgaacaagaagtataaaaattttgaatgctgataacatttgacctagcaattccatctctagaaataaattctacagtagtaatcttaaaaacgtattcactgaaatgttattttctcatagaaaatgtcgaaacaacatatgtgtccatcaatagagaacttgctaaatgatttatactacctttacatattgaaatacgcatagccgtggaagataatttagtagatctatatgtcccattatggaacaatccccatggtggggggaaaagtaaggtgcagaactgtatcatagatgttctctctctctctcttttttttggaaagcacatgtatgcttttatatacacagaaaaattctagaatggcaaacaagatatctttgcaatagtttttttctgggaggggactcatttaaaaaaattctcccatattgcttgttttgttttgttaaagacatccatgtattcctacttgggttaagccatgataactaaatatgattaaagttcagaacaataaaaaccttagagatgtatacataaatatcacttgcttaggaatttctaggtaggtactattttaagccctctacatatattatttcattcaatccttggagcaactctaggagggaggtgttatcctctaattgcagatgaggttgatgaagcttaaagagtaatgatgccttgagtccatcctctggctccaaagcccttgtatttaactgttctcccttttgcatccctgtgctaaagtgactttgctataatatccacaaggaagaatttctgtgtaaaaattagacttccttgcaggcagtctatcagtgatatccaataaagactcaataatggctaacaatacaaaccacacacacaagaaaaacttctccttttgtgccaggtacttagattaggtgtagtggttttcttaaactgattatcaaggtaaacaccacctcatacatttcagcagagagcagtggtttctctctccagcagtgggagccattgaatcaggacaatgccacacagttgggctttcatgttagatagatcactcttgtggttttgggggatggcattataagagaggagactggagacaggggggctattgtcatgcagatttgttggatgtccacccagcattcactttttccatcttttgccaggggtacactacacaacatcaccagtcatttcatagaatggcaattagattaggcttaggtctgcactgccttccttcactccgctctgtcacttgccatcattgtaaatgctgacaacttagtgcctttcatgcttcaagtatcaataagataggaatagtaatagtatcacattgaattattgtggagttttgaacagatgatacttgtgttatcagtgctcaataaatattagctgtcctcttccttat

SEQ ID NO: 638 - DNA, 4012 bp, Homo sapiens
ctgaaccaaatgaagaggatctggaaggcaaagcactaagatcatagtgaagacctgcctcccccttctccttgtgtcccaccagcctccctgctggcctgaccaggccccatactccagtctccccagagaccccaagctgaagattctgtgggtctgccccattgctgggcacagcagagcctggatggaggcttgttgtcttctgcagttgccccaaaggttgctcttgctgggggcagccgccctgactgcaactgctttggagacagccgacctggcggaactgtgcgggcagacgtggcagggggacgggctgctgctgcgctcgcacgccgcatcgcgcaggttctacttcgtggctccggacaccgactgcgggctctgggtgcaggcggcagcccccggcgaccggatccgcttccagttccgcttcttcctggtctacagcctgacccccgcgcccccggcgctcaacacctcctccccggccccggccgacccgtgcgcccccggctcctacctgcggttctacgagggcccgccgggggcgccccggcccctggggtccccactgtgcggcctgaacatcccggtgcctgtggcatcctccggaccctttctaggcctgcgcctggtcacgagaggccgccagccccgcgtggacttcgtgggcgaagtcacctctttccgtctgggaccttgtggtgcctacttccgctgccagaatggcaggtgcatcccctcaagcctcgtgtgtgacccctggggcatggacaactgtggcgatggcagtgaccagggctcctggtcaccagctgactgcagaggtccctctccggtgcccagccagacaggaagtacagatgcccatacctccagatccctgactccctccccagctctcgggtctgcaggatccctctggattgcagctgagaggagttccccagcaggcagggaccccacgagacaagacgcagctttggaaggctccactgagtgaagccctcatcaaagactcaggaggcccctggcggggatagcaccgtttattaagaaaaatcaagacaaagaccacaggagggtcccttctaggacacagaggccaggcgtcccaaccccacagtctgggggccactggcaggatggcacttgagctggatcttcaggctcctgcagatggggcagggtggtcatatccccctcctctctctctcagtcgtgagtcctgccttcccccacctaaggcactagctcttcctgagcaccagcggcatccgtccgtccgttgtctgttggaggagtccctgggccttcacttccagatgggtggggatgtggcctggggtgggcggggcccggtgggcggggccctatcagtgctgggctctgcctgtagcagctcctggtaagagttggggtgggccttcccttacagcccctgagggagggaccccaggctgtgtgctggcaggagggggtgggaatgcaggccaggaggacgtggtaggagggggagtctgccagaggaggtgccaggggctgggtggaggtgggtgggggtgctgaaaaacgagctggtggggatggggaccgcctgcccaggggtgagctgccttttgctccacagccggcactaaagacaattcccaatcctgagtgggtggcagagactcctgcgatgcccgtctcaggtagctgtggggcaccagcccacaagccgaggttggctctcctaggagtgagaactgcccaagggctgcagaaacaggccacccagctctatctgggggctccatcggtgggtagggggacagtgggggcagttctgggcccacccagccactgttcctgaccccaagtcctggtgactttctgaggtgcccactcccatccaacctgccttgctggccagccttgtggctttgcccagctgtgtgtgtgagggtggcatgcccacctccagtccagcccagggcggtagcagcaaagcgtggcatcgcctcggtttcttacaaaaattcataataatattaataataatatactcgacattgtcgggctggggcgtggcccgggagtccgtgtggggcaggcaggtgcctacgaggggcaggggcgtgtgttggccccggcctgggcgcggtgctgcaggtccaggggctgtgggggcggggcgccgggtcgggccgagtgcagcaccaggttcttgacacagcctgtgatgcccgaggagaatctgcccccggtcagcgtggccacgtcaggggctccgcctgccgggaggtgagaggacagggcctgtgggctccagcagcccaggaggcgaggaaggctgggcgagctctagccctaagggagtgccgttcctgcccctgccctgagaaggagccccagacttaccgatgtagacgctgcccttggcgttgactgccacgttgggacctggggaccggccgctgaccagctcctcaccgtcgacttggatggaacctctgcggccctccctgcagtggaactgggtcaggcccctttccacaaacttcctggtcctccccggccccacgacagagtcccctccctctgatatcgagactccagactcagaagtctgtccctgtttcccaagctctttctttcccccgctgaacgagagatcgggccccacaaacacagcttcctcatttctgcacccaggtttcctcccactcctggggcactcgcctgcccccagcggagttcagtccgagatggaagcccgagccctggctggtgggttctcccctcccctggcttcaagttctgtctccacagagctcaatacctgcctctctgcccatggtagggggcgtcctgccccactccagaacgctgggccccatcccgagtgcccggcagggtcccttaccgcagtgctgtcacccggtgccactcgccgtcattgatggggtcctcagagaccaggcgggcctccccactacccagctggtacctgcagtcatccaggcccaagaagtatgagctggggcaggaccggggggtggggtgctgggaccagggaagggagaggaagggccaggtgccaggacctacctgaagacaaggtgcccgtcttgaagcccgaggctgatgaagtccttgccttggccggcctctcccacctcctgccagggaagcacagggtctctggggtccccagcctggagagcagaggctgccgaggccagggggctctgctttcccctccccccaccactccggccaccaggaagccagcttcctgccccaggagccccaagagcccagccggatacccacactcaccacaccctgccagagcaggaggccactggctgtgctggtccgaacctccggctcgatggtctcgggcacctcgggcaggctgcggaggaagagcgggtgaggggacagaagtcccagattcccatcctccccattaggcccatgggcccttccaatgccagtctcaccccctggagaagacatggccagggaaggcgaggaagccatcatcgtggaaataggctccgtactgcccaggggcatctgtgggagagaggagggtggtgccatacctgctgcatcaggcatcaaaatcccccgtcagttcccctgacccccacctccacgccaacatgcaggactagggggctccgagtctgcagtccctggggacccacgggggctgccaacagaattcagggagcctatgaccttggatgggaaagcattacacctcaatttcactcacttctcactgaaattgagcagttctttcaatgagatgtaggcaagaaaccaaagtagcagtggtaggacctgcaactttgttactagtatttgcttatcacatgacagtagctgcaaatatttcaaaatatcatttacacatattgctgctttgaaattgtggtagctactgagatcaccagatcttgttatttgatgtgttaataaagaagcacatatatagcaagtcaggaaactt

SEQ ID NO: 639 - DNA, 4463 bp, Homo sapiens
atggcttcctctacctggcgctctacgcgcaggtgtcccagtccaaaccgtgcgagaggaccggctcctgcttctcgggccgctgtgtcaactccacctgcctctgcgacccgggctgggtgggggaccagtgccagcactgccagggcaggttcaagttaacagaaccttctggatatttaacagatggcccaattaactataaatataaaactaaatgtacttggctcattgaaggctatccaaatgcagtgttaagattaagattcaatcattttgctacagaatgtagctgggatcatatgtatgtttatgatggagattcaatatatgcacctttaatagctgtacttagtggtttgatagtccctgaaataaggggcaatgaaactgtgcctgaagttgttactacatctggctatgcactgttacatttttttagtgatgctgcgtataatctaactggtttcaacattttctattcaatcaattcttgtcctaacaattgctctggtcatgggaagtgtacaactagtgtctctgttccaagtcaagtatattgtgaatgtgataaatactggaagggtgaagcttgtgatattccttactgtaaagccaattgcggcagtccagatcacggttactgtgacctgactggagaaaaattatgtgtctgcaatgatagttggcaaggtcctgattgttctttgaatgttccctctactgagtcttactggattctgccaaacgttaaacccttcagtccttctgtaggtcgggcttcacataaagcagttttacacgggaaatttatgtgggtgattggtggatatacttttaactacagttcttttcaaatggtcctaaattacaatttagaaagcagtatatggaatgtaggaactccatcaaggggacctctccagagatatggacactctcttgctttatatcaggaaaacatctttatgtatggaggcagaattgaaacaaatgatggcaatgtcacagatgaattatgggtttttaacatacatagtcagtcatggagtacaaaaactcctactgttcttggacatggtcagcagtatgctgtggagggacattcagcacatattatggagttggatagtagagatgttgtcatgatcataatatttggatattctgcaatatatggttatacaagcagcatacaggaataccatatctcatcaaacacttggcttgttccagaaactaaaggagctattgtacaaggtggatatggccatactagtgtgtatgatgaaataacaaagtccatttatgttcatggagggtataaagcattgccagggaacaaatatggattggttgatgatctttataaatatgaagttaacactaagacttggactattttgaaagaaagtgggtttgccagataccttcattcagctgttcttatcaatggagctatgcttatttttggaggaaatacccataatgacacttccttgagtaacggtgcaaaatgtttttctgccgatttcctggcatatgacatagcttgtgatgaatggaaaatactaccaaaaccaaatcttcatagagatgtcaacagatttggacactctgcagtagtcattaacgggtccatgtatatatttgggggattttctagtgtactccttaatgatatccttgtatacaagcctccaaattgcaaggctttcagagatgaagaactttgtaaaaatgctggtccagggataaaatgtgtttggaataaaaatcactgtgaatcttgggaatctgggaatactaataatattcttagagcaaagtgccctcctaaaacagctgcttctgatgacagatgttacagatatgcagattgtgccagctgtactgccaatacaaatgggtgccaatggtgtgatgacaagaaatgcatttcggcaaatagtaactgcagtatgtctgtcaagaactacaccaaatgtcatgtgagaaatgagcagatttgtaacaaacttaccagctgtaaaagctgttcactaaacttgaattgccagtgggatcagagacagcaagaatgccaggctttaccagctcatctttgtggagaaggatggagtcatattggggatgcttgtcttagagtcaattccagtagagaaaactatgacaatgcaaaactttattgctataatcttagtggaaatcttgcttcattaacaacctcaaaagaagtagaatttgttctggatgaaatacagaagtatacacaacagaaagtatcaccttgggtaggcttgcgcaagatcaatatatcctattggggatgggaagacatgtctccttttacaaacacaacactacagtggcttcctggcgaacccaatgattctgggttttgtgcatatctggaaagggctgcagtggcaggcttaaaagctaatccttgtacatctatggcaaatggccttgtctgtgaaaaacctgttgttagtccaaatcaaaatgcgaggccgtgcaaaaagccatgctctctgaggacatcatgttccaactgtacaagcaatggcatggagtgtatgtggtgcagcagtacgaaacgatgtgttgactctaatgcctatatcatctcttttccatatggacaatgtctagagtggcaaactgccacctgctcccctcaaaattgttctggattgagaacctgtggacagtgtttggaacagcctggatgtggctggtgcaatgatcctagtaatacaggaagaggacattgcattgaaggttcttcacggggaccaatgaagcttattggaatgcaccacaatgagatggttcttgacaccaatctttgccccaaagaaaagaactatgagtggtcctttatccagtgtccagcttgccagtgtaatggacatagcacttgcatcaataataatgtgtgcgaacagtgtaaaaatctcaccacaggaaagcagtgtcaagattgtatgccaggttattatggagatccaaccaatggtggacagtgcacagcttgtacatgcagtggccatgcaaatatctgtcatctgcacacaggaaaatgtttctgcacaactaaaggaataaaaggtgaccaatgccaattatgtgactctgaaaatcgctatgttggtaatccacttagaggaacatgttattacagccttttgattgattatcaatttaccttcagcttattacaggaagatgatcgccaccatactgccataaactttatagcaaacccagaacagtcgaacaaaaatctggatatatcaattaatgcatcaaacaactttaatctcaacattacgtggtctgtcggttcaacagctggaacaatatctggggaagagacttctatagtttccaagaataatataaaggaatacagagatagtttttcctatgaaaaatttaactttagaagcaatcctaacattacgttctatgtgtacgtcagcaacttttcctggcctattaaaatacagattgcattctcacaacacaatacaatcatggaccttgtgcagttttttgtcaccttcttcagttgtttcctatccttattgctggtggctgctgtggtatggaagatcaaacaaacttgttgggcttctcgacggagagagcaacttcttcgagaacgacagcagatggccagccgtccctttgcttctgttgatgtagctctggaagtgggagctgaacaaacagagtttctgcgagggccattagagggggcacccaagccaattgccattgaaccatgtgctgggaacagagctgctgttctgactgtgtttctttgtctaccacgaggatcatcaggtgcccctccccctgggcagtcaggccttgcaattgccagtgccctaatagatatttcacaacagaaagcttcagatagtaaagataagacttctggagtccggaatcgaaaacacctttcaacacgtcaaggaacttgtgtctgagaaatggaaaccgctcctgtatattctgtactgttttacttcgggcttctgttaaagctgttctatggccttggattttatggaggcagatctctgtatcatccagagcctgagtacagtttccttccaaatggacaatgacccaggtggccaaagaatgttcatgagttttataaaagtattgatggtcacaggtgataaagtcagtttttaccactatcttaggcttattatagctaacattaaattactctggaaaaagatgtatattgtttcttaatgaagatgaaaaatatgtaattcatataaatcaactgtttatatcccaagactttaaaggaatgagctaagtttgtaaatatctcctaaaaacaatcaagtaattttattagcttcttttggaccctctaaatattgacttctctcatgaaaaaataaattgatgaaactaatgattac

SEQ ID NO: 640 - DNA, 3904 bp, Homo sapiens
aattttctttctaacagtcaggcccttcttctgctggtctgctggagttttctgggggtccactccataccctgtttgcatgggtatcaccagcagaggctgcagaacagcaaagattgctgcctcctcctacttctggaagctgtgtcccagaggggcacctgccagatgctagccagagctctcctgtatgaagtgtctgtcgacccctgttgggagatgtctccccatcaggaggcatgggggtcagggacccacttgtggaagcagtctgtcccttagcggagctccagtgctgtgctaggagatctgctgctctcttcagagctggcaggtgggaatgtttaagtctgctgaagctgcgctcacagctgccccttcccccaggtgctctgtccccaggagatgggagttttatctataagcccctgactagggctactggctttctttcagagatgccctgcccagagaggaggaatctagagaggcagtctggcttcagtggctttgcagcgctgcagtgggctccactcagactgaacttcctggcagctttgtttacactgtgaggggaaaactgcctactcaagcctcagtaatggcagatacctctcccccaaccaagcttgagcatcccaggtctacttcagactgctgtgctggaagtaagaatttcaatccagtggatcttagctttctgggctccatgggggtgggatctactgatcaagaccacttggctccctggtttcagccccctttccaggggagtgaatggttctgtctctctggcattccagacaactctggggtacgaaaaaaactcctacagctagctcagtgtctgcccaaatggccactcagttttgtgcttgaaatccagggcccttgtggtgtaggcacccaagggatctccttgtctgtggattgcgaagaccatgggaaaagcgtagtatctggaccggagtgcacccccactcacggcatggtccctcatggcttcccttggctaggggagggagttccccaaccccttgcacttcccaggtgaggcaatgccccaccctgcttctgcttgccctccgtgggctgcacccactgtctaaccagtcccagtgagatgaaccgagtacctcagttggaaatgcagaaatcacccactttctgtgttggtcttgctgggagctgcagacagctgttcctattcggccatcttgcctgggaatctgtaattatattttattgcatattcttcctaggctgggtgtgtgtgtgtgaaagagagagagaaacagaaacagagacaaggagacagagacagtgaaacagaaacagagtcatcttccaggttctacttattaagcaatatcccatgaagtcgctgaaaagtgttatattctcctaatacctagtgtttgcaaatctggcagctgtcactgatgatttaaacaagattgggtgacttatttatgtacacacacatccacaatcaaacttcaacagtcgagtgtacccttttctaaataatcacgttgctaaaatgtgccacatggcccatttctttaaacaataaatggtaaattattattttggggagtgaaagctaaaagaaataatatgtctaatacgatgtggcattttctctatacagtacagttttagcattgaaaaggacctcagcaattccatttgccccgttttcagatgaggagattgaggctggtagttacagtggttttgcttcatgtcccatcccactggggctgctatgcaagctctcagtctagtcttctttcctctgcacttggtggccatcagctgtaacaagtcctgactagacaagggctttgttgttgactacaattcaatgccttttttgcctgcgtttgtttggaccctgctaatcaaggctacagggcagctgcagaaagacacctgctattggcttacctgctcctcgccttccctctgcttgggtctgagcatcagaaagccaccttccagtgggtctttgcctagcttttgtcttgtctttgctttttattcatctttgcttttgtcttctcagggcaaatagaaaatcctagacctcagatcactgttctttgcttcccaaaagacagaacagctcagtcctggctgccaccttctttctttactcttggtttaaatgtaatcccacatgccctagacaagcctcctgatgatttttcatcaaacatgaaaatagcttacttttaactgctgggtgtcagtctcttctaaaaattttgttcctaaggaattgattttgcaaatcagtgctaaagtcactttttaactgcctcacatactatcatttctttgacaattctttttaaaggggattgctcttttctccttctggtttctcaaatctacttttaacttcaaatagcaggcatgcaatgtagttttataagataatatactaggaccatctatcagatatgaaaccaagcataatcattgcaattatttctactgtattcagataatgataatacaaataagagtacgacatacgtaaatgttgattagctttctggttccttcatcaaaacttgcgttgtgttgtgcagccttttctttgcattgtccaggggttttgttattacaaaccataatatttaacccatttcttctactaatatcttttaatatttatgctattatatagctttttatttttgacatgtatctaaaccagaaaaaaatattccttgtacatgatatttttaggcaaaacataatgtctggagcaccaagtgaaataactgtggagaatggaatgttggacaatttgtgtggcatgcttagcttaatttgtttctatggcacaagcaaagctcattaattccatttattattttaagccacttgtttggtgttatggattttaagaatcagttggtgttagaatttttaataacacagagaaagccattgaatatggaactcaaattatctaaggtttacccagaagtcaaaatcacctggccctctgtaaatttctctttgtgttcctaggcccacaaagtctttggtctgaagactcagagcttaaattgcattggtcctgttaatctttgtcaaaaaggaagtttgggcggcagtttcagggtagtgttgagaagataactcctggtcccattttattctttcctcatttgttcagtgctcatggccatctacaaccttccttgattctattctgcctaagcctcttatttccacatctataagtatagtgctacataataattacaacctttaagaaaatggagagttttcattaaagggcccctgcaaatctatgatgctagatgacagattctaccagaaggccagagtattaatagcacccgtgataactgtaataagaatatgtctcgttttcttttaaagacatagatattccattttaatcctgtataactcgaagaaaatttgggtgttaacactttgaaatacctttacctcctttgggggaaatccaaactgaaaggaattaatatccacatcagttcctaaagcaaaatgcctgacacagactaacaaagctctttctcatcctgtggtaggaacttaggagtgataactcacattgagaacttgtgatctgaaagcactaaggaatttctgccattgcaggtaggaaaaaaaaaagacaaaaatggtattctcaggtgagcttacctttcaaatttttctgagacttcctaaatgtgacaagaactctgctgtgtggcaaccttatgtatccacaacagaactaaggaccggaaaaaaaaaaaaaaagatctctatcccaatagattttataaaatccatactctaaaactcctgagttttacatgtaccctaaaacttaaagtatagt

SEQ ID NO: 641 - DNA, 5196 bp, Homo sapiens
aaccaggattgcccccgacaggtcactcagctctatgtgccagcatccagacatgtgtggaggttccggcggatggggaggataggcccgctgcagtccaccctggacggtgagttctctaggacacagggttactgaggtatgaattacatgctgtcaaattcactcctttaatctacagatctgttatttttcataaacttatacagccatgtcactcccagcaggagctaccatgtagaaaagtttcatcacccacaaaattgcctctagctccattgcggccacctcttcagcagccacccatttctgttttgtcctgtcactttgccttttgcaaaaggcctccaaagggaaccatgctgtgtagtctgctcctggctccttttggtcagcacgctgcatttgagggtgctgtgtgggttgattgttccctctgttgctcagcagtattccagtgtggggatgcaccacagtttgtgaatccattcattggttgaaagacatttggttattttttctgtctctgggaatacgagtacagctgctataaacatctatgtacaggtttttctgtgaacatacattttgtttgacatggagtaagtttcactgggagtaagaatcctgagacatttggcaagtttatgtttaacttgatgagaagctgcagaactgtgttccagggtggctgcacggctttgcattcagaccagcaatgaatgagagcctctgttgttcccagtcctcatcagcacttacagttgtcatttaaaaaaaaaaattctatgggccgggcgtggtggctctcgcctgtagtccccagcactttgggaggccgaggtgggcggatcatcaggtcgggagttcaagaccagcctgaccaacatagtgaaaccccgtctctactaaaaatacaaaaaactggctgagcgtagtggcgggcgcctgtggtctcagctgcttgggaggctgaggcaggagaatcgcttgaacccaggaggtggaggttgcagtgaaccaagatcacgccactgcactccagcctgggtgacagtataagactgtctaaaaaaaaaaaatttggccattgtaaaaggtgggaaatggtatcttcttgtggttttaatttgtgtctaccagccgactaatgatattcagcatctttttcatgaatttgtttttttgttgtgttttcttggttgttttttgtttttttggagacagggtctcactgtgtgctcaggctggagtgcagaggcgcagtcacggctcactgcagccttgacttcctgggcttcagcgatcttcctgccgtagcttccaaagtagttgtgaccacaggcgtgtgccaccacgcctggccagttttttaatttttttgtagagatggaatctccatgtgttgcccaggctggcctttaactcctgggctcaagggatcttcccaccttggcctcccaaagtgctacgattacaggtgtgagccactgcacactgcctgtgaacatgttttttagttattgaattttgagagttataaagctattctggatatagtttatcagatatgtgatttgcaaatattttgtcccaatctgtggcttgtctttttcttttcttagcagtgtctttcaaggaggagaagttttaaattttgatagaatcccatttaccatttttttctttaatgaaattgtgcttttgatatgatgtctaagataccttcacctaacactttactttttttttttctttctttcttttttgaggcagggtctcggtgtgtcaccaggctggagtgcagtggtgcaatcacagctcactgcagccttgaactctgcagtctcaggcagttctcccacctcggcctcctgagtagctgggactataggcgcgtgccaccatgcccagctaatttttaaaaaaattttcttcgtagaggcagggtctctctgtgatgctcagtttctcaaactcctgagctcaagggatgctctcgcctcagcctgggattacaggcataagctgccatccccagctccttgaaatgagttttaagaggccaagttacgatttattgttggaaaggaatgggatatgtgtttattcatgaaatactgcctggggcctactgtgtatacagccttctcccaggcaccatctcatgcacacacgcctggtctgggaggaactttgttgccatagtaggagggaaagggcacgaaggtggtcgggggtggccagggcaccgcccactgctggatctggctgcattcgggcctcaccgccagtgctagggctagctgtgcacttgagacgtgctagacagctggagtggaagtgtagtccttgattaggacatctttaatattcgatcaagttatgtgttcggggagctgctgtgctgatcctgcactgtgcatggctcatgggtctgcctgaggcggggatgtgttcatggaactggatttagataaatgagttaatcaggatgatttcaagaatcttcaccttaagaattgtcagtgggaatgcaggggaaagtacaagtgaactaattaaggttttaaaatgtgttttagtgggtttggagtccccgccgctgtctgtgtctgaggaaagacagcttgctgtcctgacagagttgccttttgtggttccatttgaggaacgagtaaagatctttcagaggttgatttatgcagataagcaagaagttcaaggagatggtccatttctggatggaattaatgtcacaataagaagaaattacatttatgaagatgcttatgacaaactttctccagaaaatgagcctgatttgaaaaagcggatccgtgtgcacttgctcaatgcccatggcctggatgaagctggcattgatggtggtggtattttcagagagtttttaaatgaactactgaagtcaggatttaaccccaaccaggggttctttaagactactaatgaagggcttctgtaccccaacccggctgctcagatgcttgtgggagattcttttgccagacattactacttcctaggcagaatgcttggaaaggctctctatgagaacatgctggtggagctgccctttgcaggcttctttctttccaagttgcttggaaccagtgccgacgtggacattcaccacctcgcctccctagaccctgaggtgtataagaatttgctctttctgaagagctacgaagacgatgtggaggagcttgggctgaacttcactgtggtgaacaatgacctgggagaggcgcaggtagttgaactaaaattcggtgggaaagacatccctgtcaccagcgccaaccggattgcgtacatccacttggtggcagactacaggctgaacaggcagatccgccagcactgcctggctttccgccagggccttgccaatgtcgtcagcctcgagtggctccgaatgtttgatcagcaagaaattcaggtattaatttctggtgcacaagttcccataagcctagaggacctaaaatcctttacaaactattcaggaggctattctgcagaccatcctgttattaaggtcttctggagagttgtggaagggttcactgatgaagaaaagcgcaaactgctgaagtttgtaacaagctgctctcgaccccctctcttggggtttaaggagttgtatcccgcattttgtattcacaacggaggctccgaccttgagcggctccccacagccagcacctgcatgaacctgctgaagctccccgagttctatgacgagacacttttgcgaagtaaacttctctatgcgattgaatgtgccgctggctttgagctgagctgaagctgatgctggggtcagacccctacagagaaccagtgcttccttcgtcagcagcgcctccccagacccacgaggatactcacactgcacgcctgaggctctcctaagctccttctttcattctgccattcctccctcccttccttttttaaatgatttttattacggtgtggtcacttatttagatggacattgcttttcaaataacttaaaataacacgttatgtgccatgtggctactttagtaatattgccaagaagagcacagtttttacactagtggcatctcagtgaaattaaccaaagatgaagctttggctttgctggtgagatcagagccctcctgagcaggcagcgccactccagggttcagacagggctgcacaggcggcagagatacagggtctgagggctgagacgccatggggccgctgctgcttatgtggttggattgtttacaagcctcattattaaaactgaaggcattttttttttctgctgcctttcccaaagtggttaggtttggaaaagagatgatgatggtaatattttatttgtgctttttaagccatttccccaaatgggactagcatgcttgttttcagtataccgtggcctgcctcatgatggtttggagatactgtctgtggatgtgaggtggggacttcattcattgtcctatttctatctccactttgtgcctggagagctttcaggggaggtggaggaggagggtctgccaagctactgcaacatctgtcacccactatacccagttacttgggggaggacagacactgtggtgtcattaaagttgtttgaaccaaagtggcggctgcatctttgtcccgatgctagccgtgccggtctcccatcatccgctcgccctcctttcccctgggctgcgcccacttgtcttcctggatatttgggggtgactcgccatgcttggcaccctctgcttcctggtgctgctctgactcgaagacgggacagtccctggtgcacatccagggaagaggagcgtcggtagttcttgcagtaggcactttatcaggacctgacctgttgctgggtgattttagtctctacaaacagaaagcgtttcaaagcgtcagctgtgggagcagagtgaccctttgctgatgctggggggaggggatctaaatcctcatttatctcttctatgtctagtattttactgtcactggaggctctgtgggctgtcatagttaattgaccataattagcaatatacttttaaagtgggaaagctgaatgacacttttaagacaatgaacattatcaaaacaaaatgtataatttcttaatttgaataataaattaagcgtttaaatgct

SEQ ID NO: 642 - DNA, 4171 bp, Homo sapiens
tttcaggccatgcagtctctgttgcagctactcaactctgcctaaaatgaaaacagtcatagacaataattgaaagaaagagcatcatggctgtgtttcaataaaactctagtttgcaaaaacaggcatctttctggatttggcctgcaggctgtagtttgccaatccctggattaaggcctggtttccaaacactgatcactgaacagaactggtcagtaacttttaacaattcatagggaaataagaaagttagaagcaaggtagtgagttttatataaaactaaatttattctctttaattggtcatcctgactttcagtattctttgctggtcttttgctgcaaaatacctttttctttatgaaacgaaagtatagtaggcagcagttttcaggtttgcctttgcttattaatagctctactgacaactcagtccgcagatttccttttggaaatgttataagcctaggaaatttaagcacctgggaaccaccagcgcaggaggatacaaagtgtgaactacagcctctcactctcatgttctgtctctcttcttccctacctcccgggcctgctgacagcggtggttggggctgggattgggggctctgctgtggcccattttctccagcagcactttggacctcgggtgcagatcgacgtgtactagaagggaaccgtgggtggccgcttggccaccatctcagtcaacaagcagcactatgagagcggggctgcctccttccactccctgagcctgcacatgcaggacttcgtcaagctgctgggtgagtggtcagtcctggggctccagtgcccagcgccctggggctggtgacagcactgggcccttctcagacttcccagaccatcaaggccagaaggtcatgtggcccaatctcattttacagatggagcaacagaaacaagagaggggaaggaacttgcctgaggttacacagtgagttagttgcagagccgggattagaactcaggtttgactcctaggccagtttctttccctttcaatttgctgcctctaaataatcgtgattatatcaccttccacatgctggtgcttgccaggcaccttctgggtggtatgtaggcattacctcagctcccctctaccaacctgcaagatgagtgttatatctcctcttaaggcaactgaggctcagaaaatgtatagatttaagctaaagccattacagcgagaggtgggattcaaacccagcagcatctgtccaatacacgttctgtttgatgcagaaactctgcttctcagaagtgatgctacaggtggtcttacagatgtgcaaagtagcatagataccaagttattcactacagcattgtttgtaatagcaaaaggctgaaagtatcctagctgcctatccactaggacctggggttaaacaaattattgtataactacacaataggctgttcagcagtcagaatggggaagtctttatgcccagatacagggcaatctccaagatacagtgtattgttaaagtggagagcagtgtgtgtagtatgtgggggtggggaaggaacaagtcatagcagctctgtctgtgtttaggagtccactgctctgtcaagttgcagagtgcaggatggctgtaaggagctaggataacttccaagtgatctcagtgcccaaggccaccatctccaaacaagcccagtggctgtcaccccctggacattctgggataaaatctgaatttccctcacttgtggatcctcctggggaaaaaaaatgtaaaatgttacattattttcattttcatttttttattgacttggtagtccaaacattttcccagtgcatctgtttactgtttattaacaagcagcacaaatgaacaaaccatagcatttgtgtttcctttaatggaccagtccatttgcatcaagagggccccaagtcttggaggggacctgaggggctcctctttgtctctgcagggctgaggcaccggcgcgaggtggtgggcaggagcgccatcttcggcggggagcacttcatgctggaggagactgactggtacctgctgaacctcttccgcctctggtggcactatggcatcagcttcctgaggctgcagatgtgggtggaggaggtcatggagaagttcatgaggatctataagtaccaggcccacggctatgccttctcgggtgtggaggagctgctctactcactgggggagtccacctttgttaacatgacccagcactctgtggctgagtccctgctgcaggtgggcgtcacgcagcgctttattgatgatgtcgtttctgctgtcctgcgggccagctatggccagtcagcagcgatgcccgcctttgcaggagccatgtcactagccggggcccaaggcagcctgtggtctgtggaaggaggcaataagctggtttgttccggtttgctgaagctcaccaaggccaatgtgatccatgccacagtgacctctgtgaccctgcacagcacagaggggaaagccctgtaccaggtggcgtatgagaatgaggtaggcaacagctctgacttctatgacatcgtggtcatcgccacccccctgcacctggacaacagcagcagcaacttaacctttgcaggcttccacccgcccattgatgacgtgcagggctctttccagcccaccgtcgtctccttggtccacggctacctcaactcgtcctacttcggtttcccagaccctaagcttttcccctttgccaacatccttaccacagatttccccagcttcttctgcactctggacaacatctgccctgtcaacatctctgccagcttccggcgaaagcagccccaggaggcagctgtttggcgagtccagtcccccaagcccctctttcggacccagctaaagaccctgttccgttcctattactcagtgcagacagctgagtggcaggcccatcccctctatggctcccgccccacgctcccgaggtttgtactccatgaccagctcttctacctcaatgccctggagtgggcggccagctccgtggaggtgatggccgtggctgccaagaatgtggccttgctggcttacaaccgctggtaccaggacctagacaagattgatcaaaaagatttgatgcacaaggtcaagactgaactgtgagggctctagggagagcctgggaactttcatcccccactgaagatggatcatcccacagcagcccaggactgaataagccatgctcgcccaccaggcttctttctgacccctcatgtatcaagcatctccaggtgacctactgtctgcctatattaagggtccacacggcggctgctgcttttttttaagggggaaagtaagaaaagagaaggaaatccaagccagtatatttgttttatttattttttttaagaagaaaaaagttcatcttcacaaggtgcttcagacttggtttcttagctagaaaccagaagactacgggagggaatataaggcagagaactatgagtcttattttattactgtttttcactacctactcccacaatggacaatcaattgaggcaacctacaagaaaacatttacaaccagatggttacaaataaagtagaagggaagatcagaaaacctaagaaatgatcatagctcctggttactgtggacttgatagatttgaggtacctagttcagaactccctagtcaccatctccaagcctgtcaacatcactgcatattggaggagatgactgtggtaggacccaaggaagagatgtgtgcctgaatagtcgtcaccatatctccaagcttcctggcaaccagtgggaaaagaaacatgcgaggctgtaggaagagggaagctcttccttggcacctagaggaattagccattctcttccttatgcaaagattgaggaatgcaacaatataaagaagagaagtccccagatggtagagagcagtcatatcttacccctagatgttcatcccagcagaagaaagaagaaggtgttggggtaggattcttcagaggttagcctggtactttctcatcagacactagcttgaagtaagaggagaattatgcttttctttgctttttctacaaacccttaaaaatcacttgttttaaaaagaaagtaaaagcccttttcattc

SEQ ID NO: 643 - DNA, 3975 bp, Homo sapiens
agaactctgcgctactgcccacgcatctcacaaagtctactacgccgcgcgttctcggtttcaacgcacctccaggattcagggcttcctaagctgcaattcagcagggctcccttgcttgttctcactctgtgcccccggcaacgaccccgcgcgcctacactcccgtgccgcctcagctactagtccgcaacttctagccccaaaacgctggagctcagaagccagctcaggcaagactaactcggtgttgctcctcccggcgctgacttcgaggcccggctatggacggcgagagcgaggtggatttttctagcaacagcataacccctttgtggcggaggcggtcgattcctcagccccaccagcttctgggccggagcaagccgaggccccagtcctaccagagccccaacgggttactaattacggatttcccggtggaggacggagggacgctctccgcagcgcagattcccgcccaggtgcccaccgcctcggacagcaggacggtacataggagccccctgcttctgggcgcccagcggagagcggtggccaatggtgggacggcatccccggagtacagggctgcctctcctcgacttcgacggcccaagtcacccaagctccccaaagcggtgcctggcggctccccgaaatccccagcaaatggcgcggtgaccttgcctgcgccgccgccgccgccggttctgcgccccccgcggactcctaacgcgcccgccccctgcacccccgaggaggaccttactgggttgactgccagcccggtgccttcgcccactgcaaatggccttgccgctaataacgactctcctgggtcaggttcgcagtccggccggaaggcaaaggaccccgaacgggggctctttcctgggccccagaaaagttcttcggaacaaaaactccccctccaaaggctgccctcccaggagaacgagctcctcgagaatccttccgtggttttgagtacaaacagccccgccgccctcaaagtggggaagcagcagatcattccgaagagtctggcctcggaaattaaaataagtaaatccaacaatcaaaatgtggagccccacaagagactcctcaaggtgcgcagcatggtggagggcctaggaggacccctgggtcacgcaggggaggagagtgaggtcgataacgacgtggatagcccagggtctctgcggagaggcttgcggtccacgtcttatcgcagggcagtggtcagtggctttgattttgacagtcctaccagctcgaagaagaagaacagaatgtcccagcctgttctgaaagtggtgatggaagacaaggagaagttttccagtctgggaaggataaaaaaaaaaatgctgaaaggacaaggaacatttgatggggaagaaaatgctgtcctgtatcaaaactacaaggaaaaggcccttgacattgattctgatgaagagtcagagcccaaagaacagaagtcagatgaaaaaattgtgattcaccataagccattgagatccacatggagccaactctctgcggtgaaaagaaagggattatctcagacagtaagccaggaggaaagaaagagacaagaggctatctttgaagtcatatcctctgaacattcatatttactcagcttggagatcatgatacgaatgtttaaaaattctaaagaactgagtgatacaatgactaaaaccgagaggcaccatcttttctccaatattacagatgtctgtgaggcaagcaaaaagttctttatagagttggaagcaagacatcagaataatatcttcatagatgacataagtgacattgtggaaaaacacacagcatccacatttgacccatatgtgaaatactgcacaaatgaagtctaccaacaacgaacactacaaaaattgttagctaccaatccatcctttaaggaagtattgtcaaggattgagtcccatgaagactgtaggaacttacccatgatctcttttctcattctccccatgcagagggtgacccgccttcccctgctgatggatactatctgtcaaaaaacacctaaggactctccgaagtatgaagtctgcaaaagagccttgaaggaagttagcaagttggttcgactatgcaatgagggcgcccggaagatggaaaggactgagatgatgtacacaattaactcccagctggaatttaaaattaagccttttcctttagtctcctcttcccggtggttggtaaaaagaggtgaattgacagcctatgttgaagacactgtgcttttctcaagaaggacatccaaacagcaagtctacttctttctctttaacgatgtgctcattatcaccaagaagaagagtgaagaaagttacaacgtcaatgattattccttaagagatcagctattggtggaatcttgtgacaatgaagagcttaattcttctccagggaagaacagctccacaatgctctattcaagacagagctctgccagtcacctctttactctgacagtccttagtaaccacgcgaatgagaaagtggagatgctactaggagctgagacgcagagcgagcgagcccgctcgataactgccctgggacacagcagcgggaagccgcctgcagaccgaacctcactgacccaggtggaaatcgttaggtcatttactgctaagcagccagatgaactctccctgcaggtggctgacgtcgtcctcatctatcaacgtgtcagcgatggctggtatgagggggaacgactacgagatggagaaagaggctggtttcctatggaatgtgccaaggagataacatgtcaagctacaattgataagaatgtggagagaatgggacgcttgctaggactggagaccaacgtgtagtctctcagatggtcttttgttactgcaagatttgcacgacacttaccgggctggttggttctgggctagttttattgttaattttgtcacagcctatttaattaaaagaacgaaaacacttgcctttaagcttgccaggttgttccgctctctcatgagaagagcttggatacagtgagtttgcacagctcagtttttacctaaccacacacttgcagacctcctgaggtacacagaatagctgagcagttcacttcagggatcaggtcatctctgctcctcctagtttcaccatgttctggcaataaaaaacacatattatatcctggttttctctatccttgcattactaaggtgactgtctctctttatacatccttgtatggttctcccagtattagcaagattgtatatctgtaaagaatgtccagttttgtaaatatttccctgcctttttttttctttttttacatctgattttaatgcttcgttaacttcaaaaggaactggtagagttcagaaggtgagctgttgtttttctaaacctcttcccaggaaggggacattgacacttgaatttttgtcacctttttcctcattagaaggaaagtagaaagccttactgtaggatttttaaaaaaaaatccatctcaccccatattggtcttaaataagtatagactaattaacctaagctacctttaacaacgtagaatttagatgggttcatatatgtgagaaaaacctgaatataggacaggggtcctacttttttccccacctctgtcgcccaggctagagtatagtggtgtgatcttggcccactgcaacctctgcttcctaggttcaagtgattctcctgcctcagcctcccaagtagctgggattgtaagagtatgccaccacgcccagctactttttgtatttttagtagagacagggtttcatcatgttggccaggatggtctcttaactcctgccctcaagtgatccaccagagaggagatcctcggcctccccaagtgctgggattataggcatgagccaccgtgcccagcctactttctaattaatt

SEQ ID NO: 644 - DNA, 4071 bp, Homo sapiens
aataacctcctatgccttgtccaacaccacccctgcatagtcacacaaatccacacctcttgcctcctgccctcacatgtcccccaacctcagggtcacagatgtctgggagctcccccccagtacactcacatgtggctgtacacacacagtcatatgcagccaactatagagcacaccctcctccacacacttgtacttgcacatccacacacacacatgaagaagcacgtgcattcccactaccaggtctgtacgggcaacatgtgtcttacacatatgtgtgcatccctaaaggagtcccttgtgctctgggttggtcattgtggtcaaagccagctgtctggcacccagcagccctcatttcagggaaagccctgtcccatatcctgctcttaacttgcctcttcggtctgtaccagcctggaactcttgggttctcttgtgtcctaggagagcctgaggactggggctgtaagtagtgaagtttgattctggcagtaccagttaagaggagcaggggaggtaggagtctgtctccctctacccttgaacagaagctggcaaaatctgtggtggccccatcctgcggagcaggccgtccacggctgatagtgcagagagctcaggccgaagctggtggctgcagtccctggaatggatgccactggacctcagctgagtctatctcagcgggtgctgggggcaggggagggaaggagcagtgggagtagagactcgtccctggcattcctcccttgccttgtgcccctatcaggttcccacccctccctgggccccaagcagctgtccttgggcctgccttcatctcctgcttgctgctgtcaccctcactagggccacactttccccaggggcctgagaaatctcagctcctggtcccttccacctaataccaccttgtcttagcccttgtggtgtcatgctgggctggctggggctcgaggcatccatgatgggtggcacctccatgccttcccaggcccaggagctgggaggggcagcaatggccctgatctggctctctctattttcagggctcagcggagtcctacaccagccgtccatcagactctgatgtatctctggaggaggaccgggaagccttaaggaaggaagcagagcgccaggcattagcgcagctcgagaaggccaagaccaagccagtggcatttgctgcgcggacaaatgttggctacaatccgtctccaggggatgaggtgcctgtgcagggagtggccatcaccttcgagcccaaagacttcctgcacatcaaggagaaatacaataatgactggtggatcgggcggctggtgaaggagggctgtgaggttggcttcattcccagccccgtcaaactggacagccttcgcctgctgcaggaacagaagctgcgccagaaccgcctcggctccagcaaatcaggcgataactccagttccagtctgggagatgtggtgactggcacccgccgccccacaccccctgccagtgccaaacagaagcagaagtcgacagagcatgtgcccccctatgacgtggtgccttccatgaggcccatcatcctggtgggaccgtcgctcaagggctacgaggttacagacatgatgcagaaagctttatttgacttcttgaagcatcggtttgatggcaggatctccatcactcgtgtgacggcagatatttccctggctaagcgctcagttctcaacaaccccagcaaacacatcatcattgagcgctccaacacacgctccagcctggttgaggtgcagagtgaaatcgagcgaatcttcgagctggcccggacccttcagttggtcgctctggatgctgacaccatcaatcacccagcccagctgtccaagacctcgctggcccccatcattgtttacatcaagatcacctctcccaaggtacttcaaaggctcatcaagtcccgaggaaagtctcagtccaaacacctcaatgtccaaatagcggcctcggaaaagctggcacagtgcccccctgaaatgcttgacatcatcctggatgagaaccaattggaggatgcctgcgagcatctggcggagtacttggaagcctattggaaggccacacacccgcccagcagcacgccacccaatccgctgctgaaccgcaccatggctaccgcagccctggctgccagccctgcccctgtctccaacctccagggaccctaccttgcttccggggaccagccactggaacgggccaccggggagcacgccagcatgcacgagtacccaggggagctgggccagcccccaggcctttaccccagcagccacccaccaggccgggcaggcacgctacgggcactgtcccgccaagacacttttgatgccgacacccccggcagccgaaactctgcctacacggagctgggagactcatgtgtggacatggagactgacccctcagaggggccagggcttggagaccctgcagggggcggcacgcccccagcccgacagggatcctgggaggacgaggaagaagactatgaggaagagctgaccgacaaccggaaccggggccggaataaggcccgctactgcgctgagggtgggggtccagttttggggcgcaacaagaatgagctggagggctggggacgaggcgtctacattcgctgagaggcaggggccacacggcgggaggaagggctctgagcccaggggaggggagggagcgaggggctcacacctgacatgtattcgcctccagggggcgctgtctccctcctttcagatgcctttgctcaaagcttggggtttctttggtgttaccatcccagctcccgggaggcccttaagccccagctgtcggtttttacctgcctgttgtggatggatgggggatacccacctttctgaagtgtcccctttctcccatcttaaggggctctcctccctcaccctcctagagaaaaggtgcacttccttaactctttctactcggggccctaagtgacggtcctaagtgggatggctctccttctcccaagctgcagtactggggaagggctgggcgcttttcctggaaagggaggccacagattctttcccatgggggctctcttccccagaccccagatccaaggtccctcaccctgcctgccccttcctcccagcttcctggcagcatcgtctggtcggtgaaagccatagcatggacaccccatggggagcttgtcttggggagggttctgggtggaagctggcaggcatacagcaccctctaccctccgtggccatggcaacgtccagggcccagaaccctgaggagtgagcggccgagacgctgctccccaccccccacctccatgcctcagcctttgcctaccccaggaatgagcttggcctccaacatcccttgcctgctgccattagtagagggggcccctctgcatctgagccccccatccctgtgccacctgggtgtggagcccatggaacactctggtccgcctcattttaaaccaaaaaactgctccttcaccctcaccctgaggccccaggggagaggacccgtgggatggtgcccaggggttgccttgggacctcggatctcctctggggggcttggctgctgctgttgctgctctgtatttgcctctcgtgattctgtttgttacccatgttcacttcccccaggagaggccttggtaccccctctcccctggggcatccctttgccttggcatccctgtagcccagcaaccctgcccctccccagcatcccagctgggccagagagagccgagtgtgccaacaaggactggggcctgcccggctgcccgcctcagggatgggcacctcatgcctgtctcgccacctcctgtgccaatgtcccaccctccacctgggggtggggtgcagcttccacttactgattagaagacaccactgccctcccttcccccctccctgtctggtgtcctgtgcccccatctgtctgtctatatttgtctgtactcccctaggagaagtattttgccatatataaaaccactgtcctgtc

SEQ ID NO: 645 - DNA, 3963 bp, Homo sapiens
agcagctagcagggagatgctgggggatagacagggctgctggggactgttgtacaggctgtgcactgctcaagggtatccagagcccagctttgtatctaccaggaagaaggggctcccctcccctcccttcctcttccctcccctctcctttcctctcctctcctttcctttcctttttttttttttcgagatggagtcttgctttgtcgccctggctggagtgcaatggcatgatctcggctcactgcaacctctgcctcctcggttcaagcaattctcctgcctcagcctcctgagtagctggaattacaggtgcacaccaccacgcctggctaatttttttgtatttttagtagagacggggtttcaccatgttggtcaggctggtcttgaactcctgacctcgtgatccgcccacctcggcctcccaaagtgttgggattacaggcgtgagccaccatgcctagcctttttttttccccccctggaaaaggtgtagccataggcgctgactgaggtcctgggaacaagtctccagagggcagtggcactcaaacccacgtacctggctggcctcccagaatgtgagctgagcccaagcatgctgtgaagccaagatgcagaggttgatgaaggcacagcccatggagatgtggaagtagaaggggaagagtttgctctgcactagtccgaaggtgaagatcccgaaagccccgaggaaaccctaaatctcatcctgaggacaccgatcccaccaaagccccgaggaaacgccaaatctcgtcccgaggacaccgatcccaccgttaggaaccgggacctcaatccgcagcacccggattccgagaacagaggcgtcggggccaaatgggctgaatctggtacctcactcccacgcccccgggtggacagcgaccctcctcggccgcgtcccctcgtgggtttcccccaaccaataattcgtcccgcctcccagctgagcccgaagccaatcgggtcgtagatctgcacctttctatcccgccctcctgggtattgactaatcgtagaaacccccctgggatcccgccccctccacgggcttttatccaattacgccgcggctactaagcgcagctgaagcgtgaaggcgccaatgaggccttcggctactccggcaggggcggaactaaaatgccggccacacccctctctgtgactcagtctctgagcgttttaatacgatggtgtccccgcgggatcaaacttcagcgtcacagctgaggactggcttcgtggtccctgatgggagagcatgaacaggtggtatgtggtaggtggggttctggagcctggcgggtgtagatttcacaacccagggggcggagccaggatgatgaccccgccccctccctaaataattctcccgggagggacacggaagcagcaaccgggatgggacggggagagaggaggcactactggggacctaagctggttctcaaatgcctctccttttcccctccaagcctcccaggcttcctatggtccctaagtcccgggttctcagcgtgacattccagagcaaacacagctccccattactctataccaggcactggcatggattaatttatctaatcacaacatcccagtaaggtgactattatgacatctcgtttttatagttggggacactgaggcatggagaggttcagtaacgcgaccagtattacacagctggaagggacagagctaggatttgaacccaggccatctagctggagagtttccctgcttaaccgtcatactctgctgtccctggaagtgaggacctccctgaggcagtgactctcggaggggcagcttaggacatttcaggcagaagaaaaacgtgtacatcacagggtgggtgtgaagatccagtgaatgcttaggggatgcccggcactcaattaggtgctcagaaaataggagcctaaaaaaggattaaggaagattttactgaagatatgctgaatagtttttgtttgtctgtttgtgtttgagacggagtttcgctctcgttgcccgggctggagcacagtggcatgatatcggctcactgcaacctccgcctctgaggttcaagcgactctcctgcctcacccttccaagtagctgagattacaggcatgcgccaccacgcctggctaattttgtatttttagtagagatggggtttctccatgttggccaggctggtctcgaactcctgacctcaggtgatccacctgccttggcctcccaaagtgctaggattacaggtgttagccaccgtgcccagcctgagtagttctgaagagcgtgtaggagtcttccaggtcgactgaatcaggcagagggcctggcaagggtgacagagagaaaggtctagaggatttgggggaagaggctgagtgtgactcagggcaaggtgcctttcacctagaagtttctccaggcagacctgccccagatatctccatctgtgccatatgtggctatactggagggggaggggagttgaatgtgagacccagagctcagctgtttcctgtttccagcctcttctagcacgggtctgggccccaattcagctaacatttattgaacagatatgccctgcctctcctgctcacactctatggctggcattcacctgtggggccaggtcgaaactcctggcttggccgtcaatgccttactggagctgctctgctaacctcctgctgcttcctctcggacctcgattcagccatcatgaatttaccagcatagagcatgtgattccacacctccaagcttttgcacatgctgctccctgccaggaaaggccttcctttaagccaatgtcaaggtcccttttttctttggactcttctgaggcctgattttttttctttggggccttctgggtccttctcactgcccagcccaaaccttggggctgggataatcttttttgttgttgttttttatttttggagactgagtctcactctgttgctgaggctggagtgcagtggtgcaatctcggctcactgccacctccgcctcccgggttcaagtgattctcctgcctcagcctcccgagtagctgggattacaggcgcccaccaccatgcccagctagtttttgtatttttagtagagacggggttacaccatattggccacgctggtctcgaactcctgacctcaagtgatcctcccgccttggcctcccaaagtgctaggattacaggcgtgagccaccattgctggccgcgtctggccttgggatcatcttttatccagctttggctcctaccataactgagaagccttgagtttagggctgaggcctctctggcatgtcagggagggtctgggggcactggggacatggggacttatctcaaagcagcccctgcttccctactcacagcgaccctcttttggccggcctaccccgggaccctgactactctgtgtcctgcctctactcacctccctcaccctccagcatgtgtttgcctgctaacatgaagtgtgacaagtactggggttagttagggggctcccatagggctggggacactgggaggggctgggaatgtgaggagtgccctgcactgtccctcaaggaagccctcacccctaggctcttcctcggacaaggctctggagcgtacagctcactggtccaggactccagagccagagaccttgggatgccctgcttctggggacacagtgaggactgcagactgcaggccagggtggggctcagggccttcgccacatgaggctgccccctcccccagtccagacctgcagaagcagtgctgtaatgaccaggacctctcccagccacctttcagcaagagcggccgctccttcccacccgcttgagcagccgggactgctctccctgaagacccctccagagagaaaataaactagcccagaccctcctct

SEQ ID NO: 646 - DNA, 3688 bp, Homo sapiens
atgactctctagcaaaatcctaataataattatactttggtcagtatgccatagattcagctacttaagagtagcactttattgcattttaaataaaacttaatggcactacttactgtgacgcctcaaagccaaagtggttgtggaagctgagtgccaaaatggatataaagaccgagggaaaagattttctgtgaaaatattttctaaaaagtttataggctgttccttctgacctgtttatgggacataatagggactgaagaagtgcgttaaatgtttggatgtatggtagtatcaggcaatggtggcagtgcttcatagattgacttaaagctgtgatgtttttacaacatcattatcctgtggtaattctgccacaaaaggaattaaatctcagaactacatatgataactgtggcaactggtcattggtgtgctagagttgccttgtgccagcttatgaggcatcttgcaagtcagttgttaaactgctggaagtttaaagtaggccatgaaggatgtatgtacaccacagaaattaagaagcactacaaatcagggctcattttctttcctagaaagtcagtttactggtacatcactgtttgtaagttattttttattctgtgcttcttgttgagagggatgagggtaggatttgtcagtcttctagatggagttgttagaatagcaaaatcagcactatgtccatggtatatcttatctatattctcagaaaatttgctctctttgatgcttaaatatttaatgagatgtgagtcagagtagagtgaactaacaacttaggcagaatatttgtaggacatgactttcaaatctttacctgttacagtatctacagagaatgctgtcataaactgacaagtcttaggctgaatttcttaccagaaacttaccaaatggagcctgtgaccctaaataactgttttagtgtgtgtacacttaggttgctgggtggggcatgctgcttaaccagggagcctaagtgtgtcagatttcaacttggatgttgtagtggagaaaaggtatctgttttaatatgtattgtcaatagtgtctgatcaggctcaaatgtaggatcttgtccagttagtgaataagagtaaattaatgtccagtgacctctggcagccctatcctaatgtcttattagaagcccacaagaattggagaggatttttcatgggtctcgtgtttctgaatgtcttgtgaatgatgtgctgactgctctttgttccagacaatctttttaagggttttttttttttccaatagtgaacagcctggaaagatagaaatagtgctcgctagagcagagggcaagcatgtttactttccattataaaaaagacttgcttccctaaattcaaggttcctctcttgtaacacaacccactgtgtgtgtaggtgtcatgtggccctcttagcatcacctgggccctgtcataaaaatgctgatactactgttattactgtaaactgtcctttatctcagacctaggagcttgatgcatccatgaaactgtgccaggctaacttgttagcctgcaagtagggtaatatctcggatgctgtaagttcttaatatcaccttccccataccccatggtgcaggaacgttggaatttccctaggctttaagaatgaaaaagcaaatcctaagtccctttcagtcctgaaggatctatgttgtgaggtagcatgatacctcattctcacttaggtatgccagatgtatcctgagaaattttagggccatttcagagagacagctgaggactagattctcatcatgccttcatttcaccaaatagcattacaataaataactctgttactgtgagagaacttattttgtatgagttcagtccttttgcatttatttatttatttattttttaatggtatcttggtaaatgttctttgtgcactagacaagaatgtgtattttgctgctgctgtcggatgatttgataaatgtcaattaggtaaagttggttcataatgttaagtgttctatttgcttactaattttctgcctacttgttttatcaatgtgagaggggtgttgaaatttccaactacaagtatggattggtctatttcttatgtaaattctataattttgcatcatattattttaaacttcatttttagatgcagaaacatttaggattgttacgtactcttggtgaactgacccctttatcattatgaagtgaccttctttagctctagtaatatcattgccctaaaatctattttgttattaatatagcaaccccagctttcttcttaatttgtgttagcatgttagcatcgtatatgtttttctatccttttatttttaatgtatttgtgtctttatatttacaaggttttttttttagaaatcatagttggatcttggtttttaaaaatctaatctgaccacctctgcttttagttagtgtatttagtccatttacatttattgtgattattaagatggttgtgtttatcttctttattggcttattagctatagttcttttaattagaggttgctctaggttttataatatatgactttaaattattagtctatcctcaaataatataccattttatgtatccttgtatctccttttccctacctttgtgccattgttgccgtaacttttagttctacatgttataaactccataatacattattatttttgcactaaaaattatattatcttttaaagggattttaaaaatagaagtccttttatgttcaccaatgtatttgccatttctactcttcttcatctcttcatgtaaatctaaatttccacctaatatcatttgactaagggacttctttttaacatttcttattgtctgttggtcatcttttgtgtctgaaaaaaacctttgtctttatttttgaaagttatttttgctgggtgtaagattctaggttttgggttttttttcttgctttcagtattttaaagatgtcattccattgtcctctgacttatgtagtttctgacaagaagtctgccatctttcttatatttattcctctgtatatgtttcctccacacatacagagctacttttaccattttttctttatcactggtttgcagtaatttgattaaaatattccttggtgtggttccctccccctccacttttcttctgtttcttggatctgacaatgtaaagttttcctcaaatttgggaaaaaaaattgtttaagagatggggtcttgctgtgttgcctaggctggactcgaactcctgggttcaagtgatccctccacctcctgagtagctgggattacaggcacacaccactgtgcacagctcaaatctgggaaatttttggccattatttcttcaaacatttatctgtctccccttctttctcctttgcttgagactccagttacatctgtgtgagacttctagatgttgtcccctaattcactgttctgttttttttgtttgtttgtttttctttgtctttttctctctgcgattcattttggttaataaaaagtaattaaaagtatctcagctcaactgaagaacaacaaaaaaaatttaacgagaaaaaaggattaaagtaattggaagcagtatatagaaactgtttcattaagtaataaagtttgaaacaatgatt

SEQ ID NO: 647 - DNA, 4034 bp, Homo sapiens
aggcgtaaccctgatgtcaagatttctttgtgtggcttttaaccaatcctagaggccattctgaggaggggtgctctaagcacgtgaaaccttgcctcagtgtggcttcataataagtatgcagcccccaaagatgatgacgttgaagagccactcatctgaatgtattttatttattaacaaatacatgagtttgtgcaatagtatcatctagagcttagtttctggagtaagactgccttgaccaaataccagttctaccatttattagctgtggaatcttgagcaggttattgagcctctctgagccttactttcctcttctgtaaaatgggcatggtggtacttacctcatagtattatgaggattgaatgagaaccaacgataagtgcttaatgagaattggggtgagtattattagctgtcacagacctgtccgattttccttgggtcacattgggaaggtgtcgaataacccaggagaggagactgtgccatgtgatacacccatgttcggtgaaggctgccctcgttggtggctgatgcaaagagtcatgtcgatggactaaattcattactcctcagctgggcattttggcctctagttaacataagctaaggactggctaccaggttgcttatcgcccaagggaaaaacccagggaggaggcaaattgaaagcctgacccttggcagtggtcctgggtgaagaatttgctgaggactccagctaaggctcaccactcagcatctcctgattgcagggaggcaagatgaaacaatttccctcactttcttctttataatttagtctccagagataagtttaattcatgtctgtgtctcaggtggaggccttccccttgagtgagatggtggtggtggcgggtggtggacatcactgtgctttgccatcttccttcaccctgtggccccagggcctagcccagggctgggggacagggcagacaccattcccagacatgtgtgctgaccacactcactttaggaagggaaacaaaccattcatcagctcagccacaggggctcgaccaaggagcctccattagctggtgtcctgggaatgacagctgtgggcatgtgatcctgccgccttcttgctcacggccctccagcgatgccagggccttggatcaagtccagagtccttggaataactctcagtcctttatgccctggaccctgcctgcccttccaaagtcggctctcagatcctctctccttgctgccccctccagcaaaaccaaaccccttcaggattcctgactgcttctccatctttgaggttgctgttccctctgcctgaaatgcttttcttctccctttcctctccaccctggctgtctctcagctgcccagggttgtctgcgttgacctcacagccccgggttctttcctatcacggcagcccaatcgtggactgtctccccagctggagtgaggggaggggcagggactgtttcgcccacattacaagctgtgtcctgcacagagcccggtaaatgttgagtaaatgttgcttctggggatccctggactggcttacttccttcagggagctctgcccagtgcttagtggggactgtatatgagacaggcacgagggtcgggcgggcagtcagaccccttttcaagtgactgatcgtcgttatctgttgatgaggtgtgggctggagttcttgctgaaacgtgcccgtgaaatgcatctcccttccttggcacactggggcctcctgagaccctggcttttgtgttcctgtcttccccactgcgtctcagcttccttactcgtggctgaggcctgaagcaaagggggtgctttgtacggagctgcacaggcccagggaggtgtctccagtcgtcaggggcccttctgctggccaggccacagctccagactgccctcttgggagcgggcaaggcagacacacttgggcaggggtggcagggaaagtgcacgtatcgttcttggaacaggtaaatgtgtgcaaatgcccatcctccagtgggaggtggagcccatggaggcccatgcagagtccatgaggggtggcttctttcccacagactgtatgggcaccaaatgtttcacattgtcctaagtgagggcccagcaagaaaacctccggggcttatcccacctccccgacaggccggaggcgaggaggtggctgcccggggccttggcttttggtgcagcattgagtgcaacatcggatccctaagggacagagaccaggggctcaatgcatccaggggacacctgggaactggtgggtttgggttgggggccttctgtttgagatggaggtgtgatgaggtgttttcagtctcatggggtctctctggcaggtctataacttgacccaggagttcttccggcacgataaaccagtcaatgctgaaagtcaaaatagcgtgggggtgttcacccgagaggaggtgcgtaaccgcatcaggaatgaccctgacgacccagaggctaccaagcgcctgaagctcgccatgatccagcagtacctgaaggtatcttgaggaagacggattctgggggcgtctgggtctgaggagggctacgctgctcctacccctgcccaaccccggcggtcacctggcttctccttgggtcttcccgcaggtggagagctgtgagagcagctcacacagcatggacgaggtgtccctgagcgccttcggggagtggaccgagatccccggcgctcaccacatcatcccctcgggcttcatgcgggttgtggagctgctggcggagggcatccctgcccacgtcatccagctagggaaacctgtccgctgcattcactgggaccaggcctcagcccgccccagaggccctgagattgagccccggggtgagggcgaccacaatcacgacactggggagggtggccagggtggagaggagccccgggggggcaggtgggatgaggatgagcagtggtcggtggtggtggagtgcgaggactgtgagctgatcccggcggaccatgtgattgtgaccgtgtcgctaggtgtgctaaagaggcagtacaccagtttcttccggccaggcctgcccacagagaaggtggctgccatccaccgcctgggcattggcaccaccgacaagatctttctggaattcgaggagcccttctggggccctgagtgcaacagcctacagtttgtgtgggaggacgaagcagagagccacaccctcacctacccacctgagctctggtaccgcaagatctgcggctttgatgtcctctacccgcctgagcgctacggccatgtgctgagcggctggatctgcggggaggaggccctcgtcatggagaagtgtgatgacgaggcagtggccgagatctgcacggagatgctgcgtcagttcacagggaaccccaacattccaaaacctcggcgaatcttgcgctcggcctggggcagcaacccttacttccgcggctcctattcatacacgcaggtgggctccagcggggcggatgtggagaagctggccaagcccctgccgtacacagagagctcaaagacagcgcccatgcaggtgctgttttccggtgaggccacccaccgcaagtactattccaccacccacggtgctctgctgtccggccagcgtgaggctgcccgcctcattgagatgtaccgagacctcttccagcaggggacctgagggctgtcctcgctgctgagaagagccactaactcgtgacctccagcctgccccttgctgccgtgtgctcctgccttcctgatcctctgtagaaaggatttttatcttctgtagagctagccgccctgactgccttcagacctggccctgtagcttttctttttctccaggctgggccgtgagcaggtgggccgttgagttacctctgtgctggatcccgtgcccccacttgcctaccctctgtcctgccttgttattgtaagtgccttcaatactttgcattttgggataataaaaaaggctccctcccctgcc

SEQ ID NO: 648 - DNA, 4722 bp, Homo sapiens
ttttctattcttttactttcaacctatttttgtcttttaatctaaaggctgcctcttatagataccacatggttgtattaatttttaaaacttactatgccaaattcttccttcattgcagtgttttattcatttgccttcactacatttttttccagatccttaaggtcagccagaggtgagagactagggacttctcaagtttttcctgggcgtgtggacagccctgaatatgcctggggccttctagattctcagggatattttggagcaaatcaaactccctatggacctcttattccttggtttttccttttaagttttttggtgggcttcttgttagcatcagctgataatgcttctcaaacagctgtaatgttaaacagttgttgctcatgggttttgacaaatgacctgcagatagtgctgttcacagaaaatgaactctgagtcaggtcaaatcaagacaagctctgagaatgtagcttttcaaggagctactagacaggttgaatagagattattttctgggggcaggtctttaagggagtctcagtccattttgtccctgccagtggcttctgggttggtggggtttgccgctctcttagttgtgaggctactggttttcaaggcttttgtagggctggggtgaacaggttaggattagggcagctgtgaacttcacaaagctcactgtgttaacagagattcagcagtaggtcttgatcaaacactccttggattattgcagtactttaactaatttccataggagtgtacttattaaatcttgtcaaaaaactgatgatgcttagaactatgttgggcactatgagggatacacaaaaatatgataccctcttgtcttcccagacctcataatactagtgtgacacattagcctggaggaacttctaaggaataaagggaagcctctctgtctttgtctgtgtgggggaggggtgtttgcagaactaactctctctttctctggcctttgtggtggggacctttgacttgttaatctccagacgtgttttatgtgatgcagggcactcaacacaagccagctgaaggcactgaatattgaaatgctgcctggctatcgagatccctattcctccaggcctctaacaaggggtgaaatcggctgctttctcagccactactcagtctggaaagaggtaattgatcgagagctagagaagactcttgtaattgaagacgatgtgcgttttgagcatcagtttaagaagaagctgatgaagctgatggttaacattgaccaggctcagctggactgggaactgatttatattggtaggaagaggatgcaagtaaaggagccagagaaagcagtgcccaatgtggcaaacctggtcgaagccgactattcctactggaccctgggctacgtcatctctctggaaggagcacagaagctggttggagccaatccttttgggaagatgctgccagtggatgagtttctgccagtcatgtacaacaagcatcccgtagccgagtacaaggagtattatgaatccagggacctgaaagccttctctgcagaacccttgctcatctaccctacgcactacacaggccagccggggtacctgagtgacacggagacctccaccatctgggacaatgagacagtggccaccgactgggataggacacatgcctggaagtcccggaagcaaagccgcatctacagcaatgccaagaacacagaggccctgccaccgccaacctccctggacactgtgccttcaagggatgagctatgaaggctccctgggagtgtggcccacatcagttcaacatcctctggtttttctaaagggctattcatctgtttgctccagttttctgttttgttttgttcttagtggtcacagtcatctaaccaaagtgatctagtgtgatagatcgaaattaacatatttttgaccatggaaggaaataaggaaattcaacccaaatttcccaagacggctgaaagacaggttttctggaaactgttaagataaactgtaatccagacacctaattcttcagttcactactcatgtgatactgattcccacattaaggttgaacaacatggctcagagtcttgttcaagagaaagtgatcaccgagctgtcacatcagcaaatatgtagtcaaggcagccaggccaactagaccacacttattggtctagtttgtccgttttatatgacattgaaaacttgtgtgtgcaacttttgggggacaggaatcacttaaaatcatatttatttggctttttatttaaaggattctgtcacaagtcttattgaaaagtagatttaaaaaaaaaaaaaaaatcttagtccctgttatccagtaggggtgggtatttgggtctgactgagacttggcctgtgaccatcatggcagttggagctctcatatagaggtgaccagtttgccatgtggatataatttagtagatatttgacagtttgtgtaggtatttgagggaaaaaactcaatgtttggcttttttattatggccactcgagtcaggatgctctatttataaagataaatgtaatatataaagggtgaggactggctgtgcatcctgccctgtcccgggtttgcgcgctgctacagagcttcacgctctccgctccaccccttagcctgggaacccaccgcaggtgtgagttctgtgagtcactgctaagagacagagcacattttcaggccagcaactatccttgccagggttttttcattatattttgaattatttattttacaaaatgggcgaagatattgtctttaggataaggcagagaaacagatgttgcagacttccacggcacccgggggagtggtgggtgtggacacattggttcggcaatctgattctcctgaatttcccagccaggctcttgtggggaggcctgtggatggggggatttgaactatttggaaacaaatgattctctatctcaggtgagaaacctggtcagaaacaaagggctggtcacctgatttaggccagcaaccagggaagctcttagaatcccaggcggacaccctttctcaaaagatatcccctaagagtcctttctgctttcttcacagattgattttatgtaaaatgcagagttggactacacgatttcttcccactccacaatctgtcatcctagtatagatcatggtggtttccctcaagtttatgttctcatgccctcaatctgtaaatttttgtctccagaaaaaccctcccaggcatcccataccagcaccgttcctcatcactgtccatgtaccatgcagccgtatggggggccgtgcacaccccaaaccctgagcttcacacttaaactcatggggagggcccttcagagcagagtccacaggcgggtggtgctacatacacaagcttagtgtacaagtgtaagatacactttaagccagacacctaattcttcagttcactgcccatgtgatactgattgccacattaaggttgaacagcatggctcagagtctagagaaagtgatcaccaagctgtctcatcaccaaataggtagtcaaggcagcctcacctccccaggtgaggggcgggtccccactttaggacaagaggcagcttgccttccaccagacgccagcctcggccttcctccccgactcactgtgggtacccttctacactgaccagcaagctaggccgctggaggaaagggaactcacccaactctaaattgtgccgcttagacttagctgtcagtgtgacttcctttcccacccacccccagaaaaacagaaagagcatctggggagcgagtgaaaattccttaggtgattcctaagatttccttgggtatctggtttttgttttcatatttgagtgtgtgcatgtgtgcatgactttaatgacttttttaatggggtgggaggtggctggggtgctggggttgaaggaagtttgggttgatttttgtggtgttttgtttaatagagaattttttttttcctgttcccctgtcagctggtctgacagatttaagaactctcattcttaaaagactttggacttaaattctagcattttagactaggactgttctactgtgaagaaagttctgtctcctttagcccggtttgtttctccctgctcaggtctagaatcccaagcagtgttcttctggtgagcactgtgagccgcagatgtgactttttttttaaagtcatctcttcagcaatccagaggttccttgacctcattatttgtcctatctctcccttatagtcctaagccaagacatttgacctttgacatttgacctttgcagtgtcatgtgagggcgtcagtatagaggcctttgcatctgggcctggcacccgctctctgcctctggaggctaaaccctgtctggatttctcttgggatctaacgtgggatcttctggacagacaaccgtgacatcagcagtgctggtgctgctgtgtgtggactgaacacctgcactttgcagaggacacgctgcatgggccccgcttgcggttcattcaggcctgctgcaggagctctgagaacaagaaagagtggacacccgttcccctgcatcatctgtcttgcgtgctatttcagagtggggaagtgataaactatttgccttctggagctctttgtgaaaaattaaaaaaaaacttagctc

SEQ ID NO: 649 - DNA, 4383 bp, Homo sapiens
aaaggagctggctcgcagtccctgtctcgcggggggtgcctcccccaactgcgatgggggtcctaagagccggggggggaagaggggctggctctcagtccccgcctcgcgggaggtgcctccccccactgcgatgggggtcccaagagccagggagggaagaggggctggctctcagtccccgcctcgcgggaggtgcctccaccccttccgatgggggtcccaagaccgagggaggggagaggggctggctctcagtcccctcctcccgggggtacctcctccgcctgcgatgggggtcccaagagacagggggggaagaggggctggctctcagtccacgcctcgtgggggatgcctcctccccccgcgattggggtcccaacagccagcgggggaagaggggctggttctcagtccccgcctcgcgggggatgcctccccgtgctgcgatgggagtcctaaaagccagggggtgaaaaggggctggctctcagtccccacctcgcgaggggtgcctcccccccctgcgataggtgtcctaatagccagggggggaagaggggctggctctcagtccctgcctcgcgggtggtccttcaccccgctgcgatgggggtcctaagagcaagggggggaagtggggctggctctctgtccccgcctcgccgggggtgcctcgcacccttgcgatgggggtcctaagagccagtaggggaagaggagctggctctcagtcacctcagcatggggggcctttctgttctggttttgcccaagagtaagcttatttgcatctggttctagcaagggaattgctgcgaaggccctcaaacaggggggccatcctttcgaatccctatctagttgtttagagatgtaggccaccggcctcagccaaggccccacagtttgggttaaaagtccagctgccatcttttctctctgacgcatacaatggaaaaggctttgtgagatcgggtagcccctcggctggggctttcagaagtttttcctttaagtcatgaaagacttgctgttgttggaatccccattccaaaagttcccggtccccgcccccattgtgacctcatacaaaggcttggctaatactgcaaagtttgggattcccagtctacaaaaccccacagctcctaggaattctctcaccacccttgtgcctttaggcttcggtagattgcaaatgacctgctttctttcggatcccgggctgctttcggacacctgtcgaatagtaaatcccaagtaaggtacctgcggtcgtcggcagatctgaattttcttcttggacacctaatacccacagtcctccagagaccgagaggttgatgtcactcccaatatcggaggaagtatacacccccgtgtgagatggtccttaataatattccacggcggagggggtgatatgactacatacatggcagaaagtggaaacctcccagggatattgttcccacgatcctggagggaagaagatgatgttactttcaatatgacagaaggtggatgaagtggtggactgcccctccacacctgtggacacgcccccactgatattccttctaattgcagcgtgggagaggaggatatgacacgcgatatcgcagggagtagaaacacccctgtgatactgttcttaatattcagggaggaagaggatgatattactcccaatacagacgggtgtacaccctctgtacaccgagggtgtacacctgtctgtgaaagagttcgtaatctccagagggggagatgatattactcacaatatggtaaagaggctgtgagtccacggaggatcctcagagccagcgggggaagaggggctggctctcagtccccgcctcgcgggggtgactccccccagtgcgatgggggtcctaagagccagtgggggaagaggggctggctctgagaccccgcctcgcggggggtgcctccccgccctgtgatgggggtccgaagagccagaaggcttagaggggctggctctcagtccccgcctcgcggggggtgcctcctccccctgcgatgggggtcgtaagagccactgggggaataggggcttgctctcagtcaccgcctcgcggggggtgcctcctttcctttctacatagacacagtgacggtctgatctctctttcttttccctacagatggacacgcccccactgatattgtttttaatgcagcgtgggaggggaggatatgacacgcgatatcgcaagtagtagaaacacccctttgatagtgttcttaatattcagggaggaagaagatgatgttactcccaatacagacggatgtacaccctctgtacaccgagggtgtacacccgtctgtgaaggagttcgtaatctccagaggtggagatgatattactcacaatatggtaaacaggctgtgagtccatcgcggatcctcagagccaggtggggaagaggggctggctgtcagtcccctcctcgcggggggtgcctcccccactgctatggggatcccaagagccagtgggggaagaggtgctggctctcagtctccgcctcgcgaggtgcctccccaccctgcgatcggggtccgaagagccaggggggaagaggggctggctctcttcgtggatgattctttttccattctcaggcagttttcttttttctttctttctttttttttttttgagactgagtcttgctctgttgcccatgctttgctcgatctcgggtgactgcaaccactgcctcccaggttcaagagattctcctgcctcagcctcctgagtagctgggactagaggcgtgtgtcaccacacccagctaatttttgtatttttagtagagatggggtttcaccatgtttgccaggatggtctctatctcctgcccttgtgatccacccacctcagcctcccaaagtgctgggattgcaggtgcgagccaccgggtccagcctctcaggcgattttcatacctgcatactctggtcactactctgttaaacagtcaaggagggtaagtattatcttcagatttccagagctctgtctctgtacagccctctcctcctcaatattctgccctatgaattctagccacattggccttcccaggctcacagttctgtcttctcaactcaggaagatctctgagttccatctgcattctttcttcctgtgctgtggcctggaaagttttctaaggtgttagggaggtcaattgtggggctagcctcatttgtttctcatctcttgaggatcactgccctttgatgcttgattccagtgattgattccctttgttgcttgagggccatagtttcatatattttgtccagtagttttgttgttttaggtcagaaagtaattttggtctctgttactctatcttggccagaagtgtaagacctaagcatttacacatcaaaatactgcacacataattttagtttaagctactttttaaaaaatctccttcattttccatttagcattctatttagggtattacattggtttttttgaaattctgttattggcagtttctattgcctatcaatcccatttaaagatagtgcatagggtattctaaaatagctgttaagcaaagagaaaattgggcctgatagggtgagaatcacagctctaatacctagagtgaccttataatgtattgtccaaaggagatatttttgacagtgaaagagggtgttgttagtaattatatcaggaccatggcctaaaccaggactatcccaggaagcctgggacatatttgtaccccatctctatttaatgcctttatacaattctttacttaattctaccagcctttattgagtctgctttctttgtctagctgagtgccacgtgctgacgtcactaagatcaatacagcaaactctgaaagatggacagagagacaggagatggtcctttataatgcagtgtgatctgtgctgcaatagagatggaagagtgttctgatcggctggaaaacaacgcacatgggaagctgtacagaaatgagtggggaaagttttggaagctagaagttcaaaacgaggtgttggcagcaccatgctctctccgaagatgctaggaagaatctgctccatgcctttccattcgtttctggggtttcctgcaagccctgacattccttggcttgtagatgcatcaccccagtttccgcccccatcatcacatggcctcctctctgtgtgtgcctctgcgttccctctattcttcttctaaggacaccgacaccagtcatagtggattaagtgtccactcctaaccaattacatctgcaacaaccctatttccaaataaagtcacattctaagattcctagggagaacatg

SEQ ID NO: 650 - DNA, 4027 bp, Homo sapiens
tattgtgcctcccaaagatgtccctgtggatctgcacttgaaggcattcgtgggttacagaagcaggtgaccctttgcaagtcacagttcatttcaggacagcacttagaggagggcaagatgtataaattttccatatgcccagtggattcttgggggcctgagaaaccatttaatggttctgtctacccaaagtttctcatgaccttttatttcctcagtttgaaacctgtaaaaagaaaatggaaaaactgatatgtaagtttaagatggttcttttttttttttttttttttgagacagattctagctttgtcacccaggctggagtacagtggggcaatctcagttcactgcaacctctacctcctgggttcaagcaattcttctgcctcagcctcctgagtactgggaccacaggtgcccaccaccacgcccagctaatttttgtatttttagtagagacaggagttcaccatgttggccaggctggtcttgaactcctgacctcaggtgatccacccgccttggcttccgaaagtgctgggattacaggcatgagccaccacgcctggctaagatcattattttctgtttttagtcaggtgatctcataatcaaaaaatgtttaattgataatttgtcaatttgtagttttggccactaaaactacaagagttaggatgcacctttatattacagtcatacataacctcagctagtgaagaaaaactgctctatttgtggaagataagatactttttacatcccctttatgatattttaaacccttagtgcatgcaggtatatatgtagactcatgctgtctttaaatcccaaacctaatatattactgtagtactttaaccctcaagtgttttgggggttccttcttaagtgaaacccttaaatatcaattgatgacccagaagtggctttattttctgggccttgcattttgaaagaacattctatacaaaacaattctcttgtgtttcattgattggccatagcacccagtttcatgtatttgaatcgacaagacagctccctcgattctccatgtatgcgctgaccagcctggaccctgccagtgagccaatcagttatgttaactttaccattgcagaacgggcacagagggtgagtatctcgcttttctctttcaatgcttttacacagtagaatcctttagatgttatttcatagaaagggaaaattacattaatgtgttatattggtagcagtaaatatgatatgaaagaattctctaacttgggggtggcttgtaacctgtaataaaaatattgctaaaataccttctctcactttgaaaaagcatctgagcaatcctcagttattggtgaattcttaccagtgtttaattcctctctttccgttatggtcttagtgtggttgtcctggtgtagtatttcaagaggaacctgcagcaagatgaaaagagagtgggacttggagctaagaacgtttttggctttaagtgctacgttaactcattaaattcttagtgatcttggggaagtcccctcaccagtgtgagcctcagttttcttatctaataagtaaggataatcttacccaccttattgcgggggcccgaggattacatgattggtgtaacagtagcaccttgtacatttgaaaggactaataccagtggactttaaccttggctgggctttggaattcttggtgggactttttaatcatgtagattctcaggcccctgcctggcctgtggaaccacagactctataggtgggcccttccagaaggcctcatgggtggttctcatgtggaacctgtgttgcaagccactgcatggtgttactgctattaacattaaaacttatattttccttattgtgtggatatatctgtggtgtttgcccatgtatacttcattttacatttcttaaagaatagaatggaatggttttaagcacgctacattgtccaggttatacccacagaagagctgttgtgtaacagaatcagcatcatacctgaatcatttgtacattgcatataagactatgtctaagtagaagatgctatgaaatcatgtctgctgtggggccaggcataattatgaatgttacttaagagcataggtgaggtgagaaaagggaatgtgactagtgttttagtattttcttggtgtgggatgaagtataattcttttttttttttctcaacaaagcagtaaaactagaaagaaggagaactcttccctcaagaatggctgtaccttcatatctagaggcacattaaaaaaaagaacgtctgtaccttaaaaatggaggtcatttcattgtgttcattttcaaggttgttgtatggctcggtcagaactttctgttaccagaagacactcacattcagaatgctccatttcaagtgtgtttcacatctttacggaatggcggccacctgcatataaaaataaaacttagtggagagatcactataaatactgatgatattgatttggctggtgatatcatccagtcaatggcatcattttttgctattgaagaccttcaagtagaagcggattttcctgtctattttgaggaattacgaaaggtgctagttaaggtgagggaatgcggtagatgcatttgtgagaatgtggtagtctaataatatttgaggagattaatggtactacaaatgtacttatgttatagtgatgttttcaagaatttttgcaattcttgaagtaaaaattgaactagtattggagagtttactacttaaggatttattttataaaaggaagtgtttagctcctgagcaccatgcttgctttgtttggtttaaagtgatgcatttaaatattaacattttcctttgttagctcttcatcttatttgtagtatctgctttggtcttcttcagtttgggtctttccaaaaacccaaattcaagataaaagagcaaaataaagatgattctgattggccccaaagtatacaatattcccactgcaaatccctaaaatattaatatgtgtgttgtgggggctcctggtgctaaagcatggggaagattcacatggagtgtcgtgttgaaattggaggcagcacagatgagttaacttgttgagacagagatgaaataacgggaagtagcttaattggtataagcgaacaggggaaagaagggggtctctgtatctggtaaatagtgtcttttcatttgtctgggttcaagaagtttgtgaggcctttttcattcctgagtgttcatggtctccaggtggatgaatatcattcagtgcatcagaagctcagtgctgatatggctgatcattctaatttgatccgaagtttgctggtcggagctgaggatgctcgtctgatgagggacatgaaaacaatgaagagtcgttatatggaactctatgaccttaatagagacttgctaaatggatataaaattcgctgtaacaatcacacagagctgttgggaaacctcaaagcagtaaatcaagcaattcaaagagcaggtcgtctgcgggttggaaaaccaaagaaccaggtgatcactgcttgtcgggatgcaattcgaagcaataacatcaacacactgttcaaaatcatgcgagtggggacagcttcttcctaggtgaggaaaatacaggtcatgaagttcctggcaaagattttctgttaaaaacctatgctggtttgctttggatcacaccctggtgaaccccgggtgctaagaatgaaaataaccttggtgagttgtacaaattaaagacaaagaactacatgtgaagatagacttgctttctatttttaaatcagtagtagtactgttgctgaataatactaggtttttatggaataggatgaatgcttttgaagtattagggcttcagagtccaattttgcttatttatggtatataaatacatatttttttcttgaaattgcaattgagtttgtacttttcaaatagattatctactttttcattaaaatgtaaagatgtt

SEQ ID NO: 651 - DNA, 3690 bp, Homo sapiens
ccccaatggctcgggtctcccccccagcggcaggggtctgccccatggcaggggtctttccccacggcaggggtctccccccaatggcaggggtctccccccaatggctcgggtctcccccacatggctgttgtcttcccccatggctggggtctttcaccacagagtctagtgaccaccttgctccatcgcctccctgtgccactcagattgccgcagggtgtggcatcccacacgtgtacacactcagcacgtccagccgaagccctgtggtgggcatcagtttcccacagttcggaggtgcagagcagggcttggccatcctgagaccgcaggctttctgtggctttcagctcttccacatgccagacgggctctccagtttggagttctagaagtcacctatggagtcagatgggccacacctcctcagtttactgaatgctgttgcagagaggctgggccagggtgccaccctcgctggacctgggggctgcattcccagggctgtgtttgtgcgggtgtgtctcttggcaagatgggaaaaggccctgacatttgtgccttcctaagcttggccttgcagccatcactctgaggagggggccgagggcagggggtctcccaggaggctgctccatctttcttccagtggccactccaatcttggtgccatccgtggcttagcgtgacactggggctgcgaggcaggagcaactgctctgcccgggctctggggccttacagttgggtctggtggggccggcagctcccaccaggttgaggacagcccgggccaccttgcccttgaggctgagcacacagtgggagcgggctgcggtctttgtctccctggagcactgtctctgttgctccagagacagccgcgcagccatgctggggagctagagggacttgtgcatggatggtggtcggtgggggatggggagcctctgggctgagcgtggctcttacctggggcctctcttccaggcggggctggtttcccttctcctacacccgggtcttggacagcgatggcagtgacaggctgcacatgagcctgcagcaagggaagagcagcagcacgggcaacctcctggacaaggacgacctggccatcccaccccccgattacggcgccgcctcccgggccttccccgcccagacggccagcggcttcaagcagaggccctacagtgtggccgtgcccgccttctcccaggtcagtgggcggggccggggctgggaggggcccgcaggtggaacagtgggctcagcctgcagtcccccgttggagcctccgctgaggggcggggcgcctgggggtctgggtctttggacagccctggggtgaaggctgcatgatttgggaatgtgtacacacccctgcttcggcctcaggctgcccgcctcgccgcagcaggctccctgtgtcggcatgctggggctggggtcagcctgtccctcatggtgccctcagccagccacgggcaactcactgctctgtccaagggggcagcgtctgggctgggaagtggctggcctagaggtgggcctggacgccgccgccttttgggagagccaggggggcaggatctcttccgtgagaaccacggggctccctcagtcacatccatgagatgggagtgcttgctgctcagccctggcatgtggctggaccccttccagtcagtgtgaccctggatttgggccatctggtgccgggaggccagaggtggaggatcagggcctgggtcctaggccctggtgtgggttctcggaaacccgggatcatggcggtcctggtatctaggctggggcagggtgtgagcgtgcatctcaacttgccgggttccagcccgctccgtccagggaggctcctggggttggagagttggagacccctgtctgtctggggctcctcagccagaggtccagtttgtgggatattggctgggctagcagctttgttcccggggccggtctccagggctgggcctcaggcagtgagtagagagaagaagagaacccacctttttccgagataacaggtagcctgggtgactactcagctattgacccacaagtgaggagtccctagattgacagcctgagctgaggccgcaggaggcaacctggagaggtttgggctctgggccgtgggtgttccacaggtcagcctctggggtgggctcagtgctgggagagccaaggaggggtctgcatctgccctaggccccgggccaggccatgctggcagatgaagggcacagccagccccagcgccacacctgggcgctcctcccaggcagtgtcaccctcccaggggccgggatggtacatgtgacaagtttccaggaaactgcagctggggtctgggtctggtcctgggtcctacaagcaggcggaggagtcccaggggcccgcccaggcatgggtgaggtgctgcaggtgccctgcgggggcctcggctccctgggggcaggaggaggggtctcaggcggccagtcttgcatctgtttgggagtgtgcaacaagcacacaaattgaggtggccgctggctggaggaggtatcccctttaatttgggcagtcattactttaccactgggaccagggctccaggcaggtctctgagtgctgcagccaggagatggggagccttccaaaggaacacggtttgaaccttgtccaggcaggatcaccatttgtgggtgtgtacaggcagcgggtgggggtgaccacaggccccgtcacccggcctgacatgtttctgcctctgcccccagggcctggatgactatggagcgcggtccatgagcaggtaaggggactttcagacctgtctttgggaccgtgggtgggtgtgaagaggccgggtggggcaggtccctctgctaggacctggggccacctcttttcctttagggcccagcctggcccttcacccctgtcagagccggggatgtcccttagggcgtcctgctttctccgagtgacacgggaacccccctgggccctgcccctctttcatcgcatctggccggccccatccatccctgtcaggcaaggttggggagggtagctgaggctggcatccatggctggggctgcagcctcctctgccccaatctgtgctccgcccttgtcctgggtcttcctggagggtcaggaggccaacgggagctgctgaaaggggcattgctcggtgctggcggactcgccgcctgtggctgggcagcgtcgtgcagccaggcagccgtcctgtgctttgtttcacagtggcagcggcacgctggtgtccacagtgtgaggacgctgaccccgggcagccgctgctctgaagagcttccgcgccttccccctggtctcgtccattttcctcctcagctctcgctggtttgttcttgggttgtttttcttttccacctgccccatgccttttggttggtgaccccagactctgtgatcccccagggtccatggtgctgctccatccgccccccctcccctgtgtttacgcgccccatcctgtgtgtcccagccttttgagcagaaactgccaggcaggacctgctgggccgtgcggggcgccctcggcctcaccctgcagtgtctgtggcactcactgcttttctaaggctcgccgtgagccaggtctaaagtttgaagaaaaagaaaaatctt

SEQ ID NO: 652 - DNA, 5075 bp, Homo sapiens
aaattgtttggaaaacaagccttggagaggaagagcagttgggcaggtggccttagaagcagagacagacgtccctgttgataccactgttgatggagaagcactcggctctcctccatcaggggaaaccaaacctgccaccccacctgggatgtggcctccccagggaaagagtagagaggctggagctctggcagaacaggcctggcaagggggctggaggccaaggctggtgttggggctcagatcaaagccatcatgctgcatggagcccaatcagctgccaacactcttggtgacacagagccctcacgcctctggtggaagaagccagggctggatgaagctgtggcgtgcagcttctgcacagtctccgtggaatctctcctactctcccgtgagcctttggaggccttgcaggagctcagcctttcagcagaaggactgggttcaaccgcccctgcaggagcagctccttggcctcccaggcaccagtggttgggggctgcatcctctgtgagcctcaggtcaagcccatacagtgccctagactcctccctgctctgaccctgggcccaggagaaaggccgagcacctggccctctggagacaaggacatggccattcctcagaggtccttcccctgacaagctgggccccctgttgtggggcgcaccactggacatggtaggggagtggtggcggccttgcccgaaggcaggctgcgggaggggcggggctggctcaccacagttggttgattcaagtgaggcctggggtcctgctctccttccagcttccatctcaggatggctctcagccccccacattgaagaccaagaaggtgaggggcaaaccaagggccctgcctatggaagcttcctgtgatgggctgcaggtagcaggggctggagagggctgtggttggggccacaccaggctcccccaacctgagcatcctggaaggtgacagctcacccttggcagtggcaacccccaggccagcagccccatctgaggacagttgtcttcagtgccattggctgtggcagcacagatggggggtgtgaagacctgaggccctgcgactgtagcacctacagccactggagccagctctgcacaactcagacctgggtggcgaggacatagctttgcaggtgggcagccacatcccagggggagcctgcaggccagtggcagggtgggggcaggcagagcagggtctccccactgttgccgctgggctcctgcggcttgtggagaaagatgggtgggcccacacatattgctgctccctgaatctgagcctcggtttccctacctgtgaaacgggtacccatggcagctcagaagtgtctggcagtggggctgctggggcacagtcatgggggacccgagtcctgctctccatgtgctcgcttccctcagtggtccctgatgccagcagaactttctcccaaaaagagaagggcgttcctgtgagttcttgtgtggggggtgggtcacagagcctctccaagtgcagggcagggtgaagggaggctgaggggtggttgaatggccctgggaagagctctcttgggctcctcgtgtctgggtggcctggggagcatgcttttgggcaggcggctggcagggctggtggctgagccactgtggctcaggatccccagcccaggcctgaatagggtaggcagggagaggggagggtgagtgcatggtgcaggacagtgtgtctcctggacagaaacagccctggtcactcacggccatggcatagccatggctacaggaaagtgctgctgtgtgttgcagcccctggggccggctcccaatggacacccagcagcatctcccccactgtgctgaggggagttgtgccagtggggtgctggcagcagtcctgggaactgggggaagagccttggcaagcccatccctcctcgggcatcagggatgggctcacgtgaccaatttctcccatggaagatgtttggggtgtgcccagaaaatggggagggccctgtggggcaggattgtattattaaatccagaaagtctgggcttccatttttagcacaaggcaggcagcccacgtgccccagcccagtggccagcctgtgtgggagaggggagtgggggccagagggagtgaggcttctgttactgcagccagccagggtggccagtgtggactggacagcgagcactgcaccaggggcactggtactgaccttgggccatgcacctgatgcctgtgagagtgatctctaggaaccactgcacaagggggcagatgaggggaccctgacatgggacagctgagggttacgccaacacgggggggaaagctgtgtccaggctccaccggactccgccgaggacagagcactgccctgactctagggtgcggggtcactgagggttaggacagtctggagttgggagagggccatgctgcagctggggcacatcccacctgcacctctccagatcttggagatgggacccccacccacatgctccccaggtgggtcccatcctggggggtgcaggagggagctccatgtgcccctgctgatctgcccatctgagcctcaggggtcctgggcactgagagctgggctgggctcagcgggggtatgcattgacattggggacagagaggggatgctgaagcgggtgctgtctgggtggggcctgcctgatcgacccagcaggtgcacccagcagccggaggtgcttctagcagagtgaacgccctgtccttaggggcatgtgagctgaggctgggggcctggagctgcagggggaggaattggggagagcagaggtcccaaagatgtcccaaggccccaagaccctggtgaaggaatggaggagccagcattggtcagcgagaggggagtgggagttggatggcctggctctgggctggacacacggtttgcagccacagctgagctgtgctgtggagcccagttcccacctgggcatgtcctgtcctctgaggcttccgggagccggacggccaccgcggtgcaggcgcgcactcaagggctttcgaggctcactctgtcggagaggtcagagactgagtgtcgctgctgaaggctgtggtggaccgggctggatcgcggattctaggttagatcgcagatttgggatcgcggattggggattggattggggatttggggttggatcagggatgtgggggctggataggggatttgaggattggatcggggatttggggttggatcctggatttggggccgggtcggcggtggggggcagtgaaaaggtgacagagagcagcccctgctcgggagccggtggttgggggtctgagaagtcaccaccaccaagaagttcttcggcttcgggagccgcgggggcgagatggcccgggctccatagaccacgtctgcacggttccgggtaccgaatccgggacgcggaacagcggaaaatccaagggcggctgtcaaggaccggaggtggagcgcggcctggagcgcaggagccggagacctggaggcccgggacaagcagcacagaactgctctacatttggcctgtgccagcggccatgtggaagtggtcactctcctggtgaacagacaatgccaaattgacatctgtgacaaagaaaagagtgtgcctttgatacaggcacaggctgtgcattgccaagaagaggcttgtgccattattctgctggaacgtggcgccaatccaaaccttaaggatgtctacagcaacactgctctccagtatgctgtgtatagtgagagcacatcactggcaaaaaaactgctttcccatgatgcaaatactgaagcactggacaaggatctcactctgtcactcaggctggaataaagtggcacaactgtggctcactgcagcctcaaccccctgagctcaggtcatcctgctacctcagcctcttcagttgctgagactataggctcccacctccactcctagcctcagacggagtctcactctgtcgccaggctggagtgcagcggcatgatctcggctcgctgcaaacctctgtctcccgagttcacgtgattctcctacctcagcctcccgagtagctgggactacaggcgtacgccacaacgccaggctaatttttttttatttttggtagagacgggggtttcaccatgttggccaggatggtctcaatctcttgacctcgtaatctgcctaccttggcctcccaaagtgctgtgattacaggcgtgagccaccgtgcccagcccgacatagatggtttttttagggttacagcgacttcttgttgaagttgtctcacaactacctgataaagtatttttgatactgattttgtaaatcaccttattattaaattttcaataatatctaactctaacatacacttggaaaaatatcacctcatacacaattcaccttcttttcctcatgtgtacatattcctatttattactgaatccagttaaggacacagcaggtgttatcttcctgccaaatagatattctgttactagacgacagttttagcccaccattcagtcatctgctgataattcggcgatgcttaacaacctgctgaagtctcaagaaagcagtggatatgtgagtgaggctggcagtggtcaattctacactgaggaacgtttccctctttttcctctttttttattaggagctcaaatcaacctcaggggtcctcagttattcacttgcctgtccaaatctttccaatagattcctgtctcagaataaaagaaaaattccaatggcttttaaggccctgtaggtaacctcctgacctcagctgctatgagtctctctcctacttatggcatttctactatatgtgaatcccacctcccctcatttgtctgaaaaaggtcacagataactacacttatcattgctggacaaagctctatccaaatgatggtcagtgagccttcaaataaaaattataagcaaattatatgtaataatagtaaattatgtataccagtgggaaaaataaatcaaatatggttttggtaaaattc

SEQ ID NO: 653 - DNA, 1618 bp, Homo sapiens
cagcactttgggaggccaaggtggacggatcacctgaggtcaggagttcgagaccagcctgaccaacatggcgaaaccccgtctctactaaaaatgcaaaaatcagctgggcgtggtggtgcgtgcctgtagtcccgactactcgggaggctgaggcaggagaatcgcttgaacgcgggagaaggacgttgcagtgagccgagaacgcaccactgcactccagcctgggcgacaaatgacactccatctcaaaacataaaaatataaaaaatgtttggctttggaaaccatgccctgctgcttaacctactgcgtcctggggcaggttccttgtcatctctaagctgcagttttctcatcttcgaaatagttctaagcccccctatggctcttttgggtttcagagtttgtaatatagcgcctttattctccacacagagcaggcactcacaactctccttttccactgtcctctcttccctggtctctgatctctcgagccatcctaattcctggaccccttgcagtgtcttgcccagcttgggttccccagcactgtcctccacctcctggccacagccctatgcacctgcagcggggcccactgggcaggtgttggcactggcctccatggtcacagtagcccctactgcacggggacacgcaggtgaagccgctctgggggctgtagaccaggtcgtagcccttgtagccatcgcatctgaagtaagccttcagcgtgctcacgttcactgtcgggaaggacacagattaacacagaaagcaaccgatgaacactaaatcagtaccttttcagccacgaattccttttcgggtgtttatcctgagaaataattggagaagtgcacagatacatatgcccctggacgttcagatcagtgtggtggataatagtaacgtttcagaagtagggtctggttaaataaactactgcacatccttaccaagggatggtgcttcctatggaaaaagtttcctagggaaaaagtttcctagggaaaaaggttcctgtggaaaaaggttcctatggaaaatgctttcctgaagagcacatgctttgaaggtggccagacttgggtggaaactgaaactctgctagtaactagatgtgtaattcagggaacattccttcactctttcagcttcagtttccttatctttaaaaggaaatgatcataatagcacttatgctgctgtgagatttaaatgagataatgtgtccacagtactcggtacagtgccggacacacagtaagcactcaaacaatggtaatgattattataatgtattttaaaatatgacactatattcaaacataccattataatatgtcaaatgggaatgtggacagaatatatgagacaacctgttcacaactgtttaatgaggaggttttccaacattaggaatgatttgatccttcagtaaaaaatggatgtctgaaggttcctaggcataaaagaaagttcagaaggatatgtaggaaatactgttgtctctctggggattgggattacagggtttttttcctcttttctttttgttaagtttgtgtttcctaaagtttctgcaataaacatacgatgcttgtataat

SEQ ID NO: 654 - DNA, 3895 bp, Homo sapiens
agatcagttacctcctagcctttcctagtcacattatccccaggctacagatgaggaaactgaggcccaaggattccagagagcctgccccggggtcaccggtgcggtccggatgtctccaaaggctctcccactactctggaattcagaggcccttcctcgtgctgccgccgctgatggagtggatccgggtggccgtggcgcacgccggccaccgccgcagcttctccatggacagcgacgacgtccgccaggcggcccggctgctgctgcccggcgtggactgcgagccgcgccagctcagggccgacgactgcttttgtgcatctcgaaagctggatgcggtggccatcgaagccaagtttaagcaggacctgggtttccggatgctgaactgtggacgaacagacctggtgaagcaggcagtgtctctgctggggcccgatgggatcaacaccatgagcgaacagggcatgactcccctgatgtatgcctgcgtccgtggggacgaggcgatggttcagatgctgctggatgccggagctgacctgaatgtggaggttgtcagtactcctcataaatatccatccgtccaccccgagacccgccattggacggttctgacttttgctgtgttgcatggacatattcctgtagttcagctcctcctggatgctggggccaaggtggaaggctcagtggagcatggcgaggagaactactcggaaacacccctccagctggcagctgctgtaggaaattttgagctggttagtttgctgttggagcgtggtgccgatcccctgataggaaccatgtacaggaatggaatttctacaaccccccagggtgatatgaactctttcagccaggctgcagcccacggacacaggaatgtgttccgcaaactgctcgcccagccagagaaggagaagagtgatatcctgtccctggaggagattctggccgaggggactgacctggcggagacagccccgccccccttgtgcgccagccgcaacagcaaggccaaactgagggccctgagggaggccatgtatcacagcgctgagcatggctacgtggatgtcacaattgatatcaggagcataggcgtcccgtggactctgcacacgtggctggagtctttgcggatcgccttccagcagcaccgcaggcctctcatccagtgcttgttaaaggagtttaagaccattcaggaggaggaatacacggaggagctcgttacccaaggcctgcccctgatgtttgagatcctgaaagcgagcaagaatgaagtgatcagccagcagctgtgcgtcatcttcacacactgctacgggccctaccccatccccaagctcacagaaatcaaacggaaacagacctcgcgcttggatcctcattttcttaacaataaagaaatgtctgatgttacatttctggtagaaggaagaccattttatgctcacaaagtgctgttatttacagcctctccaaggttcaaagcactcctctccagcaagccgacaaatgatggcacctgcatagagattggttatgtgaaatactccatctttcagctggttatgcagtatctctactatggtggcccagagtcactgctcattaaaaacaatgagatcatggagcttctgtctgctgctaagtttttccagctggaggctttgcagcgacactgtgagattatctgtgcgaaaagcatcaataccgacaactgtgtggatatttacaaccatgccaagtttcttggagtcacagagctctcagcatattgcgaaggctactttctcaaaaacatgatggtcctcattgaaaacgaagcattcaagcagctcctgtatgacaaaaatggtgaagggaccggccaggatgtgctccaggacttacagaggacgttggccatcagaattcagtccatccacttgtcgtcttccaaaggttccgtggtatgaaacgcctagtgcagggaatgcttcccgggaactttccagttctcctgccgcattggctttacacaaacacagacaaattccacctggcacctgtttttggctgggccaaggagctgcctctactgctcccacgtgttcctgttgaaaaacaaaggactttccactggtctgcagatcagatcagctgggtccagagtttaatgggcaactggacaaccaagttaaccccaattgaaagcacccctaggaccattgaacacccactgccggggaccactgtccagtgaatggattgaggccttttaaaggtcactcaggttccaggttgacagttggaggacttcaccgtaccaaccctgaagagattgtattacacattaaggaccttggtagctgtgcttcagcaaacgtcaaccatggtagcaaattggtgaggctgtgaccaataatgaggaaataatctggcaaatttttaggggtgggaacttttttaaatgttcatttaaaaaaaaacaaaaacagggcagtcttgtagtttaaaatatatttctaaaagcttaacagttcgttttcaactaaattgtgtttagggatctgtgtttgagatttttctttatttctttttttttttaaatagtaagtcacaggtccacactgtgtaaacatgcatctgataagatactgctgatattctaaacaagttgaaataatcttgccttagtgatcatgattacacaaaagaggtgcactgccaataagtatctctaattcaatagttgaaagcaacctgcatgctaatcgtggtttcggggtgagaataaaacacccccacataacatgcatttgcatgggcccgaacctgtgaaatgttacgtttgtgcttcatttttgccaaggtaaaaatgttccatcatttctagctaaaactccatttggtgaaaccaacatatccatttcttttcctagttacggatgatttggggatgcttttgcagaaatgtgttcatagatgatgctgaatgggggaggggggcagcacgtcagggaatttactattaatcccagagttttctctgtattctcagaagatgttaatagtttgttactagccagagagtatgactatgttagattatttttaaagatgaaacatgtatgataggatggattctttctgtattctgagagtgtacagtacaggattattataatgaaagtttatatcaacagggtttcgttggctctgccatatattataagcaaaagagattggtaaagtgccacagtattccagataacttttcagttgcggcctttcttctcgttctttaatttgaaacctagatacatgcagtaaaaactaggagaatgacttttacccttggggacagccaagttttgttgataaacctatttcctagcatgccttcaggaagttgtgccagaccctagattgtgaaggacccactgttcttctgttgtacgagctccctgaaccattgttcagaggaccaatgtcacatcgcttcatgggcatggcccatggagcatctgggtgatatctgtctacagtattggctcttctgcgaggctgatacacaaggcctctcttccacatgatcatttgcaaacctcccccagcccctaccatccaatgtggaaggaaaacaagaactgcctgaagaagagtccaagctacagatacacagcgtgtgcattgcggctgtcaccttcctcctcccacttctgtatcctcagagatgctgcgtggatgtttccttaacctcagctgacttccctgtgaatgtctaatgctagttcagggcctccaggcattgatttgtacagtggtaactcccaatgaggcttctgttatcatttggtgtgctttctctgtcattaaaagaaatgattttccc

SEQ ID NO: 655 - DNA, 3734 bp, Homo sapiens
aaaaactagcatggagatcccctagaggtcggattttcaacataatctcagtgagcccaggactccaatgtgacaatgtggaactggaaagacgagcaagaaaagcccctccgttcccgccagcgttgggcattccttctgcagtccaggctgtccccgtcactcgggatcacagccaagcggtgggttctgtgtggtgcttggctcctagggcctcgcggaagccatgttcttctccattcagcttcatggagagactttcccaggtttcagcccacgctacgaagctagacaggagagtggcccccacccgccctgtttggaacccagctggggcatgcggtgtttggaacacatgggcagattggggagaggccagaagagcctcatccagagccaaggacaagccttgaggctgaagagctcaccaaggccactacaagagagcaaaaaaaagagcctcagagactcctcgataaataaccagaacagagagcaaaggtggagagcaggagggcaaggcactgagactttagaagcttccagggagaagaagagtcagatgcttgaagatgcctcctcaatgctgcaaagctctgagggaaagtggctttgatggagaattagagatccgggcaagttggtcctttctggaaaagctgcttggggatacactccagcaaaaagagaatccaccagcaaacaggaaggcatgagcagcccaggaagtatgaacacaaccaagggagggctgtggcagtatctgtcctgctgggccgcacctcggggctggaggtgggtagaggggaaagaaggggtaatggctggaaaagtgtcccatgctgacactaagccctggtagagaccacctgctacgggtcagcacatttcactgagcaggagatgcccctagaagacaagggatagaggtataaagaaagtcctctccctgactgcaaggagctagaggggagacaggcacaagaacaacactggaatggggacaatatcagccgcaaaggaagcagagagcagggctccggtggtcagccctgggtggggtcaggagtccacgagtgatgagggctaagtctgaaggccagaagggtgtcggcagccacggagagaacaagtacagttaaccctgggaaggcagaggccaggtggtctcaggaccacggtcaggaagagatgcctcacgtggcggggacacagcgggagcagttcaggcaccacggctcgtccactggggccccagcctctcactgcaagcagtgcaggtggacatctgccccagaggcagcagggagcgtgtgtcccaaagcccccagcactcatgccctgtgcaggcgccgagcagccggccctggccggggcggttccctcctaggcctgtccaggactcggcccccacaaacacatggaccgacagacgaaatccctcaggagtgtctctgcgccgacgccatggcacccacgaaaagtgccacacataaagtcagtctgcaaatgccaacgttacccagtcttcatgtcacatttcacctacagatcccttccgaattgtaacaatatctcataaatgtttgagcttcaaaggaaaggtcctttccgacgttcagatatatatactccgtggctgcctgcgagccgtctcccaggcgggtgtgtccttggtccgccttctgggaagtgtgcacaggcaaggaatcccatgtcagcctcaggacggcccagcggtcactctcacctcatcagtgacaggaaggtcttgatgagcaacttggccaaggccacacagctaaggtgtggcccaccaaccctgagccccactacttccacctgtcacagcttccagaaagttctctgcagtgaactgctatcaacccaattctgaccaactgtaattacactgtttccagataacaccttaattctgaggcagttaaaatgcattgtgtacatatactatgtgactctcatcaatagcaaaccaacgtcagttcagtccaggagaacccacccagggtgggcagctctagcctagggtgtcttcagtagcacctgcaaggctgtccttcccccgtcttgtcagggaatccagctctaccactggcgctgtaacagacacagggctgctggaaattccaggagtccagccccagctgcctgtggccgcccatggacggacctggccaggccccctgggagggggatttcaaagcatcaaggagccggcctggctgacgaggctccagaccagctgtttgccacacacgcccccgtactgcagggttgaccagtgagggcctcaatcttccgcagggaacgccgggccacaacgtcgacgcacgaccctgggggttcctgccataaaacagtgagggattctggccaggctgctctgccctctgttccggtgagcctgggcatggtgcccactcttgggttcggtttccttattgcgcacacagacagcagcaggcctgactgcaggaggcaccggcacccatgggcggccggcactgcccctacacaccaagaacatggcacccaggtcccgctgcttaggccggaaactcctgtcacataagcttttactcgtccagatttcagccattcctgggagtgacatctgtgctgaggggaagctcagtgtcagtgtcaggcatccccgaccacctcgggcagcctcggtcctcccaggagccgtcacggcccgagaacgccgctgcccagatgtgaaccgggtgtccaggatacgcaggctgcacagtggcgtgaatgaagggcagggctgaactccagggcctacggacaatcgctgcacagccgggccagtggctgaccctgcttcctcgctgtccactgggggtagtggcgttgtcaccaggaggtcagcaccgggcagggtgctacttcagcatctgctcaacgcagtaatcacactagggacccgagtccacacgtcaggaagacaggtgtgtcttcaactctgagccctgtgaaaatgccgctttccgctaacacactccggctcccacagcacagcagggcatgcccgacaccccaggacgcccgcggtatgcacgtctgtgtgcagtgagcacacccctagcacctacacacctcggtggcagcacatggaaacgcccaggcccgcggtgggaaggagccagccccaggacggatgcaaagtcaggttgaatgcagaggcctgtcgctggcagccggcctctccaggtctggcttcgaagcttccccgacagggcaggcgtttctgtgttctcctgatctgtacatctttactacatgtctgctgagacaatctgcctaagggtaagcctccctcagttcaatgtcttttaacaaggggagtttccacagaatacatttggttatgtgtttaattacaagtgtttcaatagctataaacattgtaaaattcagtatcaagtgaaatatttggagagcccctatggcaacttggaaaaaccctgggattctgaggaacagggagtagcgcacagtcccagtaaaatccagaactttctagaaggagataaatgcaggatgactgcctgcttgccctgggccagctcagccagaaaaccatgtccctgaaagatgggaaactggttccttgatacagcagaaaaacactgattctaccccaaatgacccgtctttattgcttgtttaattacctgtttaattatatcttcaccacctgc

SEQ ID NO: 656 - DNA, 5550 bp, Homo sapiens
aatttctcggaggctgttgggcagctttgcagatgagaagtgtatcagccccttaagggtttcgttcagatgagacgaggcgggagccttgagctgacagggctgcgtgggttcaggagagggagcagaaaactctcccgagccccccagcccccgccttgcacccttggctgctcccagaggctctccaatctgccagacttctctggatctagactttagaaggtgcagagagaggctaaacatatttttgactggtatgaacccattctactttcatgcagtaaatataattttacactgcttagtgactcttgtgctgatgtacacctgtgataaaactgtcttcaagaatcgtggacttgcttttgtaacggcattgctttttgctgtacatcctattcatactgaggcggtggctgggatcgttggcagagcggacgtgttagcgtgtctgctgtttctattggcctttctctcgtacaacaggagtctggatcagggctgtgttgggggaagtttcccttccacggtgtctcccttcttcttgctgctcagtttgtttctggggacctgtgcgatgctggtgaaagagacaggcatcacggtgtttggagtgtgcttggtttatgacctcttttccctttccaacaagcaagacaagtcgagcaatggggccctctgtccacgcagcccacagcagcccgggagcccccagccctcctcactgccaggccatcctcaccgggagaatgggaagcagcagcggttccctcacaaaggagcttggggtggctgccactctccactgccaccagaacccaagagcagtggattcccagtgtccccacgagctgtgtggtccatgatgaggtatctgagagcaagcagcaatagaaatttcctgcttaccatgagaccatttttaaaaagggccattttggtcctaagttatgtgcttgtcattttgtacttccgtctgtggataatgggaggatctatgcccctcttttcagagcaggataatccagcttcattttcgccttacattcttacgagattcctcacctattcctacctcttggccttcaatgtgtggcttctgcttgcacccgtgaccctgtgctatgactggcaggtcggcagtattcctctggtagagaccatatgggacatgcggaacttagccaccatctttctggcggttgtgatggccttattgagcctgcactgcttagcagcctttaagagactggagcacaaggaggttttagtcggcttgttgttcctggtgttcccgttcattccagccagcaacctcttcttcagggtgggttttgtggtggcggagagagtcctttacatgcctagcatgggctactgcatcctttttgtgcatggactgagcaagctctgcacttggctgaatcgatgtggggccaccaccctgattgtgtccactgtgttgctgctgttgcttttctcttggaaaactgtgaaacagaatgaaatttggctgtcaagagagtccctattcaggtctggagttcaaactctgccccacaatgccaaggttcactacaactatgccaatttcctgaaggaccaaggtcggaacaaggaagcgatctaccactacagaacagctctcaagttgtatccacgccatgcaagtgcgctcaacaaccttggaacactgacgagagacacagcagaggcaaagatgtactatcagagggctctccagctccatccacagcataaccgggctcttttcaatctggggaatctcctcaagtcccaggagaaaaaggaagaagctatcaccttactgaaggattccatcaaatatggtccagagtttgcagatgcatattcaagcttagcttcgttattggctgagcaggtaattgtttcacacagtagtttttttcaatgttattgttacatgtataaattaatgttacacagatttttgtactaatgatttaatttgtaaacccatattggacaaccaatctctatgtcagtttcttttggacagaaattacaagcctaattttctcactccaatattctctgtgtatcgcaggtcgcttttagacaaagatggtccgttattggccattgatatattctctctcactttggtacagaatctatcaagaacaatacatgatatttgatgtttttattaccacttacttgtaatatttttctgaggaattgcaagtggtctaagatcgctgaactcaacatggagcaatttgataatcctacaaattctgttttaacatctgttagaatattacagaggctcgtgagagaggctcctaagagaatagtttttatggcataaaacagagatgagttttcaatcccctccttcttttcagtcgtgtctaaatgatttgataccagttttcagagtcttagatgcatgacccctgctatggagaaacagatataagttgtcttctctctaaattgatgatatagttttgttgacacacatagtgcccttgatagacagtagattctgctaccatagaattaccagattatctttaaaactcaaactcaacatctctgcaacatgcccggcagcattcagttggcttaagggtaataagtgatttgatactgtatgtcagttttgtagggagcgatttgcatcagaaatttttggaggctccagcaagaagcaaaattaggtcattctatgaatatttaagtgacaaagaatataaacctagttgttttgccctttctccctgtaggataggcgggctttagattaaaaacctctgtctgtgttggatgattttaacgcatgctttagtatgaagtgtgagctaaaatggtgatggatgtgtctgtgctatacactggcagtcctcagctgcccttggcttgtgttgaaacagacacagaggctggcttcatcagtgttgcttcatctcacctcaccctggacccttccttttcataagcccctccccctgcctctgacaggctggttgttttgcagttactcagatgtgctaagtgtgcttctctctcacagcctttgcactaactgttcctgcagcacttctcttccagatagttatcttagagtttccaagatatttcatatcatgctggtttctgaccaaatgttactatatcagagaggtcttctgagatgaccctttgtaaataggaaccttccgcagcccatcatgttctctactaccatgtcctgccttactttccctatagtatttatcaccatctaaaacacatttatttgtttatggactttctgccaccgttagaatatttgactctatgagaacagctatgtgttttattcatctaagctcattttaaaaatgatcaagattttaatgatgttgaactttattttagttccttctgtagtatctttgcattcagccttactattaacaaattttgtagcagatggaagtttaaacaggataacgtatatactttttccttacttgtgtgtaagaagtgtcagatggcttatttaaaattgattacttgataaatttaatcttttgtgaactgcagtggcaaattgctatcaagttattgcattttacatagttgaagttgtgaacaattgttaagaacaacaaatgatgactaggatcattatcttttcttacacacaaaggtcccatcttttagcacttttctgttctagatgtgaatgtaaaatgatgtgagatctaagaatggaactgaaagattgaaaagttctttcttctgcccctttgggcatgaaaacaatgaagcagctgttgagcataactcaggactgccttcccctctctgactttcaacatcctatcttcatgtttttaactatttagtcataaaagagtgcatcagatgtgcaagcaagacacaaactgttagagaaaaacccacctagcttaacattttttggtagcaaatgaattcatttcttggttgcacaactttatttaacagcatcctggcatttcaaacacccagagtgtatgaaatcagtattgacaaaccttgggcaacatgtaacacacagtgaagccatccccttagtcaagcgacttgtcctccattgccaccatctgtccacatgcacagcccacgcggactgtggttgtgggtcagtgtcatgccaaaaagctctttcctacactcagctgaaatcagccattttgcaggcagtttttcagaagctggatgaaaggattcactctgtatttacatcagcctgacatattctgtatttatatcagcctgacatttctgattttctaggactttttagtttttttcctgccgtacagtgtattgactaccatttccagctctttcagttggcaaacttgataatagttttagttaaataactagtttgtgttttcgattttaaaaaatgttgtgaagatcagtattagttaggaagccctgcagcatatctgtagaaccttctttccaggttgacctttatcttatgccagactctttgggtaaacttattcaagcattcgttaatttgttgaattatattatcctctagctcacctttctcagtcttgtctacagagatgttttgagacacattttcagacacctgccaaaatccttcccctgatgtaaggctgcaaatctataatatcaaaaaaggaaactaggtttatttggtataccttgctcttattataagcatgctgctgtctgttgacatcatttcccatcctcagtgccaataaaaccatgaatgtaggatttgtcggaaactaatattgtgttccttactctgttgtaacctgaggggagaaatttaatctgttcgcgcaaagtaggggatttgacaaatttgaaaaatagattaatgagttgaaaagacattatatggtagaacatattaaggccataatggagcccaagttttacattgatagataataggaagtaacggtaaatatctgaggagagctttctaaaacatgtgaggaagaaaaccttgtggaaaacacatggtgtattttggaaaaggcttttctatgcattctggtgtgagtagttgagagccttgtttgcagaagaaagtgagggaatggatagaatatcgtggaaaaagaaagatttccacggtacatagggactgtcagcatgtaaaggttgaatggaaaagaaaaatagaaaattaagaactccaggtcagaacccctaagaaaatgagaagatttatggccactgatagacgtggataagccagacagaagcaatattttaggaaagaaataagatgagtgtcaacattgtttccagttaaacaagtaatataaatatataaaggaaactgtgaaaactcagagaaaataacgtatacatcctttattcataatataatacctggagacaacaaatattatcattctttaatattatgcatctcttttaaatatatttatgtgttccatactaatatttatacactgtttgtatcctgtttttttcacttgccattaaattatacatact

SEQ ID NO: 657 - DNA, 4038 bp, Homo sapiens
cttagccaggcattgtggcgtgtgcctgtattcccaggtactcaggaggctgagacaggagaattgcttgaacccgggaggcagaggttgccgtgagccgagatcacgccactccactccagcctgagcgacagagcaagactgtatctcaaaaaaaagatgtgaaagtagagattttaccctgatttctaacatctcaaggtttctccacatatttaagaaagtattataaattttcaagccagtgcagtataatagtttcagatgaaatgaaggggttaaataacagattaccataactccttaaataaataatagattaccataactccaaatggagagaaagtatggtttttttctctcttacggaaagttcatggtctttatgaaaaatccaaccagaagccttttcacacaggtgcgacacatgattgcagatgggatgattcacctgtgcatctatgctgtgtctgccatcaccaaggatgctgaggtcaccatagcatttgattatgagtatagtaactgtaattataaagtggactgtgcctgtcacaagggaaaccggaattgtcctatacaaaaaaggaatcctaatgctacagaactgccactcctaccacctcctccaagcctacccaccattggagcagagactagacgtagaaaagcacgacggaaagagctagagatggagcagcagaatgaggcttcagaggagaataatgaccagcaatcacaagaagttccagaaaaagtaactgtatccagtgatcatgaggaagtagacaatccagaagaaaaaccagaagaagagaaagaagaggttatagatgaccaggagaacctagctcatagcaggaggaccagggaagatagaaaggtagaagccatcatgcatgcttttgaaaacttagagaaaagaaagaagcggcgggatcagcccttggaacagagcaactctgatgtagagattactacaaccacctcagagactcctgttggtgaagagacaaaaactgaagcccctgaatctgaagttagcaactctgtttcaaatgttaccatcccaagcaccccacagagtgttggtgtgaatacccggaggtcttcccaagcaggggatattgctgcagaaaaactagtccccaagccacctccagcaaagccttctaggccccggccgaagagtcgaatttctcggtacaggaccagttcagcccaaagactaaagcgtcagaagcaggccaatgcacagcaggcagaattgtcacaagctgccttggaagagggaggaagtaacagtttagtaactcctactgaagctggaagtctagacagttcaggagaaaacaggccattaacagggtctgacccaactgtggtgtcaattactggatcccatgtcaaccgtgctgcatctaaataccccaaaaccaaaaagtatctagttacagaatggttgaatgacaaagcagagaagcaagagtgccctgttgagtgccctttacgtatcacaacggatccaactgtactggcaacgaccctaaacatgttaccaggtcttatccattccccgttaatttgcaccacccccaaacactacattcgctttggctcaccctttatccctgagagacgtcgaaggccccttctgcctgatggcacattcagctcctgtaagaagcgctggataaaacaagccttagaagaagggatgactcaaacatcatctgtaccccaagagactagaactcagcacctataccaaagcaatgagaatagtagctcttctagtatctgcaaagacaatgcagacttgttgagcccattaaagaaatggaagtctcgctatctgatggagcagaatgtcaccaagttacttcggcctctgtctccagtcacaccaccccctcccaattcaggctcaaagagtccccagctggccacacctggctcatctcacccaggagaagaggagtgtcgaaatggatacagcctcatgttttcaccagtcacatctcttactactgctagtcgctgcaacactcctctacagtttgagctttgtcaccgaaaagacctggatttggcaaaagtaggataccttgactccaacactaacagctgtgctgatagaccttccctactcaactcaggtcattctgacctggctcctcatccctccctcggacccacttctgagactggtttcccaagcagaagtggagatggacatcagaccctcgtgagaaactcagaccaggcatttcggacagagttcaacttgatgtatgcctactcccctttgaatgctatgcctcgagcagatggactgtatcgaggatctcctctagtgggggataggaagcctttacatttggatgggggatattgttcccctgcagaaggattttccagcagatatgaacatggcttaatgaaagacctctctcgtggatccttgtcacctggtggtgaaagggcctgtgaaggagtcccatctgccccccagaacccaccacagaggaaaaaagtatccctgctggagtaccgaaaacggaaacaagaagctaaggaaaattctgctggtgggggaggtgactctgcacagagcaaaagcaagtctgcaggagctgggcaaggcagcagtaactccgtttccgacactggtgcccatggtgtgcagggatcctcagcccgaactccatcttcccctcacaaaaaattctccccatctcattcctctatgtcccatttggaggcggtaagcccatcagattccagaggcacttcttcatctcactgcagacctcaagagaatatcagcagtaggtggatggttcccacatcagtagaacgactccgagaaggagggagcatccccaaggtcctccgaagcagcgtgagggtggcccaaaagggagagccctctcccacatgggagagtaacatcacagagaaagactcagaccctgcagatggagaaggcccagagacattaagctcagcactctctaaaggagcaacagtttacagcccttccagatacagctaccagctcctgcagtgtgatagtcctcggacagaatcacaaagcctccttcagcagagttcctcccccttcagaggacatcctacacagtctccaggatacagttatcgaactactgcactgagacctggaaaccccccctctcacggttcttcagaatcatccctctcttccacgtcctattccagccccgcccaccctgtgtccatagactcgttggccccatttacggggacaccagggtattttagcagccagccacattctggaaacagcactggcagcaatcttccaaggaggagctgcccttctagtgctgctagccctaccctgcagggaccctcagactcgccaacctcagattcagtttctcagtccagcacaggaactctgagttccacctcctttcctcagaactctaggtcgtcattgccatcagacttacggactatcagtctgcccagtgctgggcagtcagctgtctaccaggcctccagggtatctgcggtttccaattcacagcactacccacaccgtgggagtgggggtgtgcaccagtaccgactccagccactgcaagggtcaggagtcaagactcagacgggactttcctagggcttctggatttgggcaaacagaactgaatgagcccatagctgcttccttccagctgcctctggaacctaggccgagcatattgctgaggaacggggggtacaaggtgccagaggattgggtctggtggacaagaaacaagacttgtggtcacaattggcctctggccttggagaaagctgtaaatcttgtctgaagcagagactataaagaagtttctccctgctgtcaagggtacattgttgacaagcaaatggtgtttcggttagtaacggttctaagtgcaatgagttgtgttgaagcctccgtctcccatccttgcctgtagcccgtagtcacttgtgcagtgaggacatctttttaaattt

SEQ ID NO: 658 - DNA, 5758 bp, Homo sapiens
atccgatgatgaaattctaacactttgcacaagttccagaaaaagaaacaaacccaaatgggatttggatgatgaaatcctgcagttggaaacacctcctaaataccacacgcagattgattatgtccactgtcttgtaccagacctccttcagatcaataacaacccatgttactggggagtgatggataaatacgcagccgaagcactactggaaggaaaaccagagggtacctttttacttcgagactcagcacaggaagactatttattctctgttagttttagacgctatagtcgttctcttcatgctagaattgaacagtggaatcacaactttagctttgatgcacatgacccctgtgtcttccattctcctgacattactgggctcctagaacattataaggacccaagcgcctgtatgttctttgaaccacttctatccactcccttaattcggactttccctttttccctgcagcatatatgcagaacagttatttgtaactgtacaacttatgatggcatcgatgcccttccaattccttcttctatgaaattatatctgaaggaatatcattataaatcaaaagttagagtactcaggattgatgcaccagaacagcaatgctagtaacaggatgggaacatgggaatgataatatatatttttccttttaatattttatttttctttttatgccactttggatttttctacaaaggcagtggtgtccaaaataaaatctctgccctaaattttactaataaatccatttttctagtgatacacaaattgtttaaggttatacactcgagcttaaatagatatttttaaccaggtgtttggtttttgtttttaccgtgtaggttgtatacttacattttttctttccttaatttatacatgatcctttttccttaatttatacatgatccaggcacatttgaaatttggtaggcattgcaaacacatttgaatattgtgtatttcatactattctttaaaagtaatcttatgtcctttcctacatgtaaaatattttgttaatctatgccattagtagtattatatataaaatatagttccccgtcccccttttcattgagtttgatattcttcagtaaagctgaatgttgtaattcaccattcatactaatgttattgacttttgtaacttactaatagggatgttaaaagtaacaaaaccaagtcaaacttggtgtatttttattttaaatattaactctaaagcaggattactaaatttgattaatctggtcaatgagaatcaaatggaaacatatcattctggaggtgcacttactcttctacaatgtggccggatcatttgtcattcctgaataggtctttctctcaacctgcaagagctaaaccatcttcaaaacataaatcttgttcctttctcattggaagctttgaaaataatgataacactattagtagctagtagttactaaagtgctaaagtaattgtggggtttttctgtattagcttatgaactgttgcttctacttagcccttttatagaaactctgagctgttactttggggaaattccacaatgtattagcagccacaaatttccactggtaaccaaagagtacctaagtagtttttcattattttaagttgaatttgaataaagattccagaaataaacatggagctcagtattcaggaagcttaatactgtttttgatctacaagatccaaataattatccctatcttcagaattaacttagtctgtaatgtggcttcaaaaaaagaaagccttttgacagctacatgacttacaccatacagaacagtactggacaaaaggggtgatattttaaatttactatcccaggaacagggcaacgtttttagaaacatctttagcccaaagtaactagtaaaaataaatggagtggtatcctatcttctttttttaaggaatcaatgaataataaatgtagatagacaattttcttctggtgagctgtctaaccctttgtacacattgacatttttaatatcgtaactgatttcttgatgctagtttagctatattaggaaactgcttctacctagattgaaagaaatttgactcataaacttccaagttagaacaaatatttcttcattattgttgcttttatgtgagtagcatttccctatcttgcagttctgttaacatgaaaatggcatttttccataatagctttaaaataattttttagtaattattacaaaattaaggaaaatctctattaccgttatcttttagcattttttttttcctcagtgatctcgagattgtcttagtctcaatgagatgtagctacaaaaatggcacctcttagcagtgatgaggctcaggatatcggacatcataacaccaatgtcaggataaatatctcttctaaagacgatatttaccttttacaaggttagaaaagtctcatactacctcatctttattgtggcgcttttgtagatcactgagaagcttatcttattaaccaatataccacttcctaaatatccatctttggtgaaagaaaatagtgtggtaagagtacccatgattatagttttttatcagaatttgataagattttctgtttctgtgaaacaattattttaaatatttttcttttaaaaataactttttatcagtacagaaaaacctaagggatgactagcttacaaatattctgttaaggggtagttttataaagaaaaatgatatatagttatgttgtcttttatagtgttaaaattagtatttatatgaaagtcaagatctaagtaccttttcatataattcaaactgattgcttgtgatatgttttctctggcttttttattttttcaacttcaaggtattaacagctgttaacacttaaaaagtactgccacatatgtagccttgaagtagttgatctaataaatgagagcagggaggagattcattgactctgaaatgatttttatttttcctttggtatttgctacagtgaaaagaagtttggaaagtagatacataaagacttgagaagggaattgtttaagggaaaagaaaagagtaataatttttttaaaacattaaggaattggaattcagaaaggttacccccttcctctgtgtctttgtaaggatacatttggaagaacatacagtattcagaaactaacctatataaaatgtaaacaatatattgattgcactatataaatgagtaaattttgagaggaacaatgtgggaatgtataaatttgtctaaaattttataactgttgaacaaagggaagatttgaacagtgtaaattccagagttgagaaagcatttagcatggtggaaatgtggagagcttattggtgagagaggatggagctaagagaaataagatcaaatattaaaattaggaatttaggcattacctcagggaaaagccttgacagtgaaaagaaactacttaatcgctaatagctagtctggaccagacacttaactgcgctttgggaatcatcctgggctaatcaggaaataaacttgacttttctatttttctctgaggctttacaggacatactcccactcccatttttttctaagcctacagcatcttgattcatagtataattcctgaagtatgctgaatggactttttaaggttcctttagcatttttgtatagagttatatgtgatctttctataaccatgccattcacttaaataattcatgaagggaatggtttaatttaaaggaagacctaataggaagaagattaaaggaagcttttagtcagcctgtggctagatttattgatttggtgatcaaacctgtgctatttcctgaatttcagctaatggccaactgtggtcaaagaatggctttcagttaaagttttgacttcttattataaataatataaagaatgtctcagtaattagaaatcccttaataagtagaacaaatgtggcaagtaggactcctatcggtatacaaattccatttctttttataagaaaaacacataaaccattatcatttattcatgagccaaagccattaagaagataaatccagttatcagcttcctgtctctgaagtttggatcattttatagatccacgcaatagagagcttccttcctatgaaacaaaaaccttgagatctctttttttttgagacagagtctcgctgttgtcagcccaggctggagtgcaatggcgcaatctcggttcactgcaacctctgccttccaggttccagcaattctcctacctcagctcccaagtagctgagatgacaggcgtgtgccaccacgcccagctaatttttgtatttttagtagcgatggtgtttcactacattggccaggctggtctcgaactcctgacctcaggtgaccacccgcctcagcctcccaaagtgctgggattacaggcatgagccactgtgcccggccaagatctaactcacgcttacttttcattaaaatatttcttgtcgcttttagctattgtcagaatccaataaacagcttacgcattcattttggtaaagcaaatttcacaggaaaatagacaaaattataagagattcctggagacaacacaaggaaaacaatgtttaaaagcaaaatagcctgtgtaatgttaggtaatgtaatgcccaagtgaataaaagatttttcgtcaagcaaactactgtttctactttgggggaagaaagtcagttttacatttgtaatttaaggaaagaacagaaagcacaaaggtttttcttttctttattaatggcctactagaaatgagcagtgcaagagtctacctgtactattctaatacagtaagatattggacacaaaatggaggtaaccttttaaaatagattggcttggaagttgaaatgtagattaatggatataacccaatagaaagggattttcaaataaaaccaaagtctatttttttatttactttctaattttgaacagatgactcagtcctaaatctttgcctttatttcctataaaatgtaggtgatacttgtaactcgacttcctggagttaattcttcagcaagaggtgaccctgggagcgtactttaaaataattgctgtacagccattgagtactaacatgatgataggttttcaaaatatctttgtagtggatgctgcataattacattcacttctcttagactgtaaaagactttcttgacttgttttaacagtagagatagcagtacaatttgaatttatggtttaggctctgcaattagaggaacaattgcagtttcctcctacccttcatatggtctgtgtaaaactgatgtttgcttaacttattttaaaagttgattacgttttcagaaaataaagataatcacttttgccatggttataatcaaatctaagctttcagacttgagagccatggtgtaaaactcaaggaggtttatttaaattatgctgactttgctagaattggataaattctgtataagccaagtatgagttcacatgtactcgaatatacagttttcacaaagctattactctcatcagtcaggcttgtatgatctattccttaccacaaaagaagtagacaattgccacttttatttctaatccttaagttgaatgtttcttcttggatgtaagttcaaataaattgatctggataaattttcatttctacttaattaaaacttcctatgtaaaatcc

SEQ ID NO: 659 - DNA, 3450 bp, Homo sapiens
aaagggaattccagccgaggtccggggccagtaggtcagggctgacttctcttaaaaaccctattttcttgttattaaaataaatcattgtagaaaataaaatacagatgaatgaaaaaaataacataacagtagttaattatacctgtagtcccatcacctgagaaaaccccaaatcacatttttggtgtatatcccccaatttattttccatgcctatacacactacatgatattttctaaatggaagcagactccatcatttcaccctggcaggcgggtatctggcacacagcctggccatcatgaccgatgcagcccacttgctggcggatgtgggcagcatgatgggcagcctcttctccctctggctctccacccgtccagccacccgcaccatgacctttggctggcaccgttcaggtaaggcccctgcatggcccagtgactctccaatcttgccagagggcacccgtcagggtcccaagcaggtctctgacagcttgtctccccccccacccgcagagactctgggggctttggcctctgtggtctccctctggatggtcactggcatcctcctgtacctggccttcgtccgcctgctgcacagcgactaccacatcgaggggggtgccatgctgctgaccgccagcatcgcagtctgtgccaacctgttgtacgtcccagtatggagcaggcaccttgtggggcccagggcgaggggtcttcctccaggatgggagagctggctctctcctccccaccagacacacagacacgcacacacagctctccatgggctgccctgcgtgtgcctgagaagggtctgggatagagacctaaaattcagtcagcagatctctgtcaagggcctgccatgggccagccactctgatgagggctttcatcaacatgattgcatttaaacctcacagccaccccatgaggtaggtagcattacccctagtttaccattaatgcagtcaatcccaacaggtgacttgcccaagtcacatatctatttaagtaacagggccagcttccgaatccacatgtgtggcaccaagtctggtattctttcccccaggctgcattgtttatctctcttgcaaaatgctgttttcttccaggggctgggaaagggctactggggaggtgagacatggagatgggggtataggaggccaggagcagggccctaggctgaggtgctctgcttacccctcagaatggcctttgtgctgcaccaggctgggcccccccacagccacgggtctaggggagcagagtatgcaccgctggaggaggggcctgaagagcccctgcccctggggaacaccagcgtccgggcggcatttgtgcacgtgctgggggacctcctgcagagctttggggtactggctgcctccatcctcatctacttcaagcctcaatacaaggcagccgaccccatcagcaccttcctcttctccatctgtgcccttggatccaccgctcccaccctccgagacgttcttcgaatcctcatggaaggtaccccccgcaatgtggggttcgaacctgtgcgggatacgctgttgtcggtgccaggagtccgggcaacccatgagctgcacctgtgggcccttacgctcacttaccatgttgcctctgcacacctggccatcgactccaccgctgaccctgaagccgtcctggctgaagcctcatcccggctctactcccggtttggattctccagctgcaccctgcaggtcgagcagtatcagccggagatggcccagtgcctgcgctgccaggaacccccccaagcctgagccatggccctgccctcaccccactgccaggccgaggctcagccccagactctcagcatctgctgccctgatcacagagacgggaccgagccaggtccataccccttcctctctccctcctaccacctgccagtttccccagcctcagccccagccccagccccagtgggcaagaccaaagtgtggcggggagtggggtgggagtcaggggaatagatgtgactagttcaggggcggggactcccaggcctcagtgtggcagggtgtgttgaaggcctgtggtgccatctccccatggttcatgtggagccacgaacatcctttccctgcagtccatttgtctgtgtggcaggctggctggctgggggcatctgcctgtctatgtgctgttggtgtgcctatgcctgggggaggtcagtaggggccccctccccacatggccctcgctctgtctatgcaggggccccaaagcccgcactttgtccgtgtgtcttagccctgtggttttgtctgtgtgtgtgtgtgtgtgtgtgtgtgtgtgtgtgtgtgtgtgttcttggtgctgtggcctgtgtgtctctgtgcctatgtggctgtgctatggtttctatgagtctgctccatccatgtgtctgtttgggggtctatctctccatccctctgttggtgctgtgcccttggctatccctgaaagagggaggactccgctgcagctccaccaataaacttgtgtctcactgcatctttcagcctgtgtgctgactcctcaggagggggaagtcaaataggtcacttgagaacaacagaatccctcctgtcccttcccagcctctggagtgacctcccacagacctcctgtcccttcccagcccctccaccctcagatggagggtaaaagccaccagtctctttactccccttcccctggctcacagcatgcctgggtccttggctcagggacagtcccatgtgccctgggcttggttgcaggagaatgctggaaggtaaggagccaaggaatccctgggagtcagtcgttctcagaggtccctgcatgccagtgggcctcaggctggctggagggaggctgggtccctttgagggagaatggctagaccatagcactgatgtgggcttggttctcaggccatctaaggtgtccagcggtagggacccctcaaccctgatagcagccaaccctgagtccaggtttaggctgtgaacaccaaggacctcttttacacctattccccctttgtcttaagaactgcatattttgacacattaagtcttaaaatcaggctcattaagggattgttgattttctctttaaaaaaaatcaaactcaagctggacatagtggcctgtgcctgtaatctcagccctttggaggctgaggcaggaggattgtttgagcccaggagttcaagaccagcctgggcaacctagggaaacccctgtctctacaaataatttaaaaattagctgggtgtggtggtgcatacctgtagtcccagctattcaggaggctgaggcaggaggattgcctgagcccaggaggtcaaggcagcagtcagccatgatcatgccactgcacttcagcctgggcaacagagcaagaccttgtctc

SEQ ID NO: 660 - DNA, 5233 bp, Homo sapiens
ctcaggagcacaggcacccacaacctgtcactgggccatgcaccccagggcccaggcagagctgccacctcgctgtctccaagccgaccttgcctggcgctagctctggagcctgctgcagtccccatcctgtcctacctgcccagtgtgcgcccattccacatactgctcttgttggcagggtgggctgtggtcctgctgggagggacctgggagcttcaaggcaggctagggcaggctgaatctagaggagggaagggagggaggaagcaaggtataagaaaaaaactgcttctctctactctcacaccactcacctctggtcaccaaataaagtggggatgtttctccccaccaacaaaatctataaatggaaaggttttccctgagttctacgagcgatccttgcaaattagttaaacccgaggagggaaacacggttactggtttattatacaggatcttatcaaggatagggaggaacagccaggtgaggagaggcacagggcagggcatgtgggaaagggtgggcacctctctgccgtctctggggcactgcccttcaggggcctctgcatggtccaccctccagaagctccaaaccctaaccttttcggtttctatggaggcttcgttatgaagggcatgatcgattacatcactggctgttggtgattaactcaaccttcagcctctccgcccttgtaggtcagtgtgtgggactgaaagttccaaccctttaatcacagggttggttcccctggcaaccagccccatcctgaagctatccaggagctcaagagtcacctcgttccagcaaaggatgctcctatcacccaggaaatcccaggggctttaggatctctgcatcagatgctgctgtcactcagaaaggtacaaaggtcttaggagctctgcctcaggaaccagggggcagagtccaaatatgtatttccgaccatatcacaatatcacacaaggtagtcctggcccagagcctgccaagtgccaggcaataggacacacattctctcgtgcagtccttcccacaaactcgggagacaggtataactctccccattttactaaatgaggaactgagctcagaagttctgtgctttacgccaagtctcagcactggcccatggtggagctgggcccatacccttcccctggtcttgctggtccctgagcagctgcctgcagccctccggggacaaggggtctctggaagagggtggccgcagtctggcagtctacctttctgtctgagggggcttggttcctgattttcttctcttctttgcttggcttgtctaactcgcaggtttttggggcttttgggtaatgattgggtctgagtaccacgtttaccccatgcccctgctgagtgaagctgtgaatgccccagggctggggggcaggagaccagagtacagtctggaatcttgaatttatttgctaagcggcctcagatagaccgttcccttctctgggattcatgtacatatctgtgcaatgggaggctcaggaactttggaaggccttgcaccccacggtgaatgtaacagtcccatggcccacccaggactaaaaggcttttggtttttaatcttttttttcctcgaatttttttattgtgttaaaacatacatgacgtaaaatttaccaccttaacttttttttttttttttttttttttgagacagtgttttactcttgttgctcaggctggagtacaatggtacgatctcagctcactgcaacctctgcctcccaggttcaagtgattctccagcctcagcctcccaagtagctgagattacaggcatgcaccaccatgcctggctaattttgtgtttttagtagagacgtggtttctctatgttggtcaggctggtcttgaactccggacctcaggtgatccacccatctcggcctcccaaagtactgggattacaggcgtgagccaccacacccggccagccttaaccattttttaagggtacggtttagtggtattaaatacatccttcgtgtgcaaccctcaccatcctcccactccagaactcttagttgttgtaaaactggaactctgtacccactaaacaacagcaaccactgttctactgcctgtctctacgattttgactactctaggtaccacatataagtggaatcctagagtacttgtgtttttgcggccacagggttttatttattttcttttctccacctccagaatccccgcgttctgctcctggctggttttgcttctcctgggtcgtggggtgctatttgcatgtgggtgaggagccctctccccatccatcctgcttgtgttttcctcctgggtgctaactggcctctacctttgtctctgtctcctctgcctctgctcttggttagctgacggtagggaaagtgtccagcggaataggggctgcagctgaagtcctggtcaatctgtacatgaatgatcacagacctaaggcccaggccacctctccagacctggtaaggacatgcacccccagccttcacccacagacactggctctggcatcccagggcgggcacatgggatgtcgagaggatgccctggccctcccgaggctcctcttctcttggagcaagagggggctgagaatgagctgaatcagggcagaagttaaaaggagcctgcttttccttaaagacagatctcactcaggtcccctgtggtctttttgaaaatagagatcttcctgctctctgtggctttggagaacggcctggtagaaaggcccaggtgaggccgtgagcataattgaatggccctcactttcagtgtttagtgtccaacctgaacagactctgtgcattggattgagaaaaaggtcatggggaaaatagccctttgattcgaattctccctttctctaaactgggctgctcgctgccatcaccaggaattttggttgaccattctttctgtttccttttggcccattgccctggaatcgcccaggggtactgctgccctggcccgtgccctcccaattcacaactaggactataactgaccagatttgatgccacaagctttcctcacccaacctgtgccactgcaggggaacaggacacctaaaacatcctcagcgggccagtttcaggacctttgtccagaaccaggtgacacttaatcccaaggacagatcctggaaagaatatcctggggtggacagggttgtgagtaaagcccactccgtcagaccaggatcactcccaccccaaaaccagagcagccaacctcggggagagcccctcccgggcccaccttgttgtctcgggcctgtctgggagtacagttaacagaagcccctgcagggttggggtctgggttgggggtgtatcttcctacccctccctctttgctgcagtggcagtagcaggaagcagaagcccacgaggtccccagcattcagtgtggaatttctaaaagccttggcctggcatttgaaggctcgggataagccataatacacccactcttctctcccgatccccaggaatctatgcgaaagtcatttccccttaacctgggaggcagcgacacgtgttacttctgtaagaaacgtgtgtacgtgatggaacggctgagcgccgagggccacttcttccaccgggagtgtttccgctgcagcatctgtgccaccaccttgcgcctggccgcctacacctttgactgcgatgaaggcaaattttactgcaagcctcacttcattcactgtaaaaccaatagcaaacaacggaagagacgggcagagttgaagcaacaaagagaggaggaggcaacatggcaagagcaggaagcccctcggagagacactcccaccgaaagttcttgcgcagtggccgccattggcaccctggaaggcagccccccagttcatttcagccttccagtgctacacccacttcttggctgacacacttctgctctaaggtgactggttttcttgccaattttcaaagagtggtactaacccccaacccgctttccgcaccccgtcctctccgccagcagtactggttgcactaactgtgagtgtcttgcatactgatggactcatttggtggcatggttggctaacagcatggcggggggtgttcagcttgagacccatgcctgtgttcatttcccatggagctggcagcctggtctaccccaagtgcatgccccgcctctcctctctcccttgggtctgcctgcgtgcatgcttctccagttgcgtctgcgaagctacctactttcttgggagggtcgaccttgatcatgaaacaataccatgagggggcctctgtcacctttgaaaagaacactttttgagcagcctcaaaaagctcatacataccagcaccttcttaaattggctctaatgtaaagattgttaatgtcatttatcaaaaccataggtgattatttggagggatttaaaaaacttaattactctcaggcctcatcccaagcttgacacatgctctgtaggttgaacacataatcacaaatattctagcaaatgctgccttggttgcagcctgcactgtagacccaagggttttgctgtggctcttcttatctcccttggctcataaagcccctgatgatgccagagcttcaattagagccatcatcatcccaggcagggatatctttgagaaatgactcagttcagccccaggcccctgtgactctgcttaaagcacacatttctgctgactcttgtacctggggcagcaggataatcaccaacacactcttaacgagaaacaacacaccaagcacagtggagctgtcctaggcaacactcgcggtctcaggctgcggtgggcgtctgtcctgcatgtggcccagaccaccctgacccccgggcctgcctgcctggccctgcatgctgcacgctcactgtatttgtgcagatcctggccagtacaaagtcgttgctcttgtcttatcttctcttacagagtctccctccctttatagaatgtcaaccaaagagtgccctcctcccctctcagcctcctctttagctagcctccccatctcatcacaacgcatgtctgtgacctttggtaatcatttacagtgccacacggaaccctgtattttgcacacagcaaaacaaacaatgtttagctttatttatggtatttgatgctgtaaatggaaataaatattgttctttat

SEQ ID NO: 661 - DNA, 3901 bp, Homo sapiens
tcagtctcgccggcggcccccgctcccggatccccagcgccctggccaagaagcttcctcggctccccctcttccctctccctgacacggttgtgcagagggcgcggtggctcagatacaggatttcgacatattggccggtttgctctcgagctcctgggctcaagcgatctgcccgctttagcctcccaaagtgatgggattacaggcgtgagccaccgtgcctggccataatttttaaaaatgtctagtcagatggcgagtaacccatgggccaggtagcgttctatgccaaccttgaatgccatcaggaagtcactggacagcaaactcttccaagatcataacatggctgttggagcaacctggaaaagaagaaaaaaagaaaaaccatggcaaaagtaaatagagctcggtctacctcccctccagatggaggctggggctggatgattgtggctggctgtttccttgttaccatctgcacacgggcagtcacaagatgtatctcaattttttttgtggagttccagacatacttcactcaggattacgcacaaacggcatggatccattccattgtagattgtgtgaccatgctctgtgctccacttgggagtgttgtcagtaaccatttatcctgtcaagtgggaatcatgctgggtggcttgcttgcatctactggactcatcctgagctcatttgccacgagtctgaagcatctctacctcactctgggagttcttacaggtcttggatttgcactttgttactctccagctattgccatggttggcaagtacttcagcagacggaaagcccttgcttatggtatcgccatgtcaggaagtggcattggcaccttcatcctggctcctgtggttcagctccttattgaacagttttcctggcggggagccttactcattcttgggggctttgtcttgaatctctgtgtatgtggtgccttgatgaggccaattactcttaaagaggaccacacaactccagagcagaaccatgtgtgtagaactcagaaagaagacattaagcgggtgtctccctattcatctttgaccaaagaatgggcacagacttgcctctgttgctgtttgcagcaagagtacagttttttactcatgtcagactttgttgtgttagccgtctccgttctgtttatggcttatggctgcagccctctctttgtgtacttggtgccttatgctttgagtgttggagtgagtcatcagcaagctgcttttcttatgtccatacttggagtgattgacattattggcaataccacatttggatggctgaccgacagaaggtgtctgaagaattaccagtatgtttgctacctctttgccgtgggaatggatgggctctgctatctctgcctcccaatgcttcaaagtctccctctgctcgtgcctttctcttgtacctttggctactttgatggtgcctatgtgactttgatcccagtagtgaccacagagatagtggggaccacctctttgtcatcagcgcttggtgtggtatacttccttcacgcagtgccatacttggtgagcccacccatcgcaggacggctggtagataccaccggcagctacactgcagcattcctcctctgtggattttcaatgatatttagttctgtgttgcttggctttgctagacttataaagagaatgagaaaaacccagttgcagttcattgccaaagaatctgatcctaagctgcagctatggaccaatggatcagtggcttattctgtggcaagagaattagatcagaaacatggggagcctgtggctacagcagtgcctggctacagcctcacatgaccaaaggccttgagccccagaatcttcaggtttgagagaggtggggccaccagattcttcatgtttctgaaactttttattttggcagaaggattgccttccaaggaaattattattattgttttgttaacatattaatatttataagggaaaacagcacataataaggaaagctggactagcccagagccttctcatttgggatttgtgctcataactgaactcgtatcttttggtcaatgggcatagctctgtaagaaatgtaaggacacagctgatataattagctgtaattagggataatttcaaagcataaccaaagcagatgacactgggcagcagctttgttccagtctcaggcccttcatgttccctcctcagaaagaaaatggaaacattaacgtgtagctttgcttaccttgttctggttagagaagggaggtcagcttgggtgtggtggtgaagagtgaagatgccatactttttcatggtggagtttctcattagggttttacttgggattgttaaagaatacttgagattcttcaaaaagtggtgattaatatagaaagaaactcttattttttttttctcttagtcttccagccagcccttgcctctgcccaagggtagacaccactatgagaatccaaataatcatggaatgccatggttggaatagatcttaaagggcatctggtaagatccatttgaaattgtccactggaaaccgaaagctcttttcctaagactgggttccaggctctcacatttgttaccatcacatataatacttactctaaatttagcagaacacacttagtcacaaggacaacctctcaatcttacctgaaatgtcaacaacaccaaaacttcccgtcttttaccttcagagaagaagctcttacttagactgcagacgcattcctgttaggttggaaaaatgttggcagtattccaattgggcaggaactgaattcttgaatcagcaggtctctggtgagagttttctttgcagatcagacatttagttttatcattacccaaaagaggattggagggagtcagttgtctgaaaaatattatcctagagatattctaaaggtgagattcctttctccctgtgttaattcttgttccactatccactgctcttcatctctttatagataataattagaaatctactcattggattataagtttattcattctcaaatactccacttttctatggtttgggataatttctgagtcttcagattgaagagggaaggcatggagggaagaaaaagtccagatcccccagcttgtttccaaccattttaagtccaaagaattataatcctgaatctcacagtgtgtcacacctgtaataggagtaaattatgcaatcaattttaattaccaggagtttaaaatccaaatgtcaaggaactgttttgaccctgaaggctatttaatccactgtcccctacaaggcctcacaagtgctgggggaaaaaaaacagcaatgaggatgatcctgagttaatgtgtatgctccgcaagagagcttgcctataccttgattatttcataaaatcacatgttaatacattgctttcagaatgaaatactgacttgatctgataggagaaaatggtaatatttcatagttgttttccaaagacaaatttaaatgttgtctgttatctccttacttagtttaagaatttagttttgaaccccattgactttgtcatttgcaattttaaaaatatttgggactgggcatggtcgctcacgcctgtaatcccagcactttgggaggctgaggcgggtggatcatgaggtcaggagatcaagaccatcctggctaacatcgtgaaactccgtctctactaaaaatgcagaaaattagccaggcgtggtggcgggcgcctgtagtcccagctactcatgaggctgaggccggacaatcgcttggacccaggaggtggaggttgcagtgagccaaaatcgtgccactgcactccaccctgggcgacagagcaagactccatctc

SEQ ID NO: 662 - DNA, 4289 bp, Homo sapiens
attcaatagatgcgcccagcattcagattgccttttctctcaaccaggatctttaaagtcgatgacaagagttccagtcctgaatcatggcaaagtgcagtagtgaactgcggggttattctggaaggatctctctatggctgatggtctcagttccggcatcagcctctgactgagaatcaggtctcacacaggaggagtcagatgaggagcaatcctctgcttccgatggagttagttgtgatgaattggtgaggtctggtttttcacactgaactaaaatgagctttcgctgtgtcaagcacaagactgaccccagagacacacatagtgcacctcatagaagcttttaatagtctttatatttactaaagaataggactaactatggaactatgaagatgagctggaaatgacaggtgacttgccagcaggccagagtgtgacttttttttgtccctcaatgggaggtgtcaattctcccttcggttgtgagaatcagttggttcatttgtgggaaggttgcaggggggatctttgaatcacagccttcagatgccagaagggcagagggaatcccacacgggctggtggatcatgtgtgtgcatttctctcccttctaatctgaggaaactaagcgtgaaagaatgtgagcatgcagaaaaggagaggcaggtatcagaggcagaggaaaatgggaaattggatatgaaagaaatacacacctacaagtgagttcagaaactgaaccccaccctcctgggaaacgcccattggagtgttgtttttaacctttgtacagtatttagacccagtaaatgcagaaatagaaacaaacggtcagaagacatatcgtgagagagagcgagagagagttcacaaaacagaaaacaaagtaccttaatatttaccagtgaccaaaagatgtgaagtagcaaaacgtctcctgaccccattgccagctagactgtgtggaaactcggttcataccagccattctaggggtggggtgagttgttgtcatccttaggaaagtgtgttgttgtaggatcaaccacatccttcaaaaggactatgcctgtttataagcccagctgtttctgccctgtgaaacacggtaaggatattaatacaaagagaatacagctttatgataaaagatgctcaatgaaggatgaattagggatgtactgagaatggggaaggaaactatcatctcagaagtcagcaggcagtaagcaagaggaggaatcaatacagcaacagtttggatcagactgtacagtttttttgtttttgtttttctgagatggagtctcgctgtgtcacccaggctggagtgcaatgacgtgatcttggctcactgcaacctccgcctcccaggttcaagtgattcccctgcctcagcctcccgagtagctgggattacaggtgcctgccaccacgcctggctaattttttgtatttttagtagagaaggggtttcaccatattagccacaatggtctcaatctcctgacctcgtgatccatctgccccgccctcccagagtgctgggattacaggcgtcagccaccgtgaccggctcagactgtactcttatagccatctggaatacgttttctaggtagagatagattgtgtaagggtacagttgtgaggataacagaaacatggcagattatttaaaatcatcctgaaagtggtgctttatctgatgaaagtgattgtaatccataggaaaatgtttcaacgtgcgcaagagttgcggcggcgggcagaggactaccacaaatgcaaaatccccccttctgcaagaaaggctctttgcaactgggtcagaatggcggcagcggagcatcgtcattcttcaggattgccctactggccctacctcacagctgaaactttaaaaaacaggatgggccaccagccacctcctccaactcaacaacattctataactgataactccctgagcctcaagacacctcccgagtgtgtgctcactccccttccaccctcagcggatgataatctcaagacacctcccgagtgtgtgctcactccccttccaccctcagcggatgataatctcaagacacctcctgagtgtctgctcactccccttccaccctcagcggatgataatctcaagacacctcccgagtgtctgctcactccccttccaccctcagcggatgataatctcaagacacctcccgagtgtctgctcactccccttccaccctcagctccaccctcagctccaccctcagcggatgataatctcaagacacgtgccgagtgtctgctccatccccttccaccctcagcggatgataatctcaagacaccttccgagcgtcagctcactccccttccaccctcagctccaccctcagcagatgataatatcaagacacctgccgagcgtctgcgggggccgcttccaccctcagcggatgataatctcaagacaccttccgagcgtcagctcactccccttccaccctcagctccaccctcagcagatgataatatcaagacacctgccgagcgtctgcgggggccgcttccaccctcagcggatgataatctcaagacaccttccgagcgtcagctcactccccctccaccctcagctccaccctcagcagatgataatatcaagacacctgccgagcgtctgcgggggccgcttccaccctcagcggatgataatctcaagacaccttccgagcgtcagctcactccccttccaccctcagcagatgataatatcaagacacctgccttccaccctcagcggatgataatctcaagacaccttccgagcgtcagctcactccccttccaccctcagctccactctcagcagatgataatatcaagatacctgctgagcgtctgcggattccgcttccaccatcagccgatgataatctcaagacaccttccgagcgtcagctcactccccttccaccctcagctccaccctcagcagatgataatatcaagacacctgccgagcgtctgcgggggccgcttccaccctcagcggatgataatctcaagacaccttccgagcgtcagctcactccccttccaccctcagctccaccctcagcagatgataatatcaagacacctgccgagcgtctgcgggggccgcttccaccctcagcggatgataatctcaagacaccttccgagcgtcagctcactccccttccaccctcagctccaccctcagcagatgataatatcaagacacctgccgagcgtctgcgggggccgcttccaccctcagcggatgataatctcaagacaccttccgagcgtcagctcactccccttccaccctcagctccaccctcagcagatgataatatcaagacacctgccgagcgtctgcggggagcgtctgcgggggccgcttccaccctcagcggatgataatctcaagacaccttccgagcgtcagctcactccccttccaccctcagctccaccctcagcagatgataatatcaagacacctgccgagcgtctgcgggggccgcttccaccctcagcggatgataatctcaagacaccttccgagcgtcagctcactccccttccaccctcagctccaccctcagcagatgataatatcaagacacctgccgagcgtctgcgggggccgcttccaccctcagcggatgataatctcaagacgccttctgagcgtcagctcactccccttccaccctcagctccaccctcagcagatgataatatcaagacacctgccgagcgtctgcgggggccgcttccaccctcagccgatgataatctcaagacacctcccttagctactcaggaggctgaggcagaaaaaccacgcaaacccaagaggcagagggcggctgagatggaaccacctcccgaacccaagaggcggagggtcggtgacgtggaaccgtcacgcaaacccaagaggcggagggccgctgacgtggaaccatcatcacccgaacccaagaggcggagggtcggtgatgtggaaccgtcacgcaaacccaagaggcggagggccgctgacgtggaaccatcatcacccgaacccaagaggcggagggtcggtgacgtggaaccgtcacgcaaacccaagaggcggagggccgctgacgtggaaccatcattacccgaacccaagaggcggaggttgagctgagaagaggccagtgcactcaagcctgagcaataagaataaaaccgagtagaacaaaataaaaaattc

SEQ ID NO: 663 - DNA, 4726 bp, Homo sapiens
caactaggtgttaaaacaattccagatgatacaccaatgtgccgtatactccttcgcaaagaagttctaagattagtcattaatttgagtagttcagtttcaactaaatgtcatgagactgggcttttaacaattaaggagaagtatcctcaaacatttgatgacatatgcctttactctgaggtttcccatttgctgtcacactgcacattcagacttccgtgtcggaggttcatacaagaattatttcaagatgtacagtttctacaaatgcatgaagaagcagaggctgtgttggcaataccaccaaagcaacctatagttgatacatctactgaatcctgacctcatatttatgatggatatagatacatactatatatattcatatttgtggatttcctaaaagcctcagaaaatacgactgactaggcagcaaagacaggagtatcttctgtacactgttccgcagttactggtacatgaacagttggaactgctgactttcctaaccaaaacaacttccttctctcctttgttgagccttttgaggggttcatgattcattaccacagttttaagagtttcagttaccattgtatgcaagagccaagcactgaatacctacataggttttctattttctttcattttaaaagcataatgacagtggaacaataatgggatatgcagaagcacccttcacaagttatttctgaatgatttttagggtaaataatacagatgccttgtttgttaactaacttgtggaaagcaggaatcagtgtctctaaggctgcatcctattaccacaatggggtgtgctataactgctggtattagagagggaactttggccctttcacgtttttcttaatgtttgtaacactacttcagaggtttataacctcaaagcagaagaagagcctcaacaacccgggacttataagttatttttatgttactagacttgcataaagattcttgttttccaactcttcattttgttgcaatgtgttattacaggatatatgaaccaattaaggtttttcactacagttcttgaataaaatttaaaaatcattttttattttaattaaaaatatttcccatttatagaatgcatatatttgcaatggacttccactttcatcaactttccatctcatcgctttaaacaggaacttgaacaagcactgttagtttagacctaaaggataggaaagcattaaataatactttggatctcctgaggagaagataagtttgcttgcaatttacacattccatggggaaagaagagccatatttccttaaaaaaaacattaataaagcttgttattgagaaaaattgtagtgaaaagccttaagtaccaaattttaaagcagcagtaacttaatttttatatcagtgtttttgttttgcacaaactaaatgcagtggtaggtgggtttatgagtatattaattgcctttatccatttgtgaagttaagttgatgagggcaaggtttttgtttgtttaatttgtatatgtctaaaggtatttggaactttttacaggaattaaacatatatgcaaatttgtatataaaaatagcatggccatcatttgaatgcttgtaaatgaaaggattatcttttttgagatctatatataaatagaaatagaaaatccagctggactgattaggattcttttttaattcatttgtgtataacatttttattacaattacacatcagttttgacacagtcatagcaacattaatattttcccatgatgcagatcctttttgtaatgggcttgttctttgagatctctgtaaagaaccctgtgaactagaaaacataactcacagagatacttttttaaaaaatttatttactggcactgaaagttccagttgggatgaagcatttcatctcacttcataacacctctttgactgcacttcagtgaattgttcttatgtgcactgtgtagcaacttacattataacaaagcagataagggctgtaagctgctgcttatgttgaaaagtggttcttcagattttctctcataaaatccagttgaagataaataatttttttatactttatcactgaacccaagtgtttatttaaatgtcaacagtacttctaagaacgttgcctgtcatcgtggtctttggtcttggataactaaactgcctttccagagaaccaaatgtcagagttactagaccaaatagtggttaaaacctccaaaggaagtaatgtaatcttattcataatgggattaacatattttagacattcattttaaacactacctcagttaatatagagtataaaaatctgtggtttaatccctcaaaagttaacagtaattttttttttgtcttacacacacacacaccccctcccccaccatcactatccctgtaccctcaccttggtcatctatcctgaaataaggcttagttagtattggcctgaatgttttgtgttttttttttttttttttttttttactgttactttgaaaaatatgtatgtataccttatcatatctgcctatacacttactttggggagatactcagagctttgtggttatcagtatactaaaaaaaaaaaaaaagtctacgcttaaatttatagtgctatttggtttctccatgatttcactgacaggtctaatacattttctttgagtacttgtttgtaaaaagtagactttatggtgaaaaatacatgcagtgccaagtgattaacttaagtgtttaaaaatattaaattatagcagaagaggttaggaatgatatcagcagtaatagaaataattgagaaaatcatctataaataatagatattacagactatagaataccaaaataatgtcaatactgtagtttttaaagattttaggattaatcttagtccatataaatttgtactattggtaattattgaataattgggaggaatctgggcagttgtgctggttgtaaactatgaatttctaattgtaaagtgaattgttatttctaattgaactttttttcaagaacagatttcagcctcacatactaagtaaatactgataaataaggaaattagaaatttagtattcataattaaatatgctctaaaatttcttatacttttatttcctgtttattcttaggtagattggaagggggaaacagtctgttctccctaattaaattttttctaataacgattagtagaatatggacattctatatgacagtgacattaaaagaggctctttggaagtatatacattattaacataatgtgtacaagtccttttgaaatgacaactttaatgggtttcagctcttttatctagagcttgagataattcaagctgagtttttcagggcatatcacaacggcaaagtgttcagcagtgggatatcaatgcttatttacattttcctactgctatttatataaaatgttattccattcagaggatgccttttatccccacattaaagcacagatcattaagcaataaaaaccaaattgtctgtcattcaaattataactgcagttatttttgcatggtaagagtgaggtgctaattttgtgtgagatgaactttgtaaactactttgggaaatgttctttggaagtaaggttttttctcctttagtcttatgcttccacttttgtctcagattcacaatccattaaaacatggggaaaaaagaaaaggtaaaattgagagacttttgttagaggagctatttggaatgaaccaacatttcagattttccaaaatgtaagttaggaagtctccattgtctctgcattaacaaaatacactgttactatcttaatctcaagagtgtcattacagtgagaatctcatttaaaagcataccagtgaaattaatagcagtgcttatcaaagaacactgaaatctgtgagaatctttctaggagcattcttttcttcttttagttccaagttccagggtatttttcattcctagtaggtttatatgactcacagaatgtggacttttttcctgtttggagtatttttgtaatgtaagtatcggatagctgcaccacagcatgcataaattgcacattttgttttactttctttatagaatatttaatttcaaaaatataatttatgccaaaaaaagcatacctttcaattttgctacttggttgatttagcacaaaatgcaaagtcttggggcagagagggggagtgaaaaaaattttataggtaattgttacaaaaatacctgtcagaaaccctaacgctgcattgtaaaacaaatggtgtaaactagttttgaaaagtggtaaggaattgtgaaaaaaatctcagacttaatgctctctaaccacatgagtttcttcttttttatttagtaatacgctgctacatatttggaggttctggtgtttgtaggtcactgaacagacattgaaatctgatttatattgtataactgtaacatagaaagaaaaagtatttatattttttctgtaagaatatttcattgagttgtgtataatttaaataagatttgtccccaaatggttttgctcaccttgattttttttgttgtgattttcttgtttttgtataatgtgtatagtttatgtcaagggcattaaaagcctcctgaagcataatcttatcaaagggatacattgttaataaaatgtacttaaaattctt

SEQ ID NO: 664 - DNA, 4409 bp, Homo sapiens
ggccttttttttttttttttttttgagacagagtcttgccctgttgcccaggctggagtgcagtggtgcaatctcggctcactgcaagctctgcctcctgggttcaagtgattcttctgtgtctgcctcccaagtagctgggactacaggcgcctgccaccatgcctggctaatttttgtacttttagtagaaatggggtttcagcgtgttagccaggatggtctcgaactcctaaccttgtgatccgcccacctcagcctccttaagtcctgggatttacaggcatgagccaccacgcctgggctattttctcacaatttatgacttgtcccagaagttgttaattttgatgaaatccagtttaccttttgtttttcttttatggatcatgtttttggtgttatgtctaagaactctgcctaactcaaggatactaagattttctcttctcttttcttccagaaattttatagttttcagttttatacccaggtctatgattgatatgcttggacctgtgtccccgccaaaatttcttgagttgtaggggcgtggtgggagatgattggttcgtggagcagtttctcatgaatggtttagcgccattccccttggtactgtcctcacgatagtaagttctcatgagatctggctgtttaaatgtgtgcagcacctcccccttgctctctcttgctcctattcctgccatgtgagacgcctttgccttctgccatgattgtaagtttcctgaggcctccctagaagccaagctgaagccaccgtgcttcctgtgcagcctgcagaactgtgagcaactcaacctcttttcttcattaattacccagtctagggtattctttacagcagtgtgagaatggaataatacattgattgttttgagtaaatttttctatgtggggcaaggtatagtcttcttttaatacattgctggatttgtatggaaccattctttgcaggagttctcactgtaatgaaatttgtccctgttttgttggttgttttcatagcatctctggaagttgatggtagaagaatccgatttactgggtcagctgaaggtaatggcttagctgttgtaattcttacggtgatgctggtaggcagtgacttgcattctctgatgtttcctgagagcactggttgcctatacccagacttccagagtcaactcatttgttcttatccaagtgagcaaactatacctaatgccacaaatctacgataatacaaagatttgggagtgtacttttttctggcatatatatataattatgttgctattgaataaataatgccaaatacacaccagtcatcctgctatgcggaactaagtatgcctctttgaaatgccaaatgcctgtatcttttgtagcttgggctcaaattgatgaaattagaaattactgtatacatgtaattcctcaggacagtgaggagctcctgccttgctttactgaattgtaaattgaaattctttcctcagatcattaaagacttttaccttctgggacgtggagaactgtttcaggccttcattgacacagctcaacacatgttgaaaacaccacccactgcagtaactgagcatgatgtgaatgtggcctttcaacagtcagcacacaaggtattgctagatgatgacaaccttctccctctgttgcacttgacaatcgagtatcacggaaaggagcacaaagatgctactcaggcaagagaagggccttctcgggaaacttctccccgggaagcccctgcatctggctgggcagccctaggtctttcctacaaagtacagtggccactacatattctcttcaccccagctgtcctggaaaagtacaatgttgtttttaagtacttactgagtgtgcgccgggtgcaagctgagctgcagcactgctgggccctacaaatgcagcgcaagcacctcaagtcgaaccagactgatgcaatcaagtggcgcctaagaaatcacatggcatttttggtggataatcttcagtactatctccaggtagatgtgttggagtctcagttctcccagctgcttcatcagatcaattctacccgagactttgaaagcatccgattggctcatgaccacttcctgagcaatttgctggctcaatcctttatcctattgaaacctgtaagtaaggctcattggtttcctcagactgcttctaccactgaccattcccttaggcagtttgagttgacaggatacgaaaccatcattaagcaattattcaagtccattttaaaacattttttaagaatgtgtaaagcggcggggcatggtggctcatgcctgtaatcccagcactttgggaggccgaggtgggcggatcacaaggtcaggagttcaagaccagcctggccaacatggtgaaaacccgtctctactaaaaatacagaagaaaaaaaaaataataggtgtggtggctcgcgcctgtaatcccagctacttgggaggcctgaggcaggagaattgcttggacccaggaggcagaggttgcagtgagccaagatcattccactgcactccagcctgggcaacagagcaagattctgtcttgggggagcagataaaaaaaaaaagaatgtgtaaagcaaaactaaaaaggcatgttaaacgggacctaagatgtctttgaatttctgaaatacagggtgtggtgagcagctacagatgaaagaattatgtgcttaaaccctcaggagttaaagaaactcaaaattcttgctgacaatacagaaaaaccaatgaaaagcatatagagttcaccttcttagaaatcttttggaccaggatggatcagtcatttgaaagttcttttcatagacaactagagtagtgtttctctctcgatctatgtatgtgtttctgtaagtacatatatgtctccttcgtggcagttattttcaactttggctgcacattggaatcatcgggactctttaaaaaaatctaggtgacagagcacttaaattagaatccctgtaatagtgggacccaggtactaattttttttaaagctcacaagctagttccaattccaggataaagaacaggaagactgaaatgatctctggtagtttctaatggaacggttatgcctcctctgacatgagctggttgttattcctcagtgtgctacagcacagctgttacagacttttaaaaaatgttctggtgtttagggctatttctgctgtaccaggaagagtaagatatatattaatagatgccactccagagggctggctgaaaacaaccaagaactactgtgatgggtagatgctgtccttatgtggcatagatgtatccgtagggaaaagcagaataacagagcaggtcatcatcattaaatatttattgagtgcttactgtatgcaaggcactggggatacaaagaggtataattcatggctctgcccttaaggagctcacaatctagttggaaaaacaagacatatatatatatatacatacaaaaatcagtaacaacacagaggcctgaacaattgccaagtggacaacagtacagataataaagaagcaagaaacgagggttcactaaaggctatagtggggaagggagtgcttcactgagagagtgggacttgaactggtattaaaaacaagagcatcccgggcaaagggaacaacactcacagctcagaggcaggaagacactctgcgggtctaagaaatgaagagttaaatgtggctagattggaggtttggtgcagggctaagagagtaatactcgcttagccaggaaaggatgcatttgttttacgcattttgtgcgtctgaggggctggcaggccttgcacgtggcagtgtctatcctgtcagatttgggaggtcagctattaattagatcagctattaatcagactgttctcctaacactttaacttcatggatgtaccttccttcctttcctaatgccaactctgtttcccgggtaggtgtttcactgcctgaatgaaatcctagatctctgtcacagtttttgttcgctggtcagtcagaacctaggcccactggatgagcgtggagccgcccagctgagcattctcgtgaagggctttagccgccagtcttcactcctgttcaagattctctccagtgttcggaatcatcagatcaactcagatttggctcaactactgttacgactagattataacaaatactatacccaggctggtggaactctgggcagtttcgggatgtgaaaatttctggctcataaattgaaataacagccacgttcccaaggttgtaacagaagattcaaaacatcccattctagccacacacaaataaatatctgcggcttagtgaaaaaaaaaaaaaaaaaaaaaaaaaaag

SEQ ID NO: 665 - DNA, 5340 bp, Homo sapiens
tattctaattggcgactgaaagtgatggagcataaccaaggagagccactgcccttcccaccaactggaggctgctggtcaccactggtggattacgtgcctgaaacgtcatcacctggattacctcttcacaggtgtaacatagcagtgatccttttgactgatctcatcattgatcatagtgtgaaggtggaatggggaagctacctccatcttcttcttcatgcaatttttatagggtttgaccactgccaccctgaggtgtatgaacattgtaaacgcctgcttctgcacttattaatagtaatgggacccaatagtaacatccgaactgttgcttctgtccttctcaggaacaaggagtttaatgagcccagggtgcttacagtcaaacaagttgcacacttagattataatttcacagcaggcattaacgattttatacctgattaccagccctcccctatgactgactcagggcttagctcaagttctacctcttctagtatcagcttaggaaataacagtgctgccatttcacatctgcacaccactatcctcaatgaggttgacatctcagtggagcaggatggaaaagtcaaaaccctcatggaattcattacctcaagaaaaagagggcccctttggaaccatgaggatgtttctgccaagaatcctagcataaagagtgctgaacagttaactacatttttgaaacatgtggtttctgtttttaagcagtcaagctcagaaggaattcatctggaacatcatcttagtgaagttgctctgcaaacagcactttcctgttcttctcgacactatgctgggagatcctttcagattttcagggccctaaagcagcctctcactgcaactacactttctgatgttctctccagacttgtagaaactgtaggggatccaggagaagatgcacagggatttgtgattgagcttcttctcacattggaatctgcaattgatactttggctgaaaccatgaagcattatgatcttctttctgccctttctcaaacctcatatcatgatcctataatgggaaacaagtatgcagctaacaggaaaagcactggacaactcaatctaagcacaagtcccattaatagtagcagttatttgggatataacagtaatgcaagaagtaactctttgaggttaagtttgattggtgaccgacgaggtgaccggcggcggagtaacacactggatataatggatggacggataaaccatagcagtagtttagcaaggactagaagcctttcctctctaagagagaaaggaatgtatgacgtgcagtccactactgagcctaccaacttgatggccaccattttttggatagcagcatctttattagaatcagattatgaatatgaatacctcctggctctcaggcttctcaacaaactgcttatccatttgcctttggataaatcagagagtcgagagaagattgaaaatgtacaaagcaaattgaaatggactaattttccaggacttcagcagctcttccttaagggttttacctcagcatctacacaagaaatgaccgtgcacctcctcagtaaactcatttctgtctccaaacatacattggtggatccttcccaattgtcaggctttcctcttaacatcctttgcttattgcctcacttaatccagcattttgacagcccaactcagttttgcaaagaaacagctagtcgaatagcaaaggtttgtgcagaagaaaaatgcccaacacttgtcaatctggcacacatgatgagtttgtacagtacacacacgtattccagagactgttctaactggatcaatgtcgtgtgcagatacctgcatgactccttctcagatacaacatttaatcttgtgacttatcttgcagagctgttagagaaaggattgtccagtatgcagcaatcattactacagattatttatagtctattgagtcatattgacctgtctgcagccccagccaagcagtttaatctggagatcataaagattattggcaaatatgtacagagtccttactggaaggaagcccttaacatattaaagctggtggtgtcacgctctgcgagtcttgtcgtacccagtgatatccccaagacctatggaggagatacaggttctcctgaaatatccttcactaaaatttttaataatgtttctaaggagttgcctgggaagaccttagattttcattttgatatatctgagacaccaattattggaaacaaatatggtgatcagcacagtgcggctggaagaaatgggaaaccaaaagttattgctgtcactagaagtacttcctcaacttcttctggttctaattctaatgccttggttcctgttagttggaaaaggccacagttatcacagcgaagaacaagagaaaagctaatgaatgtgctttctctctgtggtccagaatctggcctcccaaagaacccatcagttgtattttcttctaatgaggatttggaagtcggtgaccaacagactagcctaatttctacaacagaagacataaatcaagaggaagaagtagctgtggaagataatagcagtgaacaacagtttggtgtttttaaggattttgactttttagatgttgaattggaagatgcagagggtgaaagtatggacaatttcaactggggagttcgcaggcgctcactggacagtattgacaaaggggacactccatccctccaggagtaccagtgctctagtagcacccccagcctgaacctcaccaatcaggaggatacagatgagtcctcggaagaagaagcggcacttacagcaagccagatactctcacgcacacagatgttaaacagtgattctgccactgatgaaacaataccagaccatcctgacttacttctccagtctgaagattccactggcagcatcacaacagaggaagtgcttcaaatcagggatgagaccccaactttggaggcttctctagataatgctaacagccggctgcctgaggatacaacttcagtattaaaggaggaacatgttacaacctttgaagatgaaggatcctatataattcaagaacagcaggaatctcttgtgtgtcaaggaattcttgatttagaagaaactgaaatgccagagcctctagctcctgaaagttaccccgagtcagtctgtgaagaggatgttaccttagctctgaaagagctagatgaaagatgtgaagaagaagaagcggatttctccggactgtctagtcaagatgaagaagagcaagatggttttccagaagtacagacgtcgcctctgccgtcaccatttctttctgccatcatagccgcctttcagcccgtggcatatgatgatgaagaggaagcctggcgctgccacgtcaatcagatgctgtctgacaccgacgggtcctctgcagtgtttacttttcatgtgttttctaggctgtttcagacaattcaaagaaagtttggagaaataactaatgaggcagtcagctttcttggtgatagtctgcaacgcattggtaccaaatttaaaagttccttggaagtgatgatgctgtgttcagaatgcccaacagtctttgtggatgctgaaacactgatgtcatgtggtttgctggaaacactcaagtttggtgttttggagttgcaagaacacctggatacatacaatgtgaaaagagaagccgctgagcagtggctagatgattgtaagaggacatttggtgccaaagaagacatgtataggataaacacagatgcacaacaaatggaaatactagcagaattggagctctgccgaagattatacaaattgcattttcaattgctgcttctgttccaggcctactgtaaacttatcaaccaagtaaatacgataaaaaatgaagcagaggtcatcaacatgtcagaggaacttgcccaactggaaagtatcctcaaagaagctgagtccgcttccgaaaacgaagaaattgacatttccaaagctgcacaaactactatagaaactgccattcattctttaattgaaactttgaaaaataaagaatttatatcagctgtagcacaagtcaaagctttcagatctctctggcccagtgatatctttggcagttgtgaagatgaccctgtacagacactgttacatatatatttccatcatcagacgctgggccagacaggaagctttgcagttataggctctaacctggacatgtcagaagccaactacaaactgatggaacttaatctggaaataagagagtctctacgcatggtgcaatcataccaacttctagcacaggccaaaccaatgggaaatatggtgagcactggattctgagacacttcaggcctttaggaaagaaactaaactgaagatgatgaagaatattaaccaagcaccttttatggacccttgcattcactgataactttctggcagcatctactttttagtgtaactaatgtcaaactgtatcatcaaaaacaaagatctgaaagaaaaaaacatctgatattttaacagctgccaatatctcccacaataactgcgtgaagaaggaattttttaattacttaacctacgtgaaaagaaaagggctaaaagtgatgcctacaaatacattactttctggggaaagaaaagaattccaagaatgtttgcaataatggcctccaatactgaaacaaccaaaagcaggtgaaatgaggctgaaatcaaggctgtttcattttagctgaagacctgcaaagctgcttggatttctagcagttgaaaacctaacctgcaattgatgcttaatcatccatccacatgaacatgcagtcagctatacgcatcaagactcgtttgcaaaaaccattgatttttcagtatgtgggataagggtttgggtttttttgttttttggtctgtataaggaattatgtgtgtgtgagttgggatgtatggatatgtgatagtcatattttcaaggtatggatgtttggtgataacgtctcagagcatgcctaaaagagcactgcaagattatttttgaagaaatgttattttattagatctaactcttcatagtatgtaaatgttagaacattttaataatattttaaaactgggctttcccagtatttcaaaaagaaataatatatctgttaacgttattggaatgctgctcagttctctgatcagtgcttatgttatgattgttgataactaaccaaagtagatgcctgcagagactttaaaatgtaaaataaagatgtatgctgcctgtcagctattctcatt

SEQ ID NO: 666 - DNA, 3494 bp, Homo sapiens
cttaacacctcctgtgacttagccgcacctcctctcctttgactttcattccacctccttccaggatcgcaaggtccctatttgtcctggaaacggcttcaaggtagtctagggtgccgtttgccgggggaggaaggtgctctggttgatagagtcgcctggccgcacactctttttggcacataacaacgttctacagagccggggtggagcgtgctttctcataagtgctctgcaggtttggagagagaggatatgaggagcacccttttctgttttttttaacccaaagattagcttggaaaaggggcagaggggtgcactggaactcaggtctgcctaagcagcacagcagaccaaggtctagagatgacatctgctcgcagctgttcttccaccagcccgcatcctggaaaggggtcttgtggcacacaagagttcacatccttccctcgtgaaataaggactttgtgttcatcatctcttgtaagaagcagagctgaaagcacagaattaagaaataaaagggaagtgggtgcctatataaagggaagtgaaaatgggttgctgtcccatgcaaagaccctggaaagctgttaacagctcagcttgtcactttcaccatctgcatttgtccagagtgattgagatttgcgttgttgtggagagaaaggcgcctgttgcacaatggagtgagattgccactgctgtcaggacctctgtgtttggcttgacactttttgagttctcagcagtctcgggaccctcaagagtggaagcatttttggatgttaaatgctggggttaattgaagttaagagcttgttttactgggcatggtggctcacacctataatcccgacactttgggaggccaaggcgggcagatcacttgagtccaggagtttgagaccagcctgggcaacatagcaaaaccccatctctacaaaaaatacaaagctgggcgtggtggtgtatgcctgtggtcccagctccttgggaggctgaggggagcagatctcttgagcccaggaggcagagtttgcagtgagccatgatcgtgccactgcactccagcctgggcaacagagtgagatcctgtcttaaaacaaacaaaaaaaacaaacttgttttcatttagactcttcctggcgttggggacctattggaataggtttagtgtgaactgagagctagaagtgttagaggagagagggagggaacagagcccgctggagcgagtgcccttcctaccttatcactgcatgccaggcatgtgccggcgctttggtcctcctcatttcattcttgactgccacctgagacacgatggttactagctccattttataggtggtgaaactgaggcttggggaaggtcagaccccaagggtgccatttagtcagtggcagagccagatccaaatgcaggtctcctgactccaagtgcagggctcattttatcgtccggttgcagcacgctggcggccccttgagccccaacctggataccataggggaggagcagagaagccaggaacaccacagccctgggccaaggtgcggggctgaaagaacttcccagcgctcagcctgggactagtggaatgggctgggccctggggctggcagcggtggccccggggagcctgggaatgagtagggagcacagggaggtgtgggagggcctgggaaccatgaaaaggagggcgggtgcagggaagtcgcctgctagtgaagtggcgagggggccctgtgggactccagggaatggccacggcaggttgtcctccaggagttgagagccactggacatggcagctgcctgtgttctcagccaccacagtaaccaaagaaatcttggttttaaaattcaagttgccatggaaacgctcccatcctcgacttggcttattatttaaaataacatctctacagcacaaagcccccgggtacatccaaggacactgctgtctgcccacgagacatgctaacctcacagtgtggaggctgtgtgggtcactgacatgcatggccacgtgagacgctgcctacccacgagtcacggaaaaggggaagattattaagaaagtcactaggggccaggtccagtggctcatgcctgtaatcctagcactttgggaagctgaggcagttagatcccttgaagccaggctggtctcaaactcctgacctcaggcgatccacctgcctcagcctcccaaagtgctgagattacaagcttgagccaccatgccggttgaacttatttttatctgtgttggccatttgtagtttttctattatgctggttccatttttctgactttgaagagccttttgtggaaacgaagcctaaagtatatgtgagtactgctttgtttcgtcagtttttgttttaaagagacttttcagtgtaatgcaagcattttcccttgaaggctgtgtttcctgtcaatcctaagctttcctccagcattacctttttaaaaaactttattttctatattgatggggtctcacaatgttgtccaggctggtgttgaacacctggcctcaagtgatccacttgccttggcctcccaaagtactgggattataggcatcagccaccgcacccagcctgtttttcaaagggcattgatttttttcataaaactttttaaattaagatctgtgggcctggtgcggtgcctcacgcctgtcatcgcagcactttgggaggctgagtcaggtggatcacgaggtcgggcgttcgagaccagcctggccaaaatggtgaaaccctgtctttactaaaaatatgaaaattagctgggcgtgatggcacatgcctgtggtcccgctgctcgggaagctgaggtaggagaatagcttgaacccaggaggcagaggttgcagtgagccgagatcatgccattgcactccagcctgggggacagagtgagactccgtctcaaaaaaaacaaaacaattctgtgttgcatgtggtactttttgtgtgtgaggagtccagtgtgaagattcagacttcaggcagccacttgtacaagcactgtcctgtttcctctctggcctcacctaggtaacgctgattcctccacggaggatgtgcttctgagtggtccgttgggtgctgtgctgatgagcatcacccagcattttacgacacatgtgctgccccagagggctgggctcccgtcagagctcttttccactggctgggtgcggtggctcacacctgtaatcccagcactttgggaggctgaggtcggtggatcacctgaggtcgggagttcgagaccggcctggctaacatggtggaaccccgtctctactaaaaatacagaaattgggtgcgtgtggtggcgcacgcctgtaatcccagctacttgggaggctaagaacctgggaggtggaggctgcagtgagccgggattgtgccactgtaccccagactgggtgacatggcccacagaccaagaccctgtctc

SEQ ID NO: 667 - DNA, 3462 bp, Homo sapiens
ctaaggacacagtacagatctcacagggacactccttatcccttgcagagttccagacactactgatggtcaccaaagcaacatttcatcagaaaacacagtgctgggcttgtgaagaaggtgtccagcagagcttccactgcccctgtaggctgcaggcagctgcttcagttgagagatacactgagctcctcaaagaattcctatttaaggtacaaagcagcgactggatgccctgctggattccactattgccacaggctttgataactctaagttcatgctccttaggaaagtgcactttttacaccaatgttagacagttccctcagttgcctttactggacatcaaggagttcacatttttgacaatctttcagtcctgaactgtccaaggggtggaggtagctccatacaggaagctgcctgctgcgtgtggatcagtaatatcagacttgcccaacagctcactggagacatcaaaaccaatgcatgggggatgcatgacgtcacccaaatatttaccacacgcttttgctgccagagaccccagatcacttttcctgcctcctgctaaacaaatgggagcagtagcttctcatcagcctccacatttcattactcataattgtggccttcctaatgtctcatgcccctaagcacttattacaatgtctcaacagccttctctcagcctctcaaaatattagtcatcattaaaataaatgtctgatgttaaagcatcagggtcaattgtactgtgacacctaaaatttcatgctgcatcccaccaggtcctcagcctaatggctttcatgcccccaacagactgctaaactctttgaattagtcaagcatatccctcaagggacaaggggttaccccaccctctgatttctaccaagcctgcctcccgcaccctgtgctccagagtgaacccccgggtagacctgcacagatgcagtgtcatcccctgttgggctgagtatgcgagatgaataaattacggtgaatttcgtctactcagtgtttgttgtgtctgcagccatcctcagaattctagggcaagactaatttcttcaccaatgacgtgaacaggaaggaacccaactaggaattgccttttttaaaaaatcccttcccaccctcttaattatgtagtgcatgcattttatagcttttttgctcattccattatctgaggtcaggcactgatatttaacccatctttagcctcggaggagggcagaggaacagtggtcatatttatttccctaagtggcaaagacatgatttcctcctgtgccactcaaattcactccttctttaacttgatgctcagtaggttgtgtttcacttgtctatgcagattgttaggaagacgagactcagctttcatttttgatgttgtcatagagaagactctatggtaatgcttattttcacagtcaactttctcttcttttcccccagacagaaattgcaaactcaggtgagtgacagctttctggagtctgcaaacatagattattttccctcttttgatggcaaatttcttatatccccacgaaaaataaaatacttacatataattttggcatgtcatattggttgccaactacacgtaaaaacattccttgattttaaatctacattaattataaaaacgggtagtcacaaaaaattatagtgtaaaaatttatagacctcttcttaggactaaatgagttactattaactaatatttattgtgcaattagtgcatggcagaagcttcctatgtactatttcattttatatgtaaaacaatattctatgcacaatgttataatctccccttgcctccaatttggacgtgataaaacagcgtcgtaaagttttcaccccagagttctctgcttagtaagaagtagaaggaagtctaaacctaagtcatctgatttcagagcccatataattaaatgctctaaatgcagattcccagggtggtggtttctatgagagcctgtcacatacgatgtaggacactgcttccctgtaacgtgtgcaagattcccttgatgatggtgactatgagagcctgttacatatgacgtaggacagcacttccctgtaacatgcacaagattcccgtgatgatggtgactatgagagcctgtcacatgtgatgtaggacagtgcttcctctgtgacatgcacaggattcacccggggatcttgttgggatgcaaactcatagaccacactttgactagctaagaaaagagcatttaaattgatgtcctggtggcagtgctgggatgctgctgttcatgtgggcactggctcaccatattaacaaagcttgggacttccagtccctgctggaaaagagatacagacacataggatgtgactgtgcatatggagtgtctgttgtgttctggacattgtgctagacactagagataaaaagtcaaatatcccttgcctctatctgaaaggagcttcctactcagtggattctgactgcagtatatattttctcttctgacctgggagagtgagctctacctcaatgttggtaattgaacactgcccagtggatttgacaggggagaccacaggtagttgtgttcctacatagctatgaccatagtatatctcacgatgccatttccccgttgtcaaaaggctccctccagtatcatacacgctccccatgattatacattcttcttccttccaccaaattttccttaatcttgtaaagataaaaacataaaccacattcttgtcatattaattatatattaatgatgaaaattccttacttttcatgtgtttaatattttctcccaatttatagaatatattggttaatataagaataaattttagccatgcacatctattacaaacttcattttatactttgctatttttaaatttcttatgctcttataaaacatgtgttctggactcacgttggcttccatttcttccctctggcttctattagtttaggctatgagcatagatggaagaggtggctgctgtattggatcaaggatatgagcagagatggatgaggcagcggctgtaatggatcaaggctatgaacatcttgtgaagtaggatgttaagtctgcaaatatcagagtgaatccaaacttatcaattcaacactggattgtaaaacagctcaaaaaaagactaaaaacacagctctacactttaggaggttggggcaggcagattgctcgagctcaggagtgggagacaagtttaggaaacatggaaaaaccctgtctcaaaaaaaaaaaaaatttgaattagctgggtatggtggtataagcctgtggttccagcttctcgggaggctgaggtgagaggattgcttgagcctggaaggtgaggctgcagtgagctctgatcacaccactgcattccagcctgggtgatagagtgagaccctgtctt

SEQ ID NO: 668 - DNA, 4073 bp, Homo sapiens
atctctttaggataaacataagagatatgtgttttagggtatctgtttaggataaacatagagaaatactgcatccgcatcttggcttgtttatttgttttttgagatggagtctcgctctgttttccaggctggagtgcagtggtgtgatctcggctcactgcaacctctgcctccagggttcaggtgattctcctgcctcggcctctcgagtagctgggattgcaggtgtgagccaccacacccggcctgcactggcatcttgggagtgtcccttgctttctgtcagatgcgtatattctatattcttttcttttccagagaaaaccagcaacatggtggcaaagagatagatttcatttattcagcacacacttagacatttcccattccatttatcctgtgttagaggcatgtcattgagatgtcatagatctagttccataccatctagagcagtttcattgtgcatccagctgtgctctgaactagcattcctgaaagagaactgctttgcatttttgttttttgttaattgcgttggtttattttaggatgactgtcttaggtcattgacgagatttgccgcagcacactggacagtggcatcagtttcagtggtgcaaggacatttttgtaaactttttgcatcactggtgcctaatgacagccatgaggaacttccatgcatattagatattgacatgtttcatttattggtgggcttggtgcttgcatttcctgcgttgcagtgtcaggatttttcagggatcagccttggcactggagaccttcacattttccatctggttactatggcacacatcatacagatcttacttacctcatgtacagaagagaatggcatggatcaagaaaatcccccttgtgaagaagaatcagcagttcttgctttgtataaaacacttcaccagtatacgggaagtgccttgaaagaaataccatccggctggcatctgtggaggagtgtcagagctggaatcatgcctttcctgaagtgttctgctttattttttcattacttaaatggagttccttccccacccgacattcaagttcctggaacaagccattttgaacatttatgtagctatctttccctaccaaacaacctcatttgcctttttcaagaaaatagtgagataatgaattcactgattgaaagttggtgccgtaacagtgaagttaaaagatatctagaaggtgaaagagatgctataagatatccaagagaatctaacaaattaataaaccttccagaggattacagcagcctcattaatcaagcatccaatttctcgtgcccgaaatcaggtggtgataagagcagagccccaactctgtgccttgtgtgcggatctctgctgtgctcccagagttactgctgccagactgaactggaaggggaggatgtaggagcctgcacagctcacacctactcctgtggctctggagtgggcatcttcctgagagtacgggaatgtcaggtgctatttttagctggcaaaaccaaaggctgtttttattctcctccttaccttgatgactatggggagaccgaccagggactcagacggggaaatcctttacatttatgcaaagagcgattcaagaagattcagaagctctggcaccaacacagtgtcacagaggaaattggacatgcacaggaagccaatcagacactggttggcattgactggcaacatttataattattgcaccaccaaaaaacacaaacttggatttttttaacccagttggctttttaagaaagaaagaagttctgctgaatttggaaataaattctttatttaaactttccttcccagttttatagtttctggttctgaggactgatgaaaatcatcttccatcagcagattttcttgcactgtttgctgtgcccctcaaatataatgtcttgggttttaagatcgagcaaggagcttctcttcctagattggatcccagcccctttgtgggggtctgactgcatagtcccagccattatgtgatatttcacgttattgatgatagtgaaccgtgggtccgaagctgactcaacggaggcagggaacaaagtctctgtggtctgttgggtcatacttcctggttccactgagtggcccaacactgggactgggttggtgtcccctctgctgacaggaccctactcctaggagcaaagtggttgattttgaaggcagtgttcccttctctccattgactatgagagagttgggggacacacatgcagaagaagcccgtggggagaaggtggattcctggtgtgctggctggtttttcagggctgttagaggtttttttttttttctttttcttttttatggcaagacttttggctttgagaaaactcacttagagggctttccaaaaacttaggatggtctaaaaaattaggatattcttttagaattaggaagaaaaattaggatattctaaaagaatatggattaaaaatttaggatattcttttagatatcctaatatctagatgagaggccttccttcataagatctggttgtttgggctgtggttggcataagtgatatttattttggcctctgtcacatccagtttcttgagcttttaaggtaagcttcttttggctttttttcagatgttcaccaggcttaagtttaaaataataggtattctaaaagagtatcctaattttcttatctgtattcttttagaataccctaatgtttcagacagtgatattctcttgttatttctaaggctaaattggcagagtatatcatctaaagccaaacactgaagaaggtgagaacccactcccacccagccagcatttcctggaacagacaagctgctgcttccttgctggctcacttagtgcattcctgggatggtctggcacccaggctttttattctttttgatcattgttcttactgaggtgccttcctagaacaagagccacttacaaaatagcttataattattatgtaccacacaactactattgtttgatgtatgactgctgagagcttgaatacatgcagagagtgactgaagacttagtagaggaataaattctgagcctgtctaaggtggggctaaggaacagatgagtaataagaggctcttggatttttttaaccaatgcaactgaccctttcaatcagttttctttgaattacatctacaagttttgttccactcagctaccagtcaactaggcatgctccacagtatcacaggaagaaggtcagaaatctggaactgaagctaaaagaagtgaggatgtagaagccacattcctctccaaggtagtgtgtgaaagaaccgccccctcttgacaggaggatgaccgtcgccattcttgcgtgggactgactcacccagctgagaggaggaccaatagaaagaaaattcacatttgagtccacctctctccccctttttctggccttcattcataagatctggttgtttgggctgtaggtggcataattcatgtttattttggcccctgtcacatccagtttctttagcttttaaggtaagcttcttttggctttttttcatatgttcaccaagctaaaatttaaaataataagaccaggtttctctctctacaagtggattataaacattttcaccaaatcataacaatactccagctttccggtccgacttcctaggagcctggagttagcaaaggttgtctctggatttcattctctgagaatatcacagagcctgggagaagatgaatttacatgaaattgcaacatacacacctttttattttctggtgttaagctagttgtctttcctaccttacaaatcatgttagttttatgatttgttccgcatgttttatgtttattgtagaaatgtttatataacatacgctttccatatcagggaaaatcatatctgtttaataaattggctataactttaatatctgtggacaacttgtaaaatttggaatgtatcatatgtaaaaagtttaaagatatccaaataaatgctttaggtgttggcattactt

SEQ ID NO: 669 - DNA, 3645 bp, Homo sapiens
tcaagatgcttttgtgtgtattatgggattgtatttatggccttgtccctgcattgtggatgtcaagggccagttgccacgtgcttagtcatatacctaaactcagggaacacacacacgcatgcttatggactcacacacactcacactcttacccacactcattctagccacactcacactcatatatactcaccaatacgctcacactcacacatatccttacacacccacactctcacatacccttacacacccacacacccttacacactcacactcacggtagccacactcatgtataaccaatatgctcacacatgtacccttacacacccacacatactagccatactcacactcatatatactcaccaataagctcacacacatacccttacacacccacacacccccttacacacacatactcttacacgcccacacacacccttacacacccacacacatacccttacacagccacacacatacccttggacacccacactcactagccactcatatatactcaccaataagctcacacacacatagccttacacacacatccttacccacatttacacacactcatacccttacactgtcacactcacatgtacccttacacacccacactcacacacatccttacccacactcacacacccttacacacccacactctcacacctttacacacccactcacacacatacccttacccccacacacacccttatacacccacactcacactctagctacacccacactcatatatagtcaccaatatgctcacactctcgcactcacatgctgtcgtgctcgctcacataccgttgcacactcacatgctctcacacactctcacggtgaaatctgtgcctgccaccacactcaggttgcgatgtgtgtttcacttttagctcctctaaggttttactcaccctggctccaccaaactggattttaccatagtctatgcttaaatactgttcatctcttcttctacacaaaagtattaagaatttacctgcctgcaagttattggaatatcctgggcaaaagcaaataaaactttcccttttcccttgttcgacaccccctcatcagtgacccccacgacacgaccccaccaccctatctggcttggcatgtgatgcttcaggaagggcacagggtttccacggctcctgttaccctcttaagcctcagaaaacattggcacaggcagagaggagagctgtcatctgagtctctctgtgggatcctgggctcttagggaaaggccagacagggaggggcgggagagatttctgtggcctccaagattcctgggaaggcgaagtctggatttccttggagaggaaggagggcttaggccagccacataattagggtgcagtagacaaacagaaatcatttcttttggtccctcatctgcctcaaggctgtgtttgctccacatggccgcacaggcacttgcgtctgtgccccttggggctggcagagatggaggagaaagccttaagcaccatctctcctgattagcgctccacgcagcttctcttcacagcccctcccacacactgtgtcccactactcagacacatgggccgtgggcacagagggaaagggaccttgggaagaatagggagccaagccactcttcaccctcccaggtgtcgcccatagtggggcacatggggacacggtggccactcaccccctgccactgagtcccacagtgcagctgggcctgtggtcagatgccacagggacaccatagcacccgtagagtgtgtcatttccttggtgcacgagggccagatgatgtccccagaggctcactggcttcccacagcacagagggacctggcactgctaccctaagatggaattgttaaaactacctccatttttatttttaaaagtatgatgtcaatgcataaaataaaaattgctttctgtcagatgcttctttattcaagcccctaaagaaatgttttcttgcctaaggcagctcatattaaaatgtctaaagcccaagagaagtctaataaatttcagctttatgactttgtttactctgggtgtagaaaaagaattcttttatacgtagcctagtttccagaacttccagggtcaaaagttaacaaatttggggaaaacagaagagaaaagatagcatacagtattctgttttcctattaaaatgaggaaaacaaaggagtcatcagaactataatttacgggaaagtgtgcagacatccatctgcttttattgaaaaaataccctgcagatgttgggcctaattatgaatcctccattttcttgatgaaaaactttagtggcatctcaatctctgatcggtaaactgggtgtcgtagcacttacaaaatagaattatttcattgatctttagccatctattatttttttgtagatgagagagcattcagcatgaaggctgtttctacctgaatactaaatgttggtttcattcccacaggttcacagcaaacaggattcctaaatgcccttaaggacagtcctgcaagcgtcctggaggctgtggtgtgcttcttctctgtctggtccatcgttggcctctcaggattccacacctacttgatcagctccaaccagacaacaaatgaggacattaaaggatcctggtcaaataaaagaggtaaagaaaattacaatccctacagctacggaaatatctttaccaactgctgtgttgccctgtgtgggcccatctcaccaagcctgatcgacagaagagggtacatccagcccgacacgccgcagccagcagcaccctccaatggcatcaccatgtacggggccacgcagtcacagagtgacatggctgcagccacgcccctgctgcagagcgagcccagcctcaccagcgacgagctgcacctgcccgggaagcctggcctgggcacgccctgcgccagcctcacactgggcccgcccacaccgcccgcctccatgcccaacctcgccgaggccacgctcgcggacgtgatgccccggaaagatgagcacatgggccaccagttcctgacgcccgatgaggcgccctcgccccccaggctactggcggcgggcagccccctggcgcacagccgcaccatgcacgtgctgggcctggccagccaggactccctgcatgaggactctgtgcgcggcctggtgaagctcagctccgtgtgacccacatggccccaggccgggggacaccagaggctcctccatgggcagcaggagtgagcggaggggtgtgtcccacagcgactttcccagccgatgccacggtggagatgacagccccaggtctggggtacagagaccacttaggatggcacagggtggctggccccggatgctgagagcttggtttcatttgaattttcttccccaacctgagtgctttgacaacaatggaaatagagaagtggctgctttcttttggtgaccctccaggggtggaatcggagtgtgtctgcccgcccttgtgacagacacacggaaggcttctgacgcttgtggccagactgcaattgcacttatgtgttatgctactaatatttgaaacagacctgccattccatttgttaatt

SEQ ID NO: 670 - DNA, 3978 bp, Homo sapiens
caccgtctccatcccctcccttgctggccagccagttgataaacattgaatttggaagatgccttgggatggaggaggaccagtgcccaggcctgcagcccaccctcccgctgggaggcccctgagagcactggggtgctgctgccctgtttctggggacgcttggcttccctaccagccaccgtctcctgccctccatcagctcggctctagcctcggggcctctcggggtggtgtccccggtgacgtgcctgcctgcctgcctgccgtcagagagctggcggggctgagggaaggaagcctgcctccctggcaggcaagcaggcggcgggcgcggaagcaccagctttcacgtctctggcagagccccactccggctgcctgctgcctgggggatgtccaggggccggcccccggcttccgagagggacagcgtgcgtgggtgtgggggctccggtagcccggcagccctctgtggccctggcccaggagagtgcaggttttctgggagggctgggaggaggcggccaggagtgaggacagggaattgtgagcagtgtgggggcaccactgtggggaacaaagccccccgcccctgcctgaaacctgcgtcctggccctgggcatcagggctggccctgccctggtgtcctcacacagtcacttctgtgtgcggtccgcgtcctcaggtcatgaggaaggtcaccctgggctaggcccacctttgatgtcacggtcacctcacttatctcttcaaaggctctgctgtttgggcttccttccattggctttggcagggcaagcctggctcctaacaccctccgtttgttggagctctcaggctgcctctggggaccgtctgccaggacacaggccacccttgctgcctggttccccactccccaagccactcacctggcagggcgtgactggcacttctggcctgagtgcctgctgggcgcccgcccctagccagttctgtcgtccttcctttccacccaggacagccccgtcctgcactgccgtgtcgcccactgccggggcctctctgggaccaacaggcccccttccttccacccaccaggccctaccccacctggaccctctgaaatgttcctcgttgacaaatggtcttgcagaaggcaggatggctcctgcagcccccactcccgctctgtgggtggatgccccgtctctccctgcccaggcaccgtggtgccttctctctcccgggcaccgtggtgccacctccctcccagacaccatgatgctgcctccctcccgggctctgtggtgccatctccctgccgaggcactgtggtgccgccttcctcccgggcacggtggtgccgcctccctcccaggcgctgtggtgccgcctccctcccgggcgtcttgagctgcaagggctcctctcttggcttcgttccccggagggtggtgctgttctcgttggagggggcggccaggcgctgggccacgtgtgcatgcagcccctacagagttgctgccccgtgggggttgacgtgggcctcctttcggaagctcttcctggcaacactgagtggggcaaggggttggcagcagagaggcggctggatttggggccccagtgtcctgggcggcagctagggaggggccggctccaggccctcaggctgtgtcagggcagggcgggcacccccacttctccctgtcagccgagggagccaggcaggggcagcctgagacatcctgggacagtgctggtggggagaggcccctcagcctgtgcctccctcaaaggcccttcccgggccctgctctggctggggggacggtgtgacccactttccctttccagccccagcttggtgaccgggtggctccattcaccctgggtccctcgctgaaacggtgcctgggaccagagcagggaacacgcttgccagtggtaggagatggaggcgacgtggactctgggaggcttcttttttggggtccatccagaggccgagcctctccaagcactggtcagcctccatgccacccagtctgccgaccctcctctccaccatcccctcgtccgagcagtggcgatccctcccgagtcaaggctgggcacaagcacgtggggacaggccgggtaggctgcctggctcagtgctccctgcacagaggcgcagacagggagcccaggtgccccaggcctggctgccaagcctacttccctctcctggtgttcccgagtcctgcccgcccctttctgtgcgtcccgtggggcagtgctggttgggggtcctggcctgtgggggctatgatgagaaccaggtgcctctctgcatcggtggcctctgagggagccctctcgcccggcagcaggtgggatgcagatggggctggccagggctcctgtgcccacagcagcctctgggcagtgtcccctgggcttctgtgagcagccgcagcctgggtgtgaatcttggaggcccggtggtggcggagcatgctctccatctgggagaggctgagaccatggcagctcctggcgctgtcctccccgtgcccccttcctggctccccagcttccggcgcctctccagggccactcgggcagcccctgcccaccccacaggcccttctctgctcacaaggctttgatcccaggcggcacaattgggttttcaaagcattcacggcccttgtttgtgtccctgggcccccggctggaggctgaggtttcggcgttcctgggcctggcctttgaagcttcctcttattaatcttttaacatcccccagccccactcccacccccagcctgtggccctgagcagcctggagccgggagggggaatctggagctgggagggggataccccagcctggcagctgcacccctccacggtggtcccggcgcatccgccgggacccgccacgcctggccccaccttcctcgggtgcagaggccagaggagggaggacggtgatgctgcatggcttgaggaccctcgaggccccagccttcagctggcttggggcttggggtggtcccatggagggcgctggtcccaggacgccctggccttgcttacaggggtagggctggtgtcagacaggaagctgggcgatgggctcatgggggccgggcaggcagagcctgtctgagggtggagctggggcctggccctgggggtgtagctgccttcacagcaggggggtgctctgcccacacccggcccctgagccccccgccctccctgcaggcgaacctcttcccggccgctctggtgcacttgggagccgaggagccggcaggtgagtgtcagtggttggggccagtgtcggagtccagccagcctgtccctggacctcagagccagctgcccgggagggcgttcggtctggggcctcctttgggtctgagagggagatctgcggcccccagtaaccacctccccgagagaggactgggacagccacctgctggccacccccctcccagagctgagtgctggtgggcagatgctgggtggatggtgagtggacccctcctcagaggctcagggtgagcttgggcctccctgcaggtgtctacctggagcctggcctgctggagcatgccatctccccatctgcggccgatgtgctggtggccaggtaagtgccggtgggtctgggggcacctcccgtggcggcactcaccactctgtgtcttcgcctccccacaggtacatgtccagggccgccgggtccccttccccattgccagcccctgaccctgcacctaagtctgagccagctgctgaggagggggcgctggtcccccctgagcccatcccagggacggcccagcccgtgaagaggagcctgggcaaggtgcccaagtggctgaagctgccggccagcaagaggtgagagctgccagcctgaggtgcccactccgccagccacaggaccacctcctctgccagcaggaataaagacttgtgcatccctc

SEQ ID NO: 671 - DNA, 3871 bp, Homo sapiens
agctacgtggtggctcgcctctgattccccgtgtaaaaaatggagtttaggatccctgccctgtgtgcagcccacagcctcaagcccccatggggatggaatgccggaaacctctggccagcgcactagcagcctggagaatacggaagattgtggcaggattgtggggcacatgggcagctccctgctcgtccgggcccctggtgcccacgagaaaaccaaaacaggtgcgtgccccgcgccgcacgtcaggagggcaagactcagtggagggaggggctgtccactcgctctagctccccagaggctgaacagggagaactgggaaaaaggacgcctcctcagcgtcctagaacgagtcctcggcacctggtattgcatgcgccctagtatggggccgctccacttgcgcaggtgttggcaacatgcggggagcgccacggcatgcccccaatgagccgactccctcccccaactctgccccctttgtctcgctggcccctactccttctgtctgcctgtctgtcccgtcccaggttcagcgcgcacggccctgccggggtccctctggcagttgccgtagccgcgcggcccgacccggggctcccaagaggagaaaaaatcatgaatgaaatggatgcgctgctcccactcctccgccctccttgtccaagcaaccttggcatgggggcgacgactgcggagactccgcgcagagttgctcgggagagggaggcacctgagatgaggtcaggggttaagggtctgtgatccggcccccttcgtgccccgggagcaggccgctctcccggtcccccgccccgccagccctgcgcaattcccggcgagcggcggaagcccgcccgggggcggggcggagccggggctggggggtgccaaacccacccggcggctgcgccagcgactctgcagctgaagcgcatttggtgaggcggtcgggcgagggagcgcgcacggagcgcgggacggagcgccaggcggacggaccgaaggacggaggcaccgaaggacggacgcccccgcacacgcagacgcacagagctcggcgcggcccccgtcgcatacacactggcacagacacaagcagggacacacgcagacacacgcacactcgcgcgcgcatcctcccgccagcctgcccgcctgctcgccggcgcccggagcccgctctggccgcttgctttttgctgagaaagcttcctgccctggaagatggcacccttccccatccagacaccttgggaatgaattatgagggagccaggagtgagagagagaaccacgctgctgatgactccgagggaggggccctggacatgtgctgcagtgagaggctaccgggtctcccccagccgatagtgatggaggcactggacgaggctgaagggctccaggactcacagagagagatgccgccaccccctcctccctcgccgccctcagatccagctcagaagccaccacctcgaggcgctgggagccactccctcactgtcaggagcagcctgtgcctgttcgctgcctcacagttcctgctggaacccacggcctggcttgactctgggacgtggggagtccccagtctgctgctggtctttctgtccgtgggcctggtcctcgttaccaccctggtgtggcacctcctgaggacacccccagagccacccaccccactgccccctgaggacaggcgccagtcagtgagccgccagccctccttcacctactcagagtggatggaggagaagatcgaggatgacttcctggacctcgacccggtgcccgagactcctgtgtttgattgtgtgatggacatcaagcctgaggctgaccccacctcactcaccgtcaagtccatgggtctgcaggagaggaggggttccaatgtctccctgaccctggacatgtgcactccgggctgcaacgaggagggctttggctatctcatgtccccacgtgaggagtccgcccgcgagtacctgctcagcgcctcccgtgtcctccaagcagaagagcttcatgaaaaggccctggaccctttcctgctgcaggcggaattctttgaaatccccatgaactttgtggatccgaaagagtacgacatccctgggctggtgcggaagaaccggtacaaaaccatacttcccaaccctcacagcagagtgtgtctgacctcaccagaccctgacgaccctctgagttcctacatcaatgccaactacatccggggctatggtggggaggagaaggtgtacatcgccactcagggacccatcgtcagcacggtcgccgacttctggcgcatggtgtggcaggagcacacgcccatcattgtcatgatcaccaacatcgaggagatgaacgagaaatgcaccgagtattggccggaggagcaggtggcgtacgacggtgttgagatcactgtgcagaaagtcattcacacggaggattaccggctgcgactcatctccctcaagagtgggactgaggagcgaggcctgaagcattactggttcacatcctggcccgaccagaagaccccagaccgggcccccccactcctgcacctggtgcgggaggtggaggaggcagcccagcaggaggggccccactgtgcccccatcatcgtccactgcagtgcagggattgggaggaccggctgcttcattgccaccagcatctgctgccagcagctgcggcaggagggtgtagtggacatcctgaagaccacgtgccagctccgtcaggacaggggcggcatgatccagacatgcgagcagtaccagtttgtgcaccacgtcatgagcctctacgaaaagcagctgtcccaccagtccccagaatgactgcgcttctcctacaaggttctctgggcactgcccagcctgagtctcggccctcacccagggccctgcctcgggtcctgggcctgctccccgcttcctccccttcagtcagctccctctgtcctctgtcagcctggcctgacccctaccctccagcattgctcttcctactgtacatattggggagtggggggcagggtcgggaagggacatgccaggccaggcctggggccccggggcctgacccacaccacgcagaccccgggctccagtttttaacgatggttccatcaatacctgatccagaatgtttccgtgctacactttgtgtcctgctgcaatgtgttctgtctgtccatccatctctgccctctgtaccggacactgtgtctcctcagccaggaaggggtaatgagctccagcccctaagcaaccggacttgcctgcctcggcctcacccgcacttctcccaaaaggcagatgacggggagttaggcatggggagctccagaaggtcaccagagagctttcagctgagggagagttctctaggttggagtgggcatcacagccagggtggcctctgggtgtcagatgctctcaggagggtgcccagcctgtgaggcactggcaaggtagggggcagatggggcatggagaacccagaggatctaggccctgttggggaggggaggggagctcaaggtttgggtggggactcagcccagatctacgtgagacatttttctgtgtcactgtgggaaagccttcccagaagtctcactgcgtgttgctctgcgtgtgttcccatgtccatgcgtgtgttgagagcccatcaggagggcatgcatgactctttggcaacatgtattatcttggagccacgtgtttttattgctgactttaaatatttatcccacggcagacagagacatttggtgtctttttataattcgctcgtggtcattgaatagagcaataaacggagcattttgagcaaaact

SEQ ID NO: 672 - DNA, 4656 bp, Homo sapiens
ttttccaggctaatgaataagtaatgtggatgtggaatcagatttttgcttgagtctggtggtgactcaatataatacacacagaaaagtatcagttcttctgtttcaagcaagcatactatctctggtggccttcctatttttgaagttgctgttaggatactttaatccttaacatgaatcagtataaaagaaagcatgtgggtggttgtgtttgggtgtcgtttccatccacttggtgcttttattttctgtggttgttttattccacagcttagcaacagcagatttccaggagaagtcttagttcttcatctctctctccttcctctggtctggttggttggtaacagtgagagtaaatgaaatgctttttgtttttctgtcttcccaccacagtgtctttggtttacttttaggaccctcattttcaatctctgagccagaagacctgcctttaaatcacagcatttcaattcctccctcctatctaggcattcctttatgtttctacagtactctgcatgcatccctgttataaaatgtatcacattgttttggaattttccaaagttgagctctctttctaaataaactgtacttcttgaggccatggaccatatttttatcatttatacatttctgttacgtaacacaatgcttggcaatggtggttgggtgactggatggaagaatgaatgaagtaggcttgaagagagctgtacttatgatcctattatatatgatttctcttcattttgtccacgttaatgatttctagatatcttggtcacttgaactttagtaatatgaatcatgctgtgtattcaaactttttagcagagaaataataaaattccttttgtaaaccaaagattgtacaaccatctgtgttttgttttgttttgggtttttcttttctttctttctttttttttttttttttttttcccaaaataggttcaaaaaacaaacaaggctaacttgcacctaagattgaggagttttgatgcagtagagtagtaaactcctgtattttccagcttgctattgtaaattaaaatacctatttttgaaattttaaaatatttatacattgatttcaatagaagtataaaagagggagaggtagttcttttaagataataaggaagatgtgttatggctcaattcttgattattattgcgactgtaagcaatataagcaactctgaatggtttttaagactttctttttctttttaggacctctttgtttttagacatgaattggccataatgagactagcagcctttatgggcattactatgttagttggaataactggactcttttacactcaactaattggcatcatcacagatacaacatctattgaaaagatgtcaaactgttgtgaagatatatcgaggccccgaaagccatggcagcagaccttctcagaagtttttggcactcgttggaagatcctgtggttcattcctttcaggcagaggcaaccactgcgagttccctaccactttgccaatcatgtctaaacagatggatggtgggcacagatgggtcctccatgctggcaatgcgttacaggttttatgataatagaactatgacagtcttcaagtcaattaaaatccacccaccaatcttaggcatcataatgtgccccaggctttattttaatagtgatcttgatcctgttgtgggactaatacaagatctatatttaagttttaaagcatgtttactttcaaattagctttccacagggatttcttgaaatgcttttgttattaaactcaaaaggcagtgattaggatgaaataattgtacataatttattttagtactgacagtgttacagattctaatttatggtaaatttcagatgtttatttaaaattttcacttttaaacagtaaccaaatctaaatttaattattcaggttttacaaaagttgatacaccttcttatagtataggtaaattttctttttcaaatccaatttaaaataacctttccttttaaatgtgctgcaacgtttttaaaaatgcagcagcataggagtgaacaacagcaacacaaaacgggcattggtttcttaggagtggcttgcttacgttttcttcttttttcttcaccaaaaccaacatgaaagtaccactgaagtaaaacaccaactacctaccttactataaaggaaatgttaaaatttttttcacaataattttttcaattttcactattactgttgtaattattgattgtgattaaaatatttgctcccaggagaactcctgaccagtgggcatgtattcctattttatcctaagattttaatgagcaaaaaggggagagaatttgcaataacttcacaattaccttttctagtgcagttatattagaatgcatatgtttttaaaatgctagtataactagatagtatataatgtacagtataaagaggaatattgtgcttttgaaaagagtatactttttacttttatttatgtactagtagatgtaaaatttcacattgaaggtttatatatattggccaactcatatagaaattttatttataggaagctactactaaaaaaagtcactaactttgtgtacctataatccctaaattaaaattaaattttaattggctggctgtaatttgcattgagagaccttttactagtagctagtgttaggaagtgaacctaaaataagaaaatataatgatctgtgtttatcattagccttgtacaaatgtaaattactaatagtgatgttcttttgcaaggcatagaacatttgtatgaaaagacatttagtatgctttgaaaaaaactcagcttttagtttttttccattagaatactgcaaaacccatatatctttttaaaaaatttatgtactcacagtctttcccttgaagagaagattgaaaaagtctactgttcataaaccatgctaacattttccttttagctagttttgaaagtaaggaacaatacctgggaaataataaaacagaaggttaccattgtcagccagttggctatactgtggttagttctttcagaaattgtaaatatcttgtagcatattctgaaataatagagtaagttcttctcagagatgttaatatcatgtttttcatgttctaattagaatactttattacttacaaactcagaaatacgaacagaaatacagcagacgaacatatttattggtactgaaaagagatgtagtaaattaaatagaagaaatatatttataaagcttagtgaaacacaaaattagaatgttcatgtcaggcacaagggtttggattttgtgcaagctaatttggccacatttggcctggtgacagaactgttcataaggaagtaatatatagataaggtaggtagatatcagttgaatgccttatattgtatacattcctttcaaataaagaccttgagaaaacagcagagccaagtgaagatcacctaaagaactttgtggctaatttatacttcatgtagtagcagtgggtactgggcagggtctctttcccactctgatgatttgtgctcttatttttcctagatttacctcatctagggcatattcttttccctcttcctctttacctttcctggtcctgatccctctgtactcagttcccctaaattattggactacaaactaatatactagaaaagcatacacttattttatttgaatgcagaaatgctgtctatcagtatatatacataagaatgtatattacagtatatctatatatacttaacactgtaactttcagtattccccagttagcgtacctaactctcctgtgggttttgttaattcttattagactactagagaaaaaccaactggcagtttgctaagcatatctgctggtgttgtttctgcgccctcttttggctaattgatgtaattatactggctctaaagatttactgccccataagtaaatagtatagccacattctgaacatatcaaaagtacaaacttaggaggagtgtatgtacaaaaatgtaaaattttatgaaaatgaacatgtttttatgatgttatttctagttcataagaatgtgatgactgctttgcttcatttatgtacgttcccattatattcttgctgtcaatcaatcacaaatttatatcagattaggataaactaagccattttatgtattttattttaaaccttattttggcagagtaattccttagaattggaaaagctgttactttgaaattaccaatttattacaaaacatagaaatgtattgtagctacaaagacaaccaagcattttctgtgttttaatgaatatctaaaaaactacatttagtttattttactcagttttgaaatgatttttttactggctctattgccttaaaataactaagagattaatgattctttgtataattttccttttctttgttctttttttttacatttcgcagagttatatctatagttttagtaacaatttcttatgtattctggataactgaaaacaactaaaggtgttgggcgttagaaaataattgtgagcagtaagattactgatgtaatatgtatgttggactgaagtatttctttataaacattctatttgatttt

SEQ ID NO: 673 - DNA, 5477 bp, Homo sapiens
tttattttttatggagaaggggtctcactatgttcccccaagctggtcttgaactcctggacttaagcaatcctcccacctcagcttcccaaagagttgggattaaaggcgtgagcccccatgtccggccaacaagacttcctcgtgactataatgtgagcataatattaatagctctgagagagagaagtgaaccagaagaccaacctcagtgtcaggaagtctgggcgtctgtcttctgcatggctgaagacatggggctttgggcaagtcatctgttctctttgaactttggcttcctcacttctgaaataggagggtcagagaagatgtttctttttgctgaaaagttttacagttctctgatctataccccttggtcacacacaaccaaaaagtagaaaacatgagtgcaatacttttccaccagtactcccagtttatacattatcttctcaaaccaataaggaacttctacaaggccctgttagtgatgtgttacaggtgccagcattagggaaactttcagactgttatatctattcgttccttcatccatgtatactattcattctgtatgcagagtaatttatatatgtacaattacatggcagtgaaagataatcagaaaaatgaagatttttttttttttttttgagatagttttgagacagagtcttgctctgtttcccaggctggagtgcagtggtgtgatcttggctcactgcaacctccgcctcccgggttcaagggattctcgtgcctcatcctcccgagtagctgggactacagacatgcgccaccatactcagctaatttttgtatttttagtagagatggggttttgccatgttggccaggccgttctcgaactcctggcctcaagcgatcctcctgccggcttcccaaagtaccgggattccaggcatgagccaccatgcccagccagaaggtttttttttaaaaaacacactcctgaactaacaattacaaagagctagtgacaatttcccaaataattatgcataacaggagcccatatattgttctcaaatcataaaccataactgattttgaggaaaagacattctgtcccactgatattcttttcatgagtaagatctggatctgtctggaggcacagaattaatttttgcatgaggaatcccaaccctaccatcattccatggctgaggaattggttattactcctatgggaaattgggaatgttgttggtaccccagccttctcttaagacaaaatttaacaaatgcatacatgctaagatgcttatactcataaggctttgtgggtctcctttctaaggggaatttgaatactaacaagaacaaaggctaaataccaaaagggggctttctaatggtagaagttgggatatcaggtagccacatagagcagggctactttgggggctggagactgcagaaacccttcagtttatacgtgtgagtaaacctaatcacacttgatgtattgctagtgaagtcccagccccctgagcctttgcagaaacccaaagaatgctaaaaagggcaggttttagttcctgccaattatttcatttactacaaatgccccgagttccgaatttacttccctccccaccagaaatatgtcattttggaggcttgtgaaaattaagcattaagaaaatcccgccttcatcctaatacactgcatccacaagtcccaaacaaaatcacttccttggcctacacacataactacctgtttctgtttaggtctgtgactcagaaagtgcctggaagaagtcatgagagggagtcgatcccatcttacctgccataggaagaatagggcctgctcagtagagttcagtgtgtgtgttgaaggtggtggttcttagtccttccctgaattcactaattcgcattgcactcactcttcctgatcaatgagttattgctgagaaatcattgtagtaagtaatacaggtatccccagtaaagccatccctctcctccatacctccgctgtcccttgggttttggctccaggatccttgccccatgtcccaaagaatccctaccttgggcctccctcctcctcttttgtcaattgcacttgaccttttcaggaaaaagaaatcaattgataccttagtcctaatgtttgacccttttctatctcagaatagagaagtccctgtatttgttctttttttactcaagtttaatatagaccacctaggcacagaagctccgtgctatattctgttgcctgtaattgtccttccatctaattgggaaaaggttactctattgaaccatctgctgattcccttaccttttcactcttttgtcagtattcctttaccagtaaattcttggttatctaggtcctgaagtttcattcatgttttttttaaaagctttaatttttcttaggaaaactgtttctctcatcttaaagcagactatgatcttttctactttgttatacaatctgaacataatgaacactctaaagtcaggcatggattttatcataaaagcagatcgtattaagatttttttaaaaaagaaccaggattgaggaatctgtagctaataatttaataattcaccagcatgttttgggctcccacttcatgctggccactgggctaggcactgagggtgcagaagcaaacaaatcagcctcctggccctcagatttgcattccagtgagtccattcataaaacctaactcaaagccagcaacacccccaaaagggctgttggaagctttgtagctcatctgtacagctgtcttgattcctgtacgggatcttactttcttgggaaaatatgttctaaatcctgtttccttgggccattaaaaatccatgctgtccctaatcaatatatagttatgtgtgaccttcttagaattaaaaaaatgccgctggacagcctttgaagggaaaggcagagaaatctgttttgatggcttgaaaataagtgaaaaggtttttagggaaagctaacaagctttcaaagatttcagatctgccagcattcattcattaaggcatgggattaggccaaaagagcctcctaccaagggagagacaggaaccatgtaaggagacctgtgagaccgcagtggaagagtattgaaatagaagccagacctgtagacgtatttgttaatatgtgtgccaagccaaagtacaggaggaggcttggaggcatggagttgtggtggaagcaggttctgaaaagcagaactctgaagctggctcattctcaccaagtcatctggcccagcctcccgcctccaagcacatcctgcctgcagagggtctggctagctgccttttcagctctcgagggatagagattctacaacctccctctgtcatcagttccagagccactcccctttgcactagaagttcttgctttcaaagaatgagggtgtgagggagggaggggtcaagaaacagagtgacaggggaaacaggcagaacaagtcagggcaaaggaccccagcatgaagagttgtggaggtggaggtggggaagcagcctcacatctcacacttccttccttctcttaaatgtgagcagctgactccaagccttgtggaaactctagaaggtagaaccagccatctggggaagctggccttacagatgccccgtctggcatagtggaggttcctgtgctctgagaacgcagtgtgaatctagacatccactgcagcctgggaagagctgtgttttcttcaaaagtctttaactttcacagtcacccctctaaagaaatgttctctgattgaaggcatgcttctattcctactttattgtgtttcatgcattctgccagagtaattacttttcataccaattcttggatgcagagaaatctctggtagtctaaggggatttcgatccaagtaaagctactatctcctattccatccagacttttccgtctgcctccattctctcagtcacatacctagaagcaagccagaaagcctgtccaaccaaaatcactctccaaagcccaagcactttattgttctccctgtctgttatcgagccaaggtgtatttggcctcattttatgccattagttgtctggctttcatggctctgcaccacattacagtcagagcaggaaggccagcagtggagatagaattatggcagaaacccagagtagaggcctctgctggtgagggagcctgcagcactctccacgctggtgggtcctagcatgcccaacagacccccatcccttcccatcagccttgggccttgagtctcattccaactcatcccctcccctttcccttctttccagtcccaggtgacacttgatgcctctgactcctttgaagagggcatcaagaagtgaaagaacaaagtccttttctgttcgggatctgggcccatcctgggagaggtttttggcagaaatggctgcagtggaaccctctgactgccagggtgaaatagtgctccagcaggctgcggtagactcgctgccagagtgggtcaggactggcccagaggacagggtcgtctcttgagagtcctcccagctccagggcctgattttaaagcagtaacacgaggatataggttatatacaggctcctggaaggcaggtgccgcagctcctgtgacaccccatatgcctgagcaagcttctccagcacaagagatgatgcaagtatgaatgggtacggggggagcttaaaacctgccaacactgagacttgatgccaggggccatgcacccgctctgccacctgctaggtctgtgcaatggtcagagcagaggtgtgtgatgagttcagctcccaagcacatccacacttaggaagtgttctgtgtgtttttaaataatccttaccatgtaaagattgtattacatttgtatacaaaatttttttgcattttacttttgtaatatttggggttttatagatttttattttatggccaagtatacttttgtaaggaaatgttgaagtcttgagtatttttattcttttaaaaaactatagttagtgtcaactgtgagcactgataaatattattcatgtgtggttttccttctttttaatccagactttttaagaaactgttttggcatagagctttacttaaaatgctgcttcattttacacattgtgaatactgaagattctaaaaaataaagatgcatttaaaatctctgtgctgttccattgtagaaatggtaatgtgcattgctttgccaaagtggtaattaaatgtttaatggtttagaactcctagttcacaacagggcttctcgtcatcacttgcagcgtgtgagcttccaaataagccgccatttctttggaaaacgcacgcacttaggcatggcgatctcctgttccgttaggaaatacggttatgttgacattatggttactgtgcttgtggttttgcaataaacatgtattgaaagc

SEQ ID NO: 674 - DNA, 3828 bp, Homo sapiens
tttatttttatttatatttcttttgagatagtcttgctctggttgaggctggagtgcagtggcgccatcttggctcactgcagcttccctagctcaagccatcctcccacctcagcctcctgagtagctggggaatacaggtgcattccactgtgactgctgatttttctttaacttttttgtagaggtggggtctcgctatgttgcttaggtttgtcttggactcatgggctcaagtgatcctcccacctcagcctcccagagtgctgggattacaggtgtgagtcactgggcccagccgagaaataaatttgaacagagcattctgtaaatggaacttatttgtggcacccttgttctgtggtatgctagtttgaaaaattctagcctacaacagttgatatgcaggccctgctgctctctgcccgttttttgagacggagtctcactctcacccaggttggagtgcagtggcacgatcttggctactgcaacctctgtctcccaggttcaagcgattctcctgcctcagcctccctagtagctgagattacaggtgagtgccaccatgcccggctaatttttgtatctttggtaaagacggggtttcgccatgttggccaggctggtctgggactcctgacctcaggtgatccaccgcgcctggcctgttctgtgactttcgacaaagcaaacaatttttggtttcttggaatttcatttctccccatttaaaagagaacgtccccctccatcgctttcatgcaagacatggacctacccttagcgtggaaattgagcttggaagtaaggtagtgtgtaaagactagattgattaaaattctggccttgatcacatcctcttacgattcttctgggttgggggagggtatgctgttttaattctaccagaatgagaagaatttttgctgctggaatcaacataaaacttggatgcagcgtgcggcagactttggaaagatctttcactatagcttgcttggataaaactggttttcccatattcctatccctgcatttctttcatctgccgtgagattgtccttgttagtcaagtcacagcatagctgatggggtaatagtaggagaacttaagcaggcttcctggcgtagagcagttgggcctttctgacaagcccattttcagtttctgtgggtcaatctctgcttttggaagtgtttttcaagtgtgcctgtgattttagagcagattttgtgagcagagggtcttcagttagtggacatcagttagtggactttcttcagtagtgttttagggctggcatgtagttgagtgatggcagcccttggcgagcttttacttgggaggatcattgttgccatgtcccagtagccacgagatgagataattgcaggccctttgctctttctgccttccatcattctgtcagatttgtttggaaaaatttgtctggggctgtaggacattgtttcttggaaatatgtaacggtacttcattggtgggagcagcgttcttagttcagtgcctggacagcgtgttccttagatattctaataatttgtagagcttcaggatttgagaccctatgattttatttcagccttattatgtaagagagggttggctgtagtctctcttgtcgagacttgatctctaggctatgtaaaatctgatcatcctggacagctctccagccaacagggagcacgccagtggcctgacactgccatgtattgccttgttccatctctttgcatgcctttgctttttctcctaggcaggcgtagtcttacttaggtgtattttttgaaaagtatgtcaagcattgtgcacagaataagtacccatctgaatgctgggttggttggtttggaggactgtttatttatgaatgtcatcttgtgttactcagtttttctgttattggtaaagtgaagaatgtttttgttgttgttgttattttatagtgtggggtgatcagccccagatttgacgtgcaactcaaagacctggaaaaatggcagaataatctgcttccatcccgccagtttgggtaagttggcctttccttaattaaaagaagttaatgctaagaatttctgtggtgcagtttgacttaagggtttttttctttttttctgtttaaaacaaagcagtggtaatttgtctactcttaaccattttgacctaatagctcaagtgttatccatatttcttttctctctctttaaaaagagacagggttggccaggcacagtggctcacgcctgtgatcctagcattttgggaggctgaggcaggcggatcacctgaggttgggagttcgagaccaccctgaccaacatggagaaccccgtgtctacctaaaatacaaaattagccaggcctggtggcacacgcctgtgatcccagctacttgagaggctgaggcgggaaaatagcttgaacccgggagagaggttgcggtgagctgagattgtgccattgcactccagcctgggcaacgagtgaaactctgtctcgagaaaaaagagagagagacggggtttcactttgttgcccaggctggagtgcagtggctgttcacaggtgcggtcataacacgctacagccttggcttcttggcctcgagcagtcctccccgctcagcctcttgtggatttgggaatacaggcgcctgccaccgtgcctggctatttgccacatttcatgtgttgagcttcaggttctgagaggcacatgagagcttagactggcagaaaaggggggtcgtgtccactttcatgtctgcccttttggctcactgcagatagttccctgtgatcccagatgagggccagaatcagttctaagcctaggcctttgggaaaacttagtttgggagtctttgtccttaaaagcctatctgagttcaaacccttgtttttctgctttaaagccatgagatcttgggcaagtcacagccttgatttcttcatccgtaaaagtggtaatagttcctctgtttatcacctgatttaattttggtaaagcactttatgagctgacacagtaaatgtgtatctttgtggttaagaatttataccctccaaattatgcgtctggtgccttggttgaaagtattctcacttcatggttgctgtattacaggtacggtattctcaccaaaatcatttctctttgtaattatgatactgattttaatgccgcacatttgcatactatatgcttgttacagtgatccccacagtaactcatgaagcagccactcattgtacaaatgaacgtctccatataatagtttagctattatacagtacatggcagaaacacaattcaaactcaagtttatacgaatactttcaagtctccttacctgagagcagaaagtgacatttaaatttaaaggagttcccagcctttgttttcagtgcagtttgtttcatggtgtaggcagaagtcagggctgtgtgattgtgtggctgggctctctggatttggctctttgggttgcaggagtcatggctcatacgctacatgaggcaccagctcatgtaggcactgtcagttcctatgtgccccacaggaaagcgcccttaaccactgatgagtgttgatgtttttctgcactagaaggcactatgttgaactattaaacttaccagcactttctttttccactccatagtttcattgtactgacaacctcagctggcatcatggaccatgaagaagcaagacgaaaacacacaggagggaaaatcctgggattctttttctagggatgtaatacatatatttacaaataaaatgcctcatggac

SEQ ID NO: 675 - DNA, 4172 bp, Homo sapiens
actccttggttttaaggctgagaaggactctgccagcacggagccatactactgcctctcagacttcatcgctcccttgcattctggcatccgtgactacctgggcctgtttgccgttgcctgctttggggtagaagagctgagcaaggcctatgaggatgatggtgacgactacagcagcatcatggtcaaggcgctgggggaccggctggcagaggtaaggcagaggcattgcgccgaggggctgaggacagaggccaggcagtagggagcctggggtgggtgcctgaggactgatcagcccttagaaccagtgtcttttttttttttttcttgagatggatgctgctggctttaacattatacgtattttaatattatgtatccccagattgcttgtgtacattatctttgaggcaaagaaaaaccttgaatggtgccacagttggctgttgctcttagagcctttatctctaccttatctctgttgtctctctttgcttgttgtgatgtgacattttcctcagtaccccaaaaaattaaaaacaaatttttatttcagagcccctcgttgtaatgctggtgtcatctatagattcttcatcttcctctgcatggaatgagggtagtagcctttgccctggggagagcctctcccttttcctgcagtgaacagtggaggaactagcagctgtatggtcccagctgctctttctggcctgtggagctttggattgacctttagggaaatcgttaattttaaggtctaaaatctttaggtcattaagtatggtccttcagagctcaggttgaggccaaaattgagctgcagagcagcagctgatgaaagtacaaaccaatcaagaatccagcctgtttcctcttgtcaaatttcccctggctgtggtccagatgagggagggtgtcctcatggttctaattcagggggtggaggctgcactgatgctgtgagcccctgcgtctgcctaagcatgcctgctgctttgggtcccaaggcctttgcagaagagctccatgaaagagttcgccgagaactgtgggcctactgtggcagtgagcagctggacgtcgcagacctgcgaaggctgcggtacaagggcatccgcccggctcctggctaccccagccagcccgaccacaccgagaagctcaccatgtggagacttgcagacatcgagcagtctacaggcattaggttaacagaatcattagcaatggcacctgcttcagcagtctcaggcctctacttctccaatttgaagtccaaatattttgctgtggggaagatttccaaggatcaggttgaggattatgcattgaggaagaacatatctgtggctgaggttgagaaatggcttggacccattttgggatatgatacagactaacttttttttttttttgccttttttatttttgatgatcctcaaggaaatacaacctagggtgccttaaaaataacaacaacaaaaaacctgtgtgcatctggctgacacttccctgcttctggttttcgaagactatttagtggaaccttgtagaggagcagggtcttcctgcagtgcctggaaaacaggcgctgtttttttgggaccttgcgtgaagagcagtgagcagggttcctgtggtttccctggtccctctgagatggggacagactgaagacagaggtcgtttgatttcaaagcaagtcaacctgcttttttctgtttttacagtggaatctaggaggccacttagtcgtctttttttcctcttagaagaaaagcctgaaactgagttgaatagagaagtgtgaccctgtgacaaaatgatactgtgagaaatggggcattttaatctaagtggttataacagtggattctgacggggaaggtgtagctctgttctcttcggaagacctcgttttctaaaggctggactaaatggctgcagaactccctttggcaaaaggcatgcgctcactgcttgcttgtcagaaacactgaagccatttgccccagtgtggtcaagcagccatgctttctgggcattttcgtcctcccataatttcatatttccgtacccctgaggaaacaaaaaggaaatgaggagagaaagttactgttaagggtggttaacattttttttgttttgttttgttttggttttttttttttgagacagagtctggctctgtcgcccaggctggagtgcaggggcgcaatctcggctcatagcaagctccgcctcctgggttcatgccattctcctgcctcagcctccagagtagctgggactacaggtgcccgccaccacacccggctaattttttgtgtttttacaaaatacaaaaaagtagagacaggatttcactgtgttagccaggatggtcttgatctcccgacctcgtgatctgcccacctcagcctcccaaaatgctgggattacaggcgtgagccaccgagcctggccggttaacatcttttaattgtttccaggattgagcaggttctcagctgggctctgatatcccgtgcggagttggacaagtgggcagcataaagtcactcatttcttaccattttattcccctcgattctcaatatattcagtaatgaagaatggtgccaccactcaagcaacaagcctcaaactcacccatgtcatctttttcttggatgattgcagttatttcaaaaatttgcatgcaaaatatacactcatcctacttcaagatggtggtggcaatagtcaggagaaggtagcattggagtcctggtttgattcgaaggatgaagacgaagaagcaagggaggaacaaatgaagaaccatctttgttcatgaataggaatattcaagattataaaggtatcaggtctcctaaaattgatctatggatttaataccattttcaatggaaattccaacagattttattgaatgaaacaagcaggtgtttatatggagtagcaaaggacttaaaattaccaaatgcttctaaatatgaaggagaggttggggacacgcaccctatgtgataccaagttttattgtcaagacagtgtcatggtgcagaggtaggcattctgagcaggggaacaaaataagggcctagaaactcacccgtgcatatgttgacctttgcaaaatgacctggtgacatggcaagtcagtggggacaggaaggaccactccctaagtaatcccagaacaatggctattcatgtgggaaaaaaagaaattttactttctctcaccttacctggtgataagttccaaatatgttaagggctttaatacaaaaagcaaaaattgtcagtgtttggatgaaaaaagccttagggcaggaaagaatctcttgagacataaagtagtaatcataaaggacaagatggttaagtcaattctgttaaaactcaaggcttatattaagcaaacacttgaagtgagaagatgatccacaacttgagaagacatttataatacaaataactgatgaaggattcataatcacaaatatagagaattcctatttaaaaaaatagaaaaatagtgaagactacacaagaggaaatagggcttttaaataaatagatgttctgtagcattggtcagggaaatatgaattaggaccacaatgagattccattttatatccataagatttgcaaaggttgggtctgacagtaccagttgttagatctgtagggacttgtacaacattgtggatgtgtaaacaggcaccactgctttaaaaaacaattatcccttacagacttgaacatttgcagaccttatgatcttgcttccaactcccacctgtatgtccagcaaactcttgcatgtggccactaggaggaatgtgtaagaatgttcatagttacatatttataatagttaataactggaaaaagtgaaatgtatgtctgtctacaggaaaataggtgaataattagatatatgtattcattctacgggatattattcagtagtggaaatgagtgaactacagctatacctcacaataagaatgaatctcagaaaatattaaggaaaaaagcaagtttgaagagaccacatggggcgtactatttttattgagcccaaaaacaagcaaaaccaaagaatatgtagtctaagcatacgtatacaataaaactatgctatt

SEQ ID NO: 676 - DNA, 4783 bp, Homo sapiens
gcgcgtggccgccatggcgcggaatgtggtgtaccccctgtaccggctgggtggcccacaacttcgggtgttccgaaccaacttcttcattcagctgggctgtgagcaggcaggactgccctcccgaagcaggtgcagaacgagcatttggggaaggagaagacacgtgtccgcacctgcagctggtggggtgggagggtgagctgcctgcagggtggtggggggcagcccgggggggctcctgaggatgcacagctccctcccaaggccagggctctgggcactggggtccaggagagagttttgctctgcccatggccaacaggtaggtacccagatgctgttctgtggtggagtgaggggaccttattccctggggcccagaggatgcccagctctgccaagggccttgaatgactccatcagaggaggtccggagccccagggccattccctgattcctgtcactttcccaggatgccctccctcaccgggtcggctcccagctccccttggagtgaggagggctggaccccactgagtccatcgcagaccccagctggccgggcgcatggcttcccgtctcctctctgggcttggtcctcttgtgtgaggggtcacggcccaggcacccatctcctctgggttgaggctggagggtgtctccgggaagcccctacgagtgcaaaaccttgctgttgatctcaagaccccgggcggagacgggaggaggagggtggaggaacgaagaccagattcctggaggacgattctgttgagcctccaattccctggactgattatttgcttaagtcagaactcccggccggatggggctggggccaggagatcagggagagggttctttcctggacaggtctgcttatcccaagggccaattagcagtagcagagcctcagcaggagcttgcttgtcctgggagcaggggtgagcttatctgctccgaggggtgccctgccgggcctcggggccttggagaggggccggctccgttctccgtctcctggaaagccaaggtgggaggtagcatctggaattagatgcggttgaggatgcttcctgactgggagggggttttgctcctccctgggaccacagcaggacatttgaagcaccaggatcccagcgggggcctgtggggaggcatggccatttctaaatgaggctctgggtacctggtggcccatggagcggggctctgggaattgcctcctgcgagcggccattggagggggaggtattacccccaccggtgtcctcagccagtccctcctggagtcctcagagccctcaacaggctctcacctggccctccgctgccagggctggaccagaggctcttcaggagcttgtgctcttccgcccccagagctccagcctggacgccttggaactggccgtcctgagctggacagccaagatgcgatggtggctgtgctgggctccagcccatggtggcctccaaggtggtgctggggccttaggggaaagggttgcttttcatggctggctgaggggatggcagagctgtcctccgttccgcctcctttacccatggatgcggccgcatgcgggtctccatcattgtcctatccttgaccatctggctaagactcagggacccacagcagccgctcccccactggctgtctgggaaaaggcccacattgccgggcacacaccagggtggccagggattggtcactgcctgaatgtccccggaccgatgcccgtgtgcccttgggcagccttcccctcggacaggctgtccaggctgggaaaccctgagccagagggattaagaagaaaggacagagtcgactgtccccttggctaatttgtgcttcatttagtgtaattttgctcagtggtcaaaacatagaggtgatgacaccgagggtccagacatgtcccatctccagggccaacctcctgcagatccccagccccgcccagccctgcctgctgcgccctgggcctgcctctgccctcacagccatcctgtacattcctgtgtctcagtggcgggggatagggggtgggggaagggtctccgatacaccagggggtgcagggaccctcagcatgggtgcccaggcagctctctatggaaatgcaggattgggtcaggaccccagagctgtgcagggccctctgtccccagcccaagtcctgagtccctcttgccagcctctgctgctccgcgtgtggtaggagctaccagtctggggtccgggctgggcgcattcgtgatgcctgcctggggtctgagcaaatcctccccacggggtctgagcaagtcctccccacggggtctgagcaaatcctccccacggggtctgagcatgtcctccccacggggtctgagcaaatcctccccacggggtctgagcaagtcctccccatggggcctgagcaaatcctccccacggggtctgagcatgtcctccccacggggtctgagcaaatcctccccacggggtctgagcaaatcctccccatggggtctgagcaaatccttcctatgccgtctgagcaagtcctccccatgggttctgagcatgtcctccccacagggtctgagcaagtcctccccacggggtctgagcaagtcctccccacggggtctgagcatgtcctccccacggggtctgagcaagtcctccccacggggtctgatcatgtcctccccacggggtctgagcatgtcctctccacggggtctgagcaagtcctccccatggggtctgagcatgtcctccccacggggtctgagcaagtcctccccacggggtctatgtcctccccacggggtctgagcatgtcctccccatgggttctgagcaagtcctccccatggggtctgagcaagtcctccccacggggtctgagcaaatcctccccatggggtctgggcaaatccttcctatgccgtctgagcacatcctccccaagctgtgaccgagtgtccctcctgcaggtggaggatgttgctaggatgcaccttgagggcaccccagcctcgccggagcgccccctcctcgtagcctggggtgtggctgggtggtctggggtcctgggtgccttgtgatgctggccccagggtccactcagcaccgtcctggtgtcgtcatcagctggaggcttcccggggcctgtgctgggggtggagagcagggagaggcagcagggttctcctcagggtggggttgctgggaagcaccatcccacctgtcagactggccttgactgtagacaccccaggtgacctggaaggacagacggaccccaggtgatgagaaaggaccagagtctgacctctcacccctcctaagctctgaactcccgttggcttgcctgacctccaagtcctcctggggctgaaccctctacagatgcccctcctgggccctggggtgggcccggtttagctctccattgtggctgaaacccccagggcttcagtgctggcttgaagagggggtggggctccccaggcctggggattggcagttttttcctcccctcttcccaaactttcagactggaccacttaagaataatgaggtccaggtggttccgcttgagcctggatcctcactggctgtgggactgagcttcccctgccggtcccacctcccaccgggagcagctaatgacagccagaggctggaaggtgaagctcccctcggctgtcaggcgggccgcagggcaggggctgggcaggccaagggcgccactctcctgcccaggccagggcacccgatcactgcaccacaccccttgtggccgtctgtccagccagggccctgctgcaggtgcttcccgtgggactgtagggagaacaatcaagacttctgcctccttggtcgagcagggctgcctccccatctcatctactggcaaggaggctgggcaccttcagggagcttcagtttgggaagagggaggaggtctgaggtggatggtggcgatggctgcgcagcagtgagaatggactgagtgccactgatgtgtgtgctccatggctccgtggctccgtggctcagtggctcagtggctcaatggctataatggctagttttgttacatattttcaccataataaaacaaaacatgtccaaggtgctacaaggagggaggagcccctggagcacccgcctgccatctcccatctgccaggcagcatccctccactggctctctgggaggggttcgaggcctccagcctccctgtggcccccatctgcctccaggagatttgttccctctctcctgccccgaaaccctcgaggcagccctgctcttggtcactgcagaggaagtggcccaggcttggcccaggccagctgtggcctctggaggcaagatgtggggactcacagtgttcgaaggccacacccccccgagcacatgggctccagtgcctctgaggcaaagagcaggcagcaccgtgcgcacagcagtgggagacacagcacagccaccagggcagcccccaggcagacggcgggcctagagagggcgggatgacacaagaaaggttctcctttggagacggcgaggtcaggcaggtgggagagggttcacggtgcttgaggtgcagagagaggatggtggaatggaaaacgtagggtgacttgtcggggacaggcccagggccacaactcgggcaggcctattgcccgagttttgggtcccatcctggcaggcaggggagagaattctgaattttttaatgaaacggatagttgagggctgg

SEQ ID NO: 677 - DNA, 3651 bp, Homo sapiens
caaggtgggggccgcctgctcagcccaggctccctgaacgtgtggctagctgagtttgcggaagaaaccaggagagtgccaacaccaggcttgcaagcaagaggctccctgactgcctgatcctggagcgcaccccatcctccctgtgttccctgggcctcagctgttccccagtgaccttggagacaccctgccccaccctggctccacaggagccctgcccatcaccgcctcagctctgagtctcccctggggacacaaccttcctcctggtgcagaggcgcaggatgctgcccctaaggcccatcttcctctgcagcatgttttgatgtcagctcattcacaggaaagaaacaatcacatctcagtgcccagaatggggaccaataggagaggtcactgggaataaagcccacacgcaccccagggtccatgggctccccagaaatgcaggtggcctccgccagagccaacaagcctaagttgctgatcagcccctccctgcttccctgtgtggaagaggaaacagaggcccagactagtagggctctgccgtggtggccggctgcgtccccagacctctggtcccagggctggctgggagtgcccctccctgtgctcacttcctgctctcctgggaaatggctcagggatggggcgtgtggggacagatgctggcatagctcacaaaatgcttgcacaagggacactccatggcaggtccctgcaggagagcaaagtcacaacattcagagattccctgcactctgaggcccgcagagcctggccgaccaagcgaggctgggaggatgttgcctgctggtcagggcagccctctgatcagggcggccgactgaggctgggaggatggtgcccgctggtcagggcagctgagcgtggctgggaggatggtgcctgctggtcagggcagccctctggtcagggtggccaagcgaggcagggagggaggtacccaccggtcagggcagccgaacaaagctggaaagatggtgcctgctggtcagggcggctgaatgaggctgggaggatggtgtctgctggtcagggcagctcaggaggtgctgcccaggaggtgctgtccaggcagagcctagggctggtgtgggtgtgccatgctcctgagaagtttctgggttgtggctttaatgttctcctgcagtgagaacgctgacacttggccaaagggtcctcacctctcccctagtacacttctgagatgccaggaaggttctgaacatcagattgattcctgggactcccctccagggtggccttactggagtcaggagcccctgccccactaggatggctctgcagtggcctgaggacagtgagcactgactggtcactggtgcaaagttgcccactgtgatggttttgaccgttgatgggaaccaagtgaaagccctgcagctatttctaggcatttcagagggtgcttccctgcatgtactctgctgcagaccatcctccctgggccaggagcccgctacacagtgggagattctttttcttctcttttgagcacttttattctctttttcttaatctctgctcctcctttgaactgagaaatgtgcaaatcttttttgttagttttgaggttgcttcttatgcatatttcatctggaactttcccctttgggggtgatctgttctatcagcctgcccgctgctagagaggccgaggtggtccggccagccgtgcgctgctgctggtgtctctgtgggcatgacctggtgagatatcattctgcatctgggggtccatcctatcagccctgtgttctagattccccagtgactgacatttagccagtctcctctgtcactctccagtgacatgtacacactgttggcacgaactgcagatgtcacgttctgtggctgagagcctcagtgtgcatctgtagtaggaggatgtcagtgaggactgtcctgtcgctgctgagctggcaccgactgtgcctggtctacactccaggtctgccaaacgacccagcaaggtccttcacaactcttctgatccaggatcacacatcacttgtgctttgatgcctgcttctgaacaattttacctcctgagatgtccatttttgggagtgtgagccctcctctcctggtgacagctggctgaggccgtccagcctcaggacacacagggaacggctgcataaggagatctggggcagggggcccaccaggatgttctgccctgtggggggcaacaccggctgtggtctgccggcggcatccagggacagtctgtctaggtgaggctgaggccgcccccactcgctccctcacccccatgctgacagcagtgagctgaccacagactgggggagccccacagggagactggcctccccagcacatgccccgcagtgccagacgcggtcatcacagaggcaggtacacgacaccacggacgtgccacgtacccgccatcgggaccaaggaccactgagaaaccatgaaggccatgcagcgactgtggtggcaggaccgtcaggaggccataggtgccacggctcccctctggtggttcacctgcccacctgtagctggggtggcccctccagtgcgctccccagagcagaacaccccccaggcaacacgtctgatgaaggccaacagcgtcagtcctctggtgtttggtgacatcaaagctgtgccgaaaggccttccctcactgctaacacttgaagggcttctgtccggtgtggaccctctgatggcgaatgtggtctgtcttatgcttaaagatccacctccattaactgcactcttagggtttcttcctctgaaaaggaatgaacacgggaaccccctcaaaggcatttttaaatgaagcgtggaaggcatcaaagatgtgctcttcttcaggactcaggcttctccatcattctctgttccttggaagcgtgagggctaaggagctgctgacttctctctcttggccccacttcaagaaaggcttgcttcccacacacctctccacgctcccagtgcgggactgacactctgcaccgggaggccaagggccaccatcgtcttgctgggagaaggtgtgacgtttcttggtcataggagggagtgtgatctgacaccagaggacttaatataacattgcagtgttaacatcttcactggcagattcatggactttccccctcctgaatgcatttcaacaccttgaaatgaacgatgcctcatgtctctgcagggtggacatagctctaactctctgaagctgagttggacaggtgaaacatccacagtctttcttgacctgaatcaagctcagagtgacagtgtttaagattatatgtcaagttctgtgtgaaatgagagaccatggggattcattattgctggagttgacggtattgcagttttataaccatctaataaattagcatttaatactgagagatttcatcttaaactcagaggattgctttgttttaaagaagatttttgcaaggagaagcaatggaaaccattcagaaaatgtgggagataaaaatcctattcaagaaaacggatcttggatctttgcattcacttgatttgtcagaatattattctgtgctaaaaaatagaagggattaaatgttaaaaatc

SEQ ID NO: 678 - DNA, 4210 bp, Homo sapiens
tccttggccttgcatggcctgtttatttttaaaagtgcaaacttgcaaccccaaacaagctggggccctgaggccgtcaacccctccagtctcccctgtgacccgcagtctgcgtcctgttcccagtttcattcctcaagtgcatatatttttatttttttattttttttttgagacagagtctcgctctgtggcccaggttggagcgcagtcgcgcgatcccggctcactgcaagctctgcctcctgggttcacgccattctcctgcctcagcctcccgagtagctgggactacaggcgcctgccactgcgcccagctaattttttttatttttagtagagacggggtttcaccgtggtctcgatctcctgacctcgtgatccgcccgccttggccccccaaagtgctgggattacaggcgtgagccaccgcgcccggcctcagtgcatatatttttaatatcttgtagttaccctgctgtatactgtcatcttagggaccttttaaacaataccagtatgagcgggacctaccctgctgctcagtgaccccaggcagtgtgtcctaaggtggtgtgtcctgaggcgtgcgacactctgtcctgtcccaggcactgtggtgggggcatccggtgtccaggtgcagaggcaaaagctgctcccgggtttcccagaaatggttccgaggcctgggtcccagagagccagtgcaggttggggggtggacctctggctctgtgggggggtctgttctgctccagtgggccgtgtctgccttgtcatcatccagacagccacagctggctcctgggtcccctcgtcaagcagcatttcccagtaacagtgacttcgtggaacacttaggaagcccttaaaaaccatcctcggacctctgaggcagggactccagggggcacagcacctgtggtggggacaggcaggcaggctggatgcggggagggcccgggaggaggagtgaggagccacgcacggaactgctcagactctcccagcaaaggtcctggcccttgtgcatgcctttagttacatgtctgccttagaggcaaagacgagccgtcacgggggacccaccgggtcaggggtctgcggacacgcttgcaggaggaacccaaggaaagggggtgggggtggagccccacagattgcgtcgtgggtgggcgtggagcttgcacagcaggcctgctgctgcctcccagggcgctggttcacagcacggtcccagcagggagaggctgagccggttggactagaccacccaaggtctcaggttgcagctccctggtgaggagaggacaaggtgacttctgggtggggtggggcatgaagatggaagtctgacctcgggttccaacttgactcaaacgagctgagctcctggagtttagaaagggacaccagcttcagacatcgtgggggctggcatggtttgctctcgtgggctggatgggagcctccctagcccctcctgatttcaggctgcagcctatgggtcactccaggcacaggtggggtgagtcaagatctcactggaggagtcactgagcaagagggccggtgggaggcaagggggcatccagggacaaggggccagctctgcccccacttccccaccccacccactctaatactgcagcccctgtgcttccaactgccccctccagcctggggcccagcccctcaccgccagagactgcccgcctcctcttgggcaagctcctggtgggctccactgaagccaaagtgggcccttgggggcaggagagccagagcaaggcacgctccacctagatttagaccgggagagacctggaggatgccaaccccagaggtcctggggcgagctcagtgctggggaccggaggtgccgtctgctgccagaatcatggtgtgcgtggtccctgcccagcacgggtcagccagagcgagccagggcagaaatgacggccaggtcgatgttcctgtcgggggctgcttgtcccaggaggtaatctgagtcctggccgagcccaaaaaagccactgccctttagagccagctgtgagggtgcaggaggcagtgcagagggagtgggacccacagctgctagcctccctccaaaccctcctgcctccaccagacaccaggtcagggggccacaagtgtgggtgccgggcagctgcccctcagctgagctgccgggccacccagctcgtgtccctcccctgccaggctgcagctgggatggtcacccgggcagcctgagtcagcctgctttctctctcaggtgaggcggaaccaaccctcctggccatgggaggggccgtggtggacgagggccccacaggcgtcaaggcccctgacggcggctggggctgggccgtgctcttcggctgtttcgtcatcactggcttctcctacgccttccccaaggccgtcagtgtcttcttcaaggagctcatacaggagtttgggatcggctacagcgacacagcctggatctcctccatcctgctggccatgctctacgggacaggtccgctctgcagtgtgtgcgtgaaccgctttggctgccggcccgtcatgcttgtggggggtctctttgcgtcgctgggcatggtggctgcgtccttttgccggagcatcatccaggtctacctcaccactggggtcatcacggggttgggtttggcactcaacttccagccctcgctcatcatgctgaaccgctacttcagcaagcggcgccccatggccaacgggctggcggcagcaggtagccctgtcttcctgtgtgccctgagcccgctggggcagctgctgcaggaccgctacggctggcggggcggcttcctcatcctgggcggcctgctgctcaactgctgcgtgtgtgccgcactcatgaggcccctggtggtcacggcccagccgggctcggggccgccgcgaccctcccggcgcctgctagacctgagcgtcttccgggaccgcggctttgtgctttacgccgtggccgcctcggtcatggtgctggggctcttcgtcccgcccgtgttcgtggtgagctacgccaaggacctgggcgtgcccgacaccaaggccgccttcctgctcaccatcctgggcttcattgacatcttcgcgcggccggccgcgggcttcgtggcggggcttgggaaggtgcggccctactccgtctacctcttcagcttctccatgttcttcaacggcctcgcggacctggcgggctctacggcgggcgactacggcggcctcgtggtcttctgcatcttctttggcatctcctacggcatggtgggggccctgcagttcgaggtgctcatggccatcgtgggcacccacaagttctccagtgccattggcctggtgctgctgatggaggcggtggccgtgctcgtcgggcccccttcgggaggcaaactcctggatgcgacccacgtctacatgtacgtgttcatcctggcgggggccgaggtgctcacctcctccctgattttgctgctgggcaacttcttctgcattaggaagaagcccaaagagccacagcctgaggtggcggccgcggaggaggagaagctccacaagcctcctgcagactcgggggtggacttgcgggaggtggagcatttcctgaaggctgagcctgagaaaaacggggaggtggttcacaccccggaaacaagtgtctgagtggctgggcggggccggcaggcacagggaggaggtacagaagccggcaacgcttgctatttattttacaaactggactggctcaggcagggccacggctgggctccagctgccggcccagcggatcgtcgcccgatcagtgttttgagggggaaggtggcggggtgggaaccgtgtcattccagagtggatctgcggtgaagccaagccgcaaggttacaaggcatcctcaccaggggccccgcctgctgctcccaggtggcctgcggccactgctatgctcaaggacctggaaacccatgcttcgagacaacgtgactttaatgggagggtgggtgggccgcagacaggctggcagggcaggtgctgcgtggggccctctccagcccgtcctaccctgggctcacatggggcctgtgcccacccctcttgagtgtcttggggacagctctttccacccctggaagatggaaataaacctgcgtgtgggtggagtgttagg

SEQ ID NO: 679 - DNA, 4539 bp, Homo sapiens
aggaatttccacaccggcatctggtactcgtgcgaggaggagctcagcgggcttggtgaaaaatgtcgcagcttcattgacctggccccggcatcggagaaaggggtcctgtggctgtctgtggtctccgaggtgctgtacattctgctgctggtggttggcttcagcctcatgtgtctcgagctcttccactccagcaatgtcatcgacgggctcaagctcaatgccttcgcggctgtcttcacggtgctctcaggcctcctgggaatggtcgcccacatgatgtacacgcaggtgttccaggtcaccgtgagcctcggtcctgaggactggagaccccattcctgggactacgggtggtccttctgcctggcgtggggctcctttacctgctgcaaggcagcctctgtcaccacgctcaactcctacaccaagacggtcattgagttccggcacaagcgcaaggtctttgagcagggctaccgggaagagccgaccttcatagaccctgaggccatcaagtacttccgggagaggatggagaagagggacgggagcgaggaggactttcacttagactgccgccacgagagataccctgcccgacaccagccacacatggcggattcctggccccggagctccgcacaggaagcaccagagctgaaccgacagtgctgggtcttggggcactgggtgtgaccaagacctcaacctggcccgcggacctcaggccatcgctggcaccagcccctgctgcaagaccaccagagtggtgcccccagaaccctggcctgtgtgccgtgaactcagtcagcctgcgtgggagatgccaggcctgtcctgcccatcgctgcctgggtcccatggccttggaaatggggccagggcaggcccaagggaatgcacagggctgcacagagtgactttgggacagcagccccggactcttgccatcatcacatgacccctgctgggcacagctgcgatgccaggagacacatggccactggccactgaatggctggcacccacaagccagtcaggtgcccagaggggcagagccctttggggggcagagagtggcttcctgaaggagggggcagtggcgcaggcactgcaggggtgtcacacagcaggcacacagcaggggctcaataaatgcttgttgaacttgttttcttgcggtgtatggaggccagttgctctgtgggctgtggctgccctgtcattgccccaccccattactcctcaaggaggctgaaggtgacagcagagactgtgcagaggccagggccagacactgcagggtggcagggagggagcacagagcccaggctggacacaggctggcagggctgccttgtattccagagagtgggcaaggcaggggccaggcaagcaagagatgtggggcgagcaagaagtgggcccccaaacccaagccctaagcagggagggtgaagaagccacatttctcttcagagctcagcaacatcacaccaccctgaccctgaggaggctttaccctgtgcctagcaccacctttacagaaaatcccagggcttagatgcctggagaaacagattcttattataaagaggaggaaaattagggtcacagagatgaatgaagtaacttgcctgtgattacagagctagcaaatggcagagatggggtttgaatcaggactcctgactccaagttcagtcatttcccaagaggccttattccttcccagaagaatttctagagcttttccccacgtagaatatattcttctcctttatccttccatccttccatccatcatccatcactcatcaagccattatccattatccatccatccattcatcattcgtccatctattatccacccattcatcatctattatccatccatcattcatcatccatccatcattcataattcatctttccactcatccatccatcattcattcattcatccatccttccatccatccatcatctatccattcatccatccatttgccacatccactcattcatcagctatccatcatctatccatccatccatccatccagcatctatcactcatccagctattgtccattgtccattcatccatttttcattcatccctccatcatcattaatccattatccacccactcatcatctattatccatctatagtccatcaaccatccatccttcatcatccatccatccatccttcatccatccatccacccatccatccatccatcatctgtccatccattatctatccattcatccatccattcatcatccacccacctattcatcagctatctatccatcatccatccatccatcatccatccatccatccatccatccatccatcatctatccattcattgtctatgctttcatccatccattcatcatccatccacccattcgttagctatttatccattatccattcctccatctatccatcatccattcatcccttatccattcaaccattatgcatttcttcatttatccattatttatccttccatccatcatccatcatctttccatccactatctatccattcatccatctatccatcatccatccatcctttatccatcattcatcagccatcatccctccatctatccattatccatcatccactcatccattcatccctccatctgcccattatccatcaaccatccatccatccattatccgtcatccacacatccattcatccctccatctgcccattatccatcaaccatccatccatccattatccatttctgcattatccatttattctttatccatttcttcatctattcatcatctatccatccattatccttacacctatctatcatccatccattccttcatctatccatcatccatcaattatccatccattcatccatccatctatccatcttctattgattgcttgtcatccttccttgtatcagacttccatccatcctccttccatgtgtcacacatcctcattactcaaccatccagctgtgcatccatctattcactgatatagttcactgtgcccctactatgtgccaagcactgtggtaggcacttgaggtgggatgctggagcatccagagagggcatctattgtcgtgagcctgggttcagattccaccttctccacttgtgaccttgggcgagttacttgacctttctgtgcctgtttcctcatccattaaatccggataatcattatacctacctcttcaagctgttgtgcaaattaaatgagctaacatatttgaagtgtctagaacagagcctggcacaagtaaacactttgtgggtgtttactaacaggacaacaaggggaaatcggggctgtgggagctgtagtctagggaggctcctttgagaaaatgatgtctaagccaagacatgaagattgtctgggcatcagccaggcaagagtatagcagggaaagaaagtacattagaggactttaaaatagtcccaatggcaggtgtggagagcagggaggtcaggaggcagttgtgggaaattaggcatcagagggcagtggagccaggccaggaggaactggaaaccttcttagggagcttagagtttaccctggggcaatggggagtgggcagtgagatgcttttagcagactgggatgcgcctgggtgtacatttgaggaagatcaccgcaactatgggcacagaatagttgtgggagatgcttctcccttcctcatccctcttacactcaagaaagagaagaaagtgggctggcttaggaaagttgccctggggaggggaccatgcgggcagattcaggaaccaattaggagggaatagactgagtgggagaagaggaaagttggtgacgactctcaggttacagggtcagcttgggggatagggaagacggagacttcgtggttcagatgtcttgagtctcaggggctcaggggacagccagctggaggtttgtgctcattcattcacgcattgattcatcaagcgaacaatttgttaattcactttccattcattcagtaaatattaatgacctactaggtggggcttaaggcggggctggaaatgggcctgggagagcaattatggtccagctctactgaggccttgaatgtcagaacaaggaatttgggctttggcctcatgcaagagagggcggctgccatatatgggcctgggcagggacagatctgacagggatctagccctggccaccaggcatctaggagctcttgttctcacccagggtccttctgaagttggcgagtggaccgcaggaggtccaggagatgattgtagttgacacatggggaaaattttaatctattttaatagttgtgtttatgtaaatgtgtattagaaaaaaatgtacagtgggcacatcagtgctatgacttcacagacgttactgcttaggatgaaaccaaaataggcatttaagtaaaagaaaaaaagagttggcttaaagaaaaatattaaataaataatcgtg

SEQ ID NO: 680 - DNA, 3413 bp, Homo sapiens
ggtttgcaagaggaaggcagacaaccccatcggaaggtgggcggaggacatgaacggacacttctcaggggaggacatttatgcggccaaaaaacacatgaaaagatgctcatcatcactggccatcggagaggtgcaggtcaggaccacggtgggataccatctcacaccggttagaatggcagtcgttagaaagtcgggaagcaacgggtgctggagaggatgtggagaagtgggaacgcttttgcactgttggtgggactgtagactggttcagccgttgggggggtcagtgtggccattcctcggggatctagaggtggaggtaccatttgacccagccattccattgctgggtatgtacccaaaggactatggatcatgctgctatagagacgcatgcacgcgtgtgtttattgtggcattattcacagtggcgaagacttggaaccaactcaaatgtccagcaatgatagactggattcaggaagtgtggcgcatgtacaccatggaatactatgcagccatagaaaatgatgggttcatgtcctttgtagggacatggatgaaattggaaatcatcattctcagtaaactatcgcaggaacaaaaaaccaaacactgcatattctcactcataggtgggaattgaacaatgagatcacatggacacaggaagggcaatatcacactctggggactgttgtggggtggggggaggggggagggatagcattgggagatatacctaatgctagatgatgagttagtgggtgcagcgcaccagcatggcacatgtatacatatgtaactaacctgaacaatgtgcacatgtaccctaaaacttaaagtataaaaaaaaaagactgttgaatattagcccccaatttcttctggcttatggggtttctgctgaggagtccactgttattctgatggacttccttttctaggtgacgtggctcttaacaattttccttcattttgaccttggagatactgacaattatgtgttttgggttgatcttctcatggatcttactgaagtcctctgaatttcctgaatttgaatgttggcctgtcttgctgggttggggaaattctcctgaatgatttcctgaagtatgttttccaacttggtttcattctcctcatttctttcaggtaccccaatcagttgtaggtttggtctttttacataattccatagttctctgattatttttcattccttttcagttttttctctaatcttatctgcctgtcttattccagcaagatagtctttgagctctgagattctttcctctgcttggtctattcagttatttatgcttgtggttgcattgtgaagttctggtgttgtgtttttcaggtccatcaggtcatttatgttcctctataaactggttattctggtttacagttcctataatgtttgcatggttattagcgtctttgaattgttttagaatatactttagctcagcaaaatttgttattacccaccttctgaagaatacttctatcagttcatccacctcaagcctccacccagttctgtgcccttgctggagaggtgttgcaatcatttggaggagaagaggcattctggctttttgagttttcagcatttttgcattgattctttctcatcttcatgagcttatctatcttcgatctttgaggctgctgatctttggaaggggtttttgtggggccatttttgtggatgtttttgttgttgttttctgtttgtttgtttttctttaaacagtcagacccctcttccttagggctgccgcagtttgctgggggtccactccagaccctattcacttggtccctcccctacctggaggtgtcaccagtggaagctgcagaacagcaaggatggctgcctgctccttcttttttgagctccatcccagaggggcactgatgtgatgccagcaggaacactcctgtataaggtgcctggagacccctgttggtggtctcaatcagttagggagtatgtacaggatcggggaccacttaacaaagcactctggctgccccttggcagagagggtgcactgcactggagggaatctcccttgtccagaatgtccagacccttcagagccagcaggcaggaaagactaagtctgctgaactgcagagactgtggctgtccctccccacaggagttctgcccaggaagatcagagttctgtccataaacctctggctggagttggtgaaattcccacaagggggccccacccaatgagtagggatggatccaggttccacctaaaaaagcagtctggccatgatctgccacagctgctgtgctcccggtctaaacctccctgtctccccagcaccaccaggggaaaacagacaactgatgccacagtgatagcaaccaccccttcccctgggaactcagtcatcttagacagtctccagtctgctgtcactggccacagcctgagcagtgatgagagtctgcacagctctgtgcttggcacccaaggccctggtggtgtggactcacaaggggatctcttgatctgtgagttgcacagatccatggaaaaagcatggttcctcaggaaagggagcacaatcactcactgcctcccttgactgggggtgggagtgccccttgtcccatgcagctcccaagtgaggcattgctccaccctgcttttccttgctccctgtgggtcaggccaatcaccttgtcagtcccagtgagagaatctggatacctcagatgaaggtgcagaattcactcgccatttttgttcttctagatgggagtcacagaccacagctgcttctaattggccgtcttggcacctcctcatttaaccttcttttctcatctaaaggggataaaggatgaaactgtcccaaagaaaagtttataaaccaattaagggagaaaataaaattcaactaggcttgcagaataatcagtggcaatcatgaaatccacttcccaatttggcctacttccttgtagctagttacttcttactcccccaagatagtgtagcccttgtcacaagactgtgttccttttcttttctatagataagatctaaggcacatgagatgatatgctttctgtttgagtttctcctttatgttacgcatactgataaaattgttgatgccagttgatctgaaggtcccagcaaggagccgactcacagaagaatgaagttttcacatcatgatgatttaatcttccttgacctgagcaattgacaaccccaattctccagaacctcacccgccacaatccccttaaaaaccctggcccagaacccctcaagcagacagatgtgaagcttgaggattccttcatctctttgcccaatggcattgtgattattaaactctttttctgctgc

SEQ ID NO: 681 - DNA, 3682 bp, Homo sapiens
atgtgggatctggagatgtaaacggatgcatggaaaagtccaaagcaaacacaagccatgtctgggagcagggccagagggggcccgtgggaatgctgtttagctctcagagcctgagatgggttggaactgcagtcagagttctttttccatcccttcggaacccaccactccctaccccacctctcacagcctctgaccaccctgcagagggcccagcttcctgctcaactcctgccctgaccgagagggccaactcttccagttctattcaaatccacccatgtttcatttatttaccaggaaaaaaaaaaaacaacctaacatctactttttattgaatactataatgtagatattattcccctttttacaacagaggacacggaaactcagatgaatttagcaacttaccctaggtcagtcacacttccagaaactgacagagaggacctcacatctagatcttccggcctccaaaatctccctcattgtgactccattctcctttcctcctcttttgccctgctggagggaggggaagagctgcatctcaccataccctcctcattgaaatgatgtgacatctgggacttgctttagtgtaacctagtgcagaaaagaagtgcaaggccaccaatgaaaccggtgctgactgctaaagttgagtgttgggttcattggagctccatatactactttaacatgttttaaattctcataataaaagagtaaaacaatatatcctctgcaaagttctggttagggcttatgggtatagaaacacctagtatgactggagcttcagtgatgatagagatcgtcagaaggttccagaacacagagctgcaagggactgcagggggtcaccaggtccagtccctgccttagagcaggacttcggccttctccagacacatcaacttgaaacaaggccaaggcctccctcctccccgtgattccatctcttggtgtgacgggcctcaacttagctgaaaaaccagccaaggatggagaaggctgcttcctccgatacaccttccacgtgaagttttaattgtctgtctctctgtgttttcccctttggcagatattccaggctcagggcagctatagtttcctggtctgtggcgtgatctttggttgtctggcttttaccttctatatcttgctcctgtttttccacaggatgcaccctggactcccatcagttcctacccaagacagatcaattggaatggaaaactctgagtgctaccagaggtaaaactgggtgaagaaggcaagagaagactttcagcctcttgatcaccagcacgaccatactgtttcagaaagctgggtggtggtggaggcgctctctcaatggctattcaagtcttctccactaaaacttggttgggtagaggaaattaaattgagtcctggtacctggtcaaaatcattagaagtttacctggcttctcaagttatcttcttccctggttcagactgttggtaagagctgtccagatacccagatgggaaggaaggagacagccgcgcgcttcactccatttgtcacctcatgcatggaccatactctgggtttgagatcattcttcattgaagtttgtaaaaataggttgaaattgtaaagctccatgatcattgctatatgtagatatatttcaatttaagcaaaacaagctgcaagttattccctggcatgctcaaaggattttcgtgcttttcacttaatagtccaaagtctcttaaattcctgctgcagacatcaatagcttatctatattctcaaacaccaaaaggaaaagttgaatcttgctctctttggtatactaatgtagtggtatgctaagctggctcataccaacttagaaaagctgattgtaaaattttcattttgacagctggttattaaatgcagccattattaaaaatcaaatcatacaaacttataattaaatcaattacatttaaaacaaaggtaataaatattcaaagcatatcacttcctaatttgatcttgatgctcttgaggtaatttacgtccatggtacctgtgtggtggaattactatatatgatggtgtgctactgtgcaccttgtctcaactccactcttcgtgatagcatgttggtagcttgaaatcagcctggtgggagtattaccatggacactggcaaaagctacagatcccggagagccagtggttaaacatttaccagcataccactgctagtaatcaaggctaactggtccagaaatcgcccaggagaatgaaatggatgttccatttttttctactgacattgactagcatataaaaggtatagaaacagcactaagactttctgaaaatacctaatgaaaattttacatctttttttgtttttgtttttgtttttgagacagagtctcactctgttgccaggctggaatgcagtggcgtcatctcggctcactgcaacctccgcctcccagtttcaagcgattctcctgcctcagcctcccaagtagctgtgactacaggcgcatgccatcacgcacagctaattttttgtatttttagtagagacgggatttcaccgtgttagccaggatggtcttgatctcctgacctcatgatctgcccgtctcggcctcccaaagtgctgggattacaggcgtgagccactgcacccagccaaaaattttacatcttttatagagggaaaaaaactctttataccatggcaaggccttttctttcacaaaaagctgggcctactgaacaattcaagctgtgcagtagtagactgaaagcaggatttgttgaggagttacagctcctgtccagagcaaatcctgtagtgatacaaggagaatgtaaacttgccagcttagacagggatcagtcctgagactgctggcagtagcaaatggctattagagtaactgtataatggttttgcctgcactttctctatgtatatacaaatgtacatgtataaatataaaaattaagtgatcatggttcttggtaacctgtcccaagtgctgtgattcacacgcctgacactaaaaggttcttcctggtccagtcagccagctgtgaccaccagcagcacagctgagtgctgagaatctggctggaaagagaaacgtggctcaagtgctggctcaccttctagctgtgtggccctgggcaggttactgaggctcttccaacctcacttttcacatgtaaaatggcatttctaaaagtacctaccctacctcaaaggaattctgaaaaaagtaagtgaatttgtataaagcagagcactcacaatatgcctgacacacaaactgcttaataaatgttagtaatttttaaaacctcctcataagcggcttagaaattattcatgtttggtacatatttattgcaagtcaagcagatccaacttttttgaaagctggtggtctaggagtatagttttaattatatttgtaaatactcaaaagtattagatgccagtctaatttaaatgcagtctgactgtagcgagtaactgacctgggcaatgaaaaagcagttgtatttttcttgtggtttttcaagaaaatatcctttttatacagatttagaaagaagaatcaatggctatatcgaagttgattgtgactaatttgttaatacagaaaacaacattaacac

SEQ ID NO: 682 - DNA, 5582 bp, Homo sapiens
atatccaggactgcgccgggagtgcccctcactgtctcagcctctgtcctgtctgtggcatgtgcatcattctgaggagaaggctggattttgtgctctgccctgggagcaggtgttgaactgcacccacttgtgcacagtgtcagccctacccccatcgctggcagctgacgccaagcagaactggcctgcgtacccttgaaatcctgttcaagctctgcctgccgctcgggcaggccccaggctgcctcctgccccaggccagcctgggagcacacttggtgcctgggagcacacagagggagcacacttggtgagcggagaagcttctgcgcagcctactctctctctggggcctcaaagggcccagcaaggcaggcagggagcatcatgcacctcttccagatgaggcccccagctggcgagcaccagaacctggagcctggcccctcctcagcagatcagacctcccagtccccagcacctgtggagggcacaggaccactcccttctagagactctgtgtctccaggtgaggccgagaactcatgtttccccagctccctgcatggctctgttacacaccaggctcaggacttcagctcggccccttctagcctgcggctcccgctctggttgtggagagtgggtagagcgggcgtcgtgtcgccctgtgtggggcagttacagcctgggcttcctccaagtcagatctcttctcaagggaagtatcgcggcgcgtcagttatgtttgcatagaggtccctgcttgaaaaacattgatttcaccaccattgtagggtgtttgggttactctcttcttttccatttaacggtatgttgccaaatttttacacacatcttagaatgttttcttaagataaaaatccaagtagtgaaattacctgatcaaggaattggatatattttccccaggttgcgcttcagaaaggctgtggacgaagtgttaggagcattcctgtttcaccgcagccccccagaactgggtctgcatcaaatttgtgtgctttgccgagttagtaggtgaatagtggaattgcgcgtgtctttatgagcacagagcgctcattggccggaggtgcatcttcatgagtacgttgctcatgggcccgtccttgcctggataggaggaacccgggacttgattggtcttgccacagcctggtggtctagttgctttgtggggtgtgcagtcctggggctgcgggaggggagtaacccttagtaacctgtgtgtctgcccctccacagaactgtcagaccttcagcagcctcagctgcctgagcgcagggacagaggactgcggtccccagagccccttcgcccgccacgtcagcaacaccagggcctggaccgccctgctctcagcctccggcccagggggcgggacccccgctgggaccccggtccctgagcctcttcccccttccttcgacgaccacctcgcctgccaggaggacctgtcctgtgaggagtcagacagctgcgccctggacgaggattgtggcaggagagcggagccggctgcagcctggcgggaccgcggggcccctgggaacagcctctgctccctggacggcgagttggacattgagcagatagagaagaactgagggggtgtgggcccaggcagggctggggtgtgctggcatcgacagcccccactctgggcactaggtgggcccttgaaggggagcccaactcgtgggcctgatgaaagcttcctgagtggtgtcgggtcccagagagggagcccacctgctgcctgggggagagcctggcctggccgcgtcatacagcgggtgtgtcagcctctcaccggctccccgagcgtggcagccaccaggtccacagaactactgcagcccagaggacagctttgaagtttgcgtcttttctgcctctttccctgtgggatgttgggcagtctctgttgtccccggcagagctgggcaccgctctgtatccccctggtggtgggggctgtcagggagggcctggggtgggggccaggggccatctgctatgtcagggcccttcttggcctcactcaggttcacttctggggagtcggccccgcagcttctttcactcagttttactccgtgccttctctcccaggtctccctgcttcaggcttgggaaggttcgggagatgcttccttctgtaacaccagaaccatttggccttaattccaatgtgagagacagaatccctggggtgctggactggccctccagagggtaagccatgtccggagtctcgggcccaaggaacgatttggagggtgcttgttagggcctcccgtgttgggtagaaatttggtggatctgttggctgaaaagacggacttgcttgcctctcctacagcatggagaggctgaccccatggctctgccaccgttggggcagggttagcagatggcagcccttctctgtggctgacaggtcactgagtgataagcatggttggttccggtgagtgtagggatggcacgataccagggcagcctcttgaaaacggcctcgggagacgggagctgcgagcaggtgggcagatgagggccctatgcgcactcaggggtgaagggcgtccgctggccactctgcaggggcccctgcaggattccaggcacctcccgtttgtccttgaggactgctggctgtaaccagggcacatcacccacctcaagacaagcccacgcccttgtcagcttagggggagcccagtcctgagggctgcatctctgttgtaggcccagccaccggcacaaagctggattcatgctccctgcccctaccccaccctggctcctcaccctggggcatccgaggagcctagccccctgagggtttgctctcctctcaaggtttgtagctcctctccggctgccttgcagacaccaccacatgggctctgctctatgggaatctggcttttagcgaatgtggcgtcttctgcaaacaatagcaattgggctggcttaggagcaagtggctcattttcccataaggctaaaaataactggtgcgctcccttgtgttggctgacacgcgcgttcaaagtacttttgtagtcactttgcttttgctcgtcttcatggacgagtgaacgcctcgcttctgcaggttgagtccagatgcttctcaccttctttctcctcaagaaagatgctttttgggaaacgttgtttaaatcttatttttttactacatcaaaaggatggtggttcaagttcccaatatgtgggtggcacttcttaaaaatcagctttaaggagctggcagaaagcccccagccccacagccctgagagatggtgttgctagctcaggtggctgacacatggggtatgccgggcactgggcaggtcccagagccggggaaccagctcacctctggttgctgtagctcctgccggaggcatgtctacttgtgatcccggacagccgaacccaagagctggtggctctgagcagacagagacatcttggcctgtccctgcctgggggtcatggagaccatgtcttcttagagcaaatgtggaggcggccagggcagttgttgggtgaatgtggagagcacatggccatgtcttgcccccggagtaccactgggcgtggggggtcctggcaccacatgcccggtgtggccgagggcacacagcctctatagcaggccttcctgtggaaggcagaggcagtgagggaggtggacggtgccagctgaggctgaggcatgcagcagcccccagctacctttgcttagggctggggtgggaggcacatggtgacaggtatatgtcgtgggactggggtgtgggtgacctgccctcaaaccttgcctgccacctccccattcaggcctggtggcaggaagggacaagctgtggagctggctgagtcacagccacctccccacctccccgcaagctggtcccatcgaccagcaagcccagccccagggcgcttagggagaaatgacccagcctcctcagaccccgcctgcctgtcctgtgcccaccacgcagcagtcaggggagaaaatggtggctatcccttctgcttagagaaagaaatggcctttagctggtttcatgtttgtgttttgactggagggagtagaccctatctataaggtgccaccccatcatccaagctgccacactgcccggagcagcctgttcctgcactccaccctgctggccccaggacttctgatctcagtcctctgggagggaggttcgcctaggaggtgccccccacattggtgtccccatgggcagcaggcagacagctcacccccaccagcatgatggccccagctgggggcagtggcaggagccttacttttgtcacagccttgcccacaaaccctgcctctgaggggagactgaggaagggcagagctagaagcaagccgtgccaggccatctgcctgctcatggggtcctaaagcgcgggctaagcctgcaggaaagccggggcggtggggggggcttagtgccacatgcaccccactcattccaaagccaccaaactgccaggggctgccgtccacccgtggggcccaggggctggggccacagccttgccattttcgttgccataccctcttgccttactcgcggtggaggccggatttgcacgggcagacgtgcacctgggcccgtggggagcttgttctgaccagacgtacagattttcattctcagaaagccttacttttcaaccaaatttttgtagccagttttgtgaatttgtacactgaaagaaaatttaaataaaggggaagtccacattaaaaagaaaacaaaacaaaccctaactaacttccaaatgggtctcctggtgcgggggcgtgagtggccgtgccctgggtgtgctgcctgtctgagcaagcttccctagctgtggaaccccgggccccctgctgcgggctctgccttggtgtcatgcctgctgcacccccgtttccactgacgtgccgtctgtggctatgggggtggtcactggaatgacggtcactccagacgtcagccggcagggatgcagcaggctggccgcgcaccggggctcgggcaccctctggccccacactgacaatgatgccacaccttgccatgtccacgctgttggtcaaacccctctgtcatgcctctttaaagagaaaagaagagaaagatttttttttttttaatggcagaccgaggtggagatcttgtagcctagataggatagtctgaccttctagcatagtctttttggcaaatgatttgtgttttcagtgtgtggggaagctgtcctgggggctggggcgacagatagcacataggctgtttctggggctgcaggggcttccctgagctggatgttgtgggtgttgccgtgcttcaggaagtgtggcgaccagaaagcgtagacccggggcccagggtctgcccgcccctgcagcctggcctccccgcacaggctgtggcttgcactccagccgctctagtctctcaggaatttgcttgttacttgtactgtgtaaataaagcttcctggttcaataccc

SEQ ID NO: 683 - DNA, 4510 bp, Homo sapiens
aatgtaacagtttgcaaaccgagaggagttgtgaagggcgcgggtggggggcgctgccggcctcgtgggtacgttcgtgccgcgtctgtcccagagctggggccgcaggagcggaggcaagaggggcactatggcagacaaagttaggaggcagaggccgaggaggcgagtctgttgggccttggtggctgtgctcttggcagacctgttggcactgagtgatacactggcagtgatgtctgtggacctgggcagtgagtccatgaaggtggccattgtcttgaataaggaatctcggaggaaaacaccggtgatcgtgaccctgaaagaaaatgaaagattctttggagacagtgcagcaagcatggcgattaagaatccaaaggctacgctacgttacttccagcacctcctggggaagcaggcagataacccccatgtagctctttaccaggcccgcttcccggagcacgagctgactttcgacccacagaggcagactgtgcactttcagatcagctcgcagctgcagttctcacctgaggaagtgttgggcatggttctcaattattctcgttctctagctgaagattttgcagagcagcccatcaaggatgcagtgatcaccgtgccagtcttcttcaatcaggccgagcgccgagctgtgctgcaggctgctcgtatggctggcctcaaagtgctgcagctcatcaatgacaacaccgccactgccctcagctatggtgtcttccgccggaaagatattaacaccactgcccagaatatcatgttctatgacatgggctcaggcagcaccgtatgcaccattgtgacctaccagatggtgaagactaaggaagctgggatgcagccacagctgcagatccggggagtaggatttgaccgtaccctggggggcctggagatggagctccggcttcgagaacgcctggctgggcttttcaatgagcagcgcaagggtcagagagcaaaggatgtgcgggagaacccgcgtgccatggccaagctgctgcgtgaggctaatcggctcaaaaccgtcctcagtgccaacgctgaccacatggcacagattgaaggcctgatggatgatgtggacttcaaggcaaaagtgactcgtgtggaatttgaggagttgtgtgcagacttgtttgagcgggtgcctgggcctgtacagcaggccctccagagtgccgaaatgagtctggatgagattgagcaggtgatcctggtgggtggggccactcgggtccccagagttcaggaggtgctgctgaagggcgtgggcaaggaggagctggggaagaacatcaatgcagatgaagcagccgccatgggggcagtgtaccaggcagctgcgctcagcaaagcctttaaagtgaagccatttgtcgtccgagatgcagtggtctaccccatcctggtggagttcacgagggaggtggaggaggagcctgggattcacagcctgaagcacaataaacgggtactcttctctcggatggggccctaccctcaacgcaaagtcatcacctttaaccgctacagccatgatttcaacttccacatcaactacggcgacctgggcttcctggggcctgaagatcttcgggtatttggctcccagaatctgaccacagtgaagctaaaaggggtgggtgacagcttcaagaagtatcctgactacgagtccaagggcatcaaggctcacttcaacctggatgagagtggcgtgctcagtctagacagggtggagtctgtatttgagacactggtagaggacagcgcagaagaggaatctactctcaccaaacttggcaacaccatttccagcctgtttggaggcggtaccacaccagatgccaaggagaatggtactgatactgtccaggaggaagaggagagccctgcagaggggagcaaggacgagcctggggagcaggtggagctcaaggaggaagctgaggccccagtggaggatggctctcagcccccaccccctgaacctaagggagatgcaacccctgagggagaaaaggccacagaaaaagaaaatggggacaagtctgaggcccagaaaccaagtgagaaggcagaggcagggcctgagggcgtcgctccagccccagagggagagaagaagcagaagcccgccaggaagcggcgaatggtagaggagatcggggtggagctggttgttctggacctgcctgacttgccagaggataagctggctcagtcggtgcagaaacttcaggacttgacactccgagacctggagaagcaggaacgggaaaaagctgccaacagcttggaagcgttcatatttgagacccaggacaagctgtaccagcccgagtaccaggaagtgtccacagaggagcagcgtgaggagatctctgggaagctcagcgccgcatccacctggctggaggatgagggtgttggagccaccacagtgatgttgaaggagaagctggctgagctgaggaagctgtgccaagggctgttttttcgggtagaggagcgcaagaagtggcccgaacggctgtctgccctcgataatctcctcaaccattccagcatgttcctcaagggggcccggctcatcccagagatggaccagatcttcactgaggtggagatgacaacgttagagaaagtcatcaatgagacctgggcctggaagaatgcaactctggccgagcaggctaagctgcccgccacagagaagcctgtgttgctctcaaaagacattgaagctaagatgatggccctggaccgagaggtgcagtatctgctcaataaggccaagtttaccaagccccggccccggcctaaggacaagaatgggacccgggcagagccacccctcaatgccagtgccagtgaccagggggagaaggtcatccctccagcaggccagactgaagatgcagagcccatttcagaacctgagaaagtagagactgcaggatccgagccaggagacactgagcctttggagttaggaggtcctggagcagaacctgaacagaaagaacaatcgacaggacagaagcggcctttgaagaacgacgaactataacccccacctctgttttccccattcatctccacccccttcccccaccacttctatttatttaacatcgagggttgggggaggggttggtcctgccctcggctggagttcctttctcacccctgtgatttggaggtgtggagaaggggaagggagggacagctcactggttccttctgcagtacctctgtggttaaaaatggaaactgttctcctccccagccccactccctgttccctacccatataggccctaaatttgggaaaaatcactattaatttctgaatcctttgcctgtgggtaggaagagaatggctgccagtggctgatgggtcccggtgatgggaagggtatcaggttgccggggagtttccactcttctctggtgattgttccttccctcccttcctctcccaccatgcgatgagcatcctttcaggccagtgtctgcagagcctcagttaccaggtttggtttctgagtgcctatctgtgctctttcctccctctgcgggcttctcttgctctgagcctcccttccccattcccatccagctcctttccccctgggtttccttggcttcctgcagcaaattgggcagttctctgccccttgcctaaaagcctgtacctctggattggcggaagtaaatctggaaggattctcactcgtatttcccacccctagtggccagaggagggaggggcacagtgaagaagggagcccaccacctctccgaagaggaaagccacgtagagtggttggcatggggtgccagcatcgtgcaagctctgtcataatctgcatcttcccagcagcctggtaccccaggttcctgtaactccctgcctcctcctctcttctgctgttctgctcctcccagacagagcctttccctcaccccctgaccccctgggctgacctaaatgtgctttctactgtgagtccctatcccaagatcctggggaaaggagagaccatggtgtgaatgtagagatgccacctccctctctctgaggcaggcctgtggatgaaggaggagggtcagggctggccttcctctgtgcatcactctgctaggttgggggcccccgacccaccatacctacgcctagggagcccgtcctccagtattccgtctgtagcaggagctagggctgctgcctcagctccaagacaagaatgaacctggctgtgtcagtcattttgtcttttccttttttttttttttttgccacattggcagagatgggacctaagggtcccacccctcaccccacccccacctcttctgtatgtttgaattctttcagtagctgttgatgctggttggacaggtttgagtcaaattgtactttgctccattgttaattgagaaactgtttcaataaaatattcttttctac

SEQ ID NO: 684 - DNA, 3594 bp, Homo sapiens
atgcagctccgagcgagcgagcggcgcccagcccagcgcctcggccgaacccctccgcagcaggctgcctgctgtttcccggggagatcatgaaacgaggtcgccttcccagcagcagtgaggattctgacgacaatggcagcctgtcaactacttggtcccagaattcccgatcccagcataggagaagctcctgctccagacatgaagatcgaaagccttcagaggtgtttaggacagacctgatcactgccatgaagttgcatgactcctaccagctgaatccggatgagtactatgtgttggcagatccctggagacaggaatgggagaaaggggtccaggtgcctgtgagcccggggaccatccctcagcctgtggccaggcccaagaagtacatcgtgtcatcaggctctgagcctcccgagttgggctatgtggacatccggacgctggctgacagcgtgtgtcgctatgacctcaatgacatggatgctgcatggctggaactgaccaatgaagaatttaaggagatgggaatgcctgaactagatgaatacaccatggagagggtcctagaggaatttgagcagcgatgctacgacaatatgaatcatgccatagagactgaggaaggcctggggatcgaatatgatgaagatgttgtctgtgatgtctgccagtctcctgatggtgaggacggcaatgagatggtgttctgtgacaaatgcaacatctgtgtgcaccaggcctgttatggaatcctcaaggtaccagagggcagctggctgtgccggacatgtgccctgggggttcagccaaaatgtctgctgtgtccgaagaagggtggagctatgaagcccacccgtagcggaaccaagtgggtccacgttagctgtgctctgtggatccctgaggtgagcattggcagcccagagaagatggagcccatcaccaaggtgtcacacattcccagcagccggtgggcgctagtgtgcagcctctgcaatgagaagtttggggcctctatacagtgctctgtgaagaactgccgcacagccttccatgtgacctgtgcttttgaccggggcctggagatgaagaccatcttagcagagaatgatgaagtcaagttcaagtcctattgcccaaagcacagctcacataggaaacccgaggagagtcttggcaagggggctgcacaggagaatggggcccctgagtgttccccccggaatccgctggagccctttgccagccttgagcagaaccgggaggaggcccaccgggtgagtgtccgtaagcagaagctgcagcagttggaggatgagttctacaccttcgtcaacctgctggatgttgccagggctctgcggctgcctgaggaagtagtggatttcctgtaccagtactggaagttgaagaggaaggtcaacttcaacaagcccctgatcaccccaaagaaagatgaagaggacaatctagccaagcgggagcaggatgtcttatttaggaggctgcagctgttcacgcacctgcggcaggacctggagagggttcggaacctcacttacatggtgacccgcagggaaaagattaaacggtctgtgtgcaaagtccaggaacagatattcaatctttacactaagcttttggagcaagaaagagtttcaggtgtgccttcttcctgctcctcctcctcactggaaaacatgcttttgtttaacagtccttctgttggccctgatgctcccaagatagaggacttgaagtggcattctgcattcttcagaaaacaaatgggtacttccttggttcattcgctgaaaaagccccataagcgagatcctttgcagaatagccctggaagtgaaggcaaaaccctgctgaagcagccagacctgtgtggtagaagggaggggatggtggtcccagagagctttttgggtttagaaaagacctttgcagaagcacgtctcatatcagcacaacagaaaaatggtgtggtgatgccagaccatgggaaaagaagagacaatcgttttcattgtgatctcattaaaggagacttaaaggacaaatcttttaaacagagtcacaagcctctcaggtccacagatgtgtcccagaggcatctggacaacacaagagctgccacctcccctggagtggggcagtcagcacctggcacaaggaaggagatagtgcccaagtgcaatggctccctaatcaaagtaaactataatcagactgcagtcaaagtgcctacaacacctgccagcccagtgaaaaactggggaggattccggattccaaagaagggggaacggcagcagcagggagaggcccacgatggggcctgccaccagcactcagactacccatatttgggcttaggccgagttccagccaaggaaagggcaaaaagcaaattaaaatccgacaatgagaatgacgggtatgtccccgatgtggaaatgagtgactcagagagtgaggcatcagaaaagaaatgtatacacaccagcagcactatcagcagaaggacagacattatcaggagaagcatcttggcttcttgatgcaacagagatgatgcggaagccctttgggctcgtcattgggtttgctagaggagagctctgatgtgggggagaagcagaaacccattaatcctgagctacacaaacacatttacttgcaattcagattaatttttttccagagtcatttttaaatcatttttgtgagaagtttgtgttatttgcaacttgttgaggaaacagaagagtagattgtaaccataagacactgctaagactagaacccgaactgaacactaaaataaaaatgaaatgttttaaagaaggcaaggcttaaataagcctcatgaatttttatagccctctgcattcttcccaaagcacaaactcatggttacctgaatatagggaaccagatatggttcttgagaaaccctcatggtaccattcacagcccataaagtttattttctaggactgtggtagatcttgaaatcatatttatatttggccctcaaggctatttttgttgcattatagcatataggcagcagctctgaagcttcagtaacactaagaaatttatgtgtaaatatagcagtcagggaagagaattttaaaaaaggtcattattgaagaagctgaggggacagggtagagctgctgcaatatggagatttagggtaatatggcaaggtcctgctgcttgaagcctgtgagtgggttgtggatatgggactggtggagagtgagactgttaggaaagttgtatctatgaataagggcagttgaagtagaatttttaccagtccacttgaccttcttcttccctaaccactggctcttgagccagcttgggatttccctggccattgccaatacctggccatctggcttccaatagtacagtggctactcaagttcaagcgaagaacttccagactctggtgactgttacttcccagagccaaccactagtgcatatgttagggaatctgggcttccaacatgaatggattccttaagaaaaaggaaaaaaaaaaaaaaaaag

SEQ ID NO: 685 - DNA, 3860 bp, Homo sapiens
ttatttatcttgcaacaatatctgtaaaccatttgccagattgagtggtccaaagtcttcggagaagttctcatattcgagttcattatctatgctgaaataatgtacatttgatgcactctttggtctgctgtagagaatggcaaaacgaaggcgatcggtgatgtccaggtacacgtcgtcctgcgggtcccagcggcgcgggtcctgcagcgtggagctgcgcatcttcttcacaccctgcaaggtcaaagagcagcgctgcgagcagaggggcgcggcggcccagctcgaccgccacttgcttttccgcttcctggaggcggccgcagccggtcagggagcaacgaccacggccccgcgcgcgcccgccgaggctcgcgccagcgccgcgcgggctctcaggacggcgggcacagagcggccttgcggggacggccggagccagcggagcccggaaggaggcggtggtgcaggagccagaggaggggcctggcccacagcgcctgccccgctccctcccgcaaccgccctccctttgcttttttaaaccatgaactgaagggctatatcatactgacatcaacaaagtgttagatgaataagtcatcatgctcttgtcatagcaaccacctggatcttaaccttctctccagtctctggaaattcgaccaaataagtgttacttcgagtatgactttattaccaaatgacagtatttttgaagcactcatttaggatccattaaaagttggaggttgtgaccatttgatattgaaagtcatgcctgcttggagacaagttaatgttgacatattgctttttcaccaactctcccaataccccaaccttggaaacatgggagcacaagatagttaaatagatagtttaaaagatggcatttcttttttctgttctatgtgggctttccaaagaaaagtcttggagaagctaaacaatgtgtgtagaagatcacacagggatatcacaagtgataaattttatacccagtgtcatcccaaagccaatatgcagcttcgcactcctcggcaacggaacaggcctctctccttcaccaaagagagcttcgtgaagcttcatccctaagttttgggttgggggtaaaataaagaagaggactgatgggttgttcttgagcttactactcattcatacatcttcttgccctttctgtttggtgggatttcccctaatcatttatatccttctggtgtccacaaggagacctaaattcccaattagataggctttatgaaattttaaaggtaaatgtatatattagaattagtttaggagaaaggagagaagagtaaaagaagataggtaaagattcatatttgtccttaaagattcaagcttctggatgtcacaaatattttgattaatggggacctcaagaataattttgttcaccactgtcccaatgcttgccccccgtccacaatatttctgtccagtgaatgcattgtattttcttttctccagtttctgttggaatacccgtatctgataggaaacacacgtctgaaggcatgcagtgaggatgttgatttcccttgccttttcttatcatttattaatagattcagaaacaatttactgaatgtttgctctttgctagagacctggttcttgctaagaaatgcaacctttcatatgagacagtcttgctcttggaatttgcttgtatagtcaccacactatccatgaacacttagacccctgtttataataattttaaaaatcctaaagacaactgattagaaaagtcacttcatccaggttgggccactcagatcccttcttctatgaggtaaacttgagtcccagagcccctccttattctctttgcggtccccgagtgaaatgctcatgtaaaatttaatctgggtagccatatctgaaataagtgaaaggtaggctgagaaggccatgcttctaagaaaaagtaataaagcagactcctagagagaaacaacaatgattgaccacgtggcaccagagacgatggagactgttatctaccctttcagcctgaggtggtttccctctagttattggcatctgcttctcaagagatcttctccttaagttccggagatactatcttattcttccttccccagtcctcctgcaattgtctggctagtctgagagtgtttgtatctacaactcaatgatctctgcctaggtctttgttattcaggtagccacaggaatagactcttttgacacatctgaaaagatatgtccatggccgcttctctgtgggaggaaagtaaagggctctacttttctcagagaggttatttatttttcattgttgaatcccttttgctccttctacctttactgttgaactccaatgtgtgtggagggtgttgggcatggagaaagttttattttctcacccatattagctaccattttgaccaccatttctgcataagttgggatatacagacaactagaggaaggtttaaagagcagtctactaattgcctccaagatcatctaaactttacagagtcaaggctgtgtggaaaagtaagctattctgtaatgttggatcaaacaaaaggggagattctcactggtcatgcttattgaaaacaaaacccaacaaatgaggataactaaattacaatgaccaaacagggttgtcatgatgccacagttactcccctgaaattcctgtacctttttacttataagaattccaggagctggtttcatcacaaactgataatgactattccaagaagtgctgtagcctttagccaatcatctgttagctcctttctgttgaccaatggtatttctggatgaacaggctgagaccaccttggtatacctcttcgttttgtccttaaaaatctgcttgtaacctccccaactgaaagcacttctctgacgtagtttgcatatgtgtttcccgggttacactcctcaaatttggccaaaacaaattctttacttatgctaattttgccttagacttttatttcagatcaacattatggatgccttagatggatgtgttttaggtgacccagttgttcaatgggtcgcctccattctttatctctttctaaaacctcttattcttcccttagtcttattcttttaagtctttcccccatcctaaattctagtcctcattttttgtctattttagttactcttccctaaatacatatccaatcccgaatctcctctgaattttatggtgagattattatccccagctcctcacagctgcttgtttatgctcctggggaaagagaaactatggcatcagtcatggagtcacctctgcagcctggctttctcccttccctttcgtttgagctccagctataagctcgttcccagaagctatacttgctttggcgcttatactcattctgttccctctatgtaaagtaaatattctcctacacttcctaactttgtagcttacaatcctctgtccaaacttggtggttcccagagtacttgcatcttatttgattgtttggtcactgcacctgagaatttgccgtgtgtaattctgcataaagaaatactgtatggtaatatattcaacataccatctcacatgcttacctgatacatctgcttgtatggctgtgaagtttaaataacttaaaatacaaaaaaattagggctattggatttgggaaatacaagagttgtaaaatgactaattaaataatacaacagtaaatgattttatggcttctagttatttttcaagctggaaattatttggcatataagaaaatgcaagaattcaagcaagatatttgtcataaaataaaatgattaaggtgggg

SEQ ID NO: 686 - DNA, 5131 bp, Homo sapiens
ccaacaacaaaacagcgatgccacggcgctaacggcgcccggtgcctcccgggctccctccccgccccatacctcctcgggccgccgcccccacccccccaagcccgggccgagagcccccccaaatagcccggccgcgggctccgagcgcgatcggcaacaatgtttacgttccggggattatgacgtcgacgcctccccccccccacaactgctgaaaatggtttcctaggactttgcaaacggatctgcctaagtgttggtgcaaaactttgtagatctcggctctggcttgctttatttatttattttttggtttgttttctttggtcttccctccttcccccctcggccaaaatgcagggggcaggagtgttgacaattaattggtgaactctcctaaaaaaatggaggcagagaaagactctggaagaagattgcgcccgattgaccgccagcgatacgacgagaacgaggacttgtcggacgtggaggagatcgtcagcgtccgcggcttcagcctggaggagaagcttcgcagccagctgtaccagggggacttcgtgcacgccatggagggcaaagatttcaactatgagtacgtacagagagaagctctcagggttcccctgatatttcgagaaaaggatggactgggaattaagatgcctgaccctgatttcacagtccgagacgtcaaactcctagtggggagccggcggcttgtggacgtgatggatgtgaacacccagaagggcacggagatgagcatgtcccagtttgtgcgttactacgagacgcccgaggcccagcgggacaagctgtacaacgtcatcagcctagagttcagccacaccaagctggagcacttggtcaagcgtccgactgtggtagacctggtggactgggtggacaacatgtggccccagcatctgaaggagaagcagacagaagccacgaacgccattgcagagatgaagtacccgaaagtgaaaaagtactgtctgatgagcgtgaaaggttgtttcaccgacttccacatcgactttggaggcacttccgtttggtaccatgttttccggggtgggaagattttttggctgattcctccaacgctgcacaatttggcgctgtacgaggagtgggtgctgtcaggcaaacagagtgacatctttctgggagaccgtgtggaacgatgccaaagaattgagctgaagcagggctacacatttttcatcccttccggttggatccatgccgtctacacccctgtagactctttggtgttcggcggaaacatcctgcacagctttaacgtgcccatgcagctgcggatctacgagatcgaggacaggacgcgggtgcagcccaaattccgttaccccttctactatgagatgtgctggtatgtcctggagagatacgtgtactgtgtgacccagcgctcccacctcactcaggaataccagagggagtcgatgcttattgatgccccgaggaagcccagcatagacggcttctcttcggattcctggctggagatggaggaggaggcctgtgatcagcagcctcaggaggaggaggagaaggacgaggagggcgagggcagggacagggcacccaaaccgcccaccgatggctccacttcacccaccagcacgccctctgaggaccaggaggccctcgggaagaagcccaaagcacctgccctgcgattcctcaaaaggactttgtctaatgagtcggaggaaagtgtgaagtccaccacattggccgtagactaccccaagacccccaccggctctcccgccacggaggtctctgccaaatggacccatctcactgagtttgaactgaagggcctgaaagctctggtggagaaactggaatccctcccggagaacaagaagtgtgtccccgagggcatcgaggacccccaggcactcctggagggtgtgaagaacgtcctgaaggagcacgcagatgatgaccctagtctggccatcactggggtccctgtggtgacttggccaaagaagactccaaagaaccgggctgtgggtcggcccaaggggaagctgggcccggcctccgcggtgaagttggccgccaaccggacaacggcaggagctcggcggcgccggacgcgatgccgcaagtgcgaggcctgcctgcggaccgagtgcggagagtgccacttctgcaaggacatgaagaagttcgggggccccgggcgcatgaagcagagctgcatcatgcggcagtgcatcgcgccagtgctgccccacaccgccgtgtgccttgtgtgtggcgaggcggggaaggaagacacggtggaagaggaggaaggcaagtttaacctcatgctcatggagtgctccatctgcaatgaaatcatccaccctggatgccttaagattaaggagtcagagggtgtggtcaacgacgagcttccaaactgctgggagtgtccgaagtgtaaccacgccggcaagaccgggaaacaaaagcgtggccctggctttaagtacgcctccaacctgcccggctccctgctcaaggagcagaagatgaaccgggacaacaaggaagggcaggaacctgccaagcggaggagtgagtgtgaggaggcgccccggcgcaggtcggatgagcactcgaagaaggtgccgccggacggccttctgcgcagaaagtctgacgacgtgcacctgaggaagaagcggaaatacgagaagccccaggagctgagtggacgcaagcggctcaaacctggcaaagaagataagcttttcaggaaaaagcggcggtcctggaagaacgccgaggaccgcatggcgctggccaacaagcccctccggcgcttcaagcaggaacccgaggacgaactgcccgaggcgccccccaagaccagggagagcgaccactcccgctccagctcccccaccgcgggacccagcaccgaaggggccgagggcccggaggagaagaagaaggtgaagatgcgccggaagcggcggcttcccaacaaggagctgagcagggagctgagcaaggagctcaaccacgagatccagaggacggagaacagcctggccaacgagaaccagcagcccatcaagtcggagcctgagagcgagggcgaggagcccaagcggcccccgggcatctgcgagcgtccccaccgcttcagcaaggggctcaacggcaccccccgggagctgcggcaccagctggggcccagcctgcgcagcccgccccgtgtcatctcccggcccccaccctccgtgtccccgcccaagtgtatccagatggagcgccatgtgatccggccaccccccatcagccccccgcctgactcgctacccctggacgatggggcagcccacgtcatgcacagggaggtgtggatggccgtcttcagctacctcagccaccaagacctgtgtgtgtgcatgcgggtctgcaggacctggaaccgctggtgctgcgataagcggttgtggacccgcattgacctgaaccactgcaagtctatcacacccctgatgctgagtggcatcatccggcgacagcccgtctccctcgacctcagctggaccaatatctccaagaagcagctgagctggctcatcaaccggctgcctgggctccgggacttggtgctgtcaggctgctcatggatcgcggtctcggccctttgcagctccagttgtccgctgctccggaccctggatgtccagtgggtggagggactaaaggatgcccagatgcgggatctcctgtccccgcccacagacaacaggccaggtcagatggacaatcggagcaagctccggaacatcgtggagctgcgcctggcaggcctggacatcacagatgcctccctgcggctcatcatccgccacatgcccctgctctccaagctccacctcagttactgtaaccacgtcaccgaccagtctatcaacctgctcactgctgttggcaccaccacccgagactccttaaccgagatcaacctgtctgactgcaataaggtcactgatcagtgcctgtccttcttcaaacgctgtggaaacatctgtcatattgacctgaggtactgcaagcaagtcaccaaggaaggctgtgagcagttcatagccgagatgtcttctttccaagggagaagctgttcaaccacccgtttgggggatgagtgagccgacactttcctttggtctttctgaatcgtaactgcactgctttctggaccatttctaaggcggcctttacaagaagacattcctgtcggagaggagggtggacttcggagaaattctcatactgaagcatgagcttaggagtttctgttagtggtagtggtgttttggacacttcattccttgcaacaccgaggttttgggtgttgacataaagtggaccacacaccacatctgctgccgtcttgacacttttttttgtttggttggttttgttacatcttacattatgcagaactatttttgtacaaattgtttaaaagttatttatgcaaggtttgaatgcataccagtgtttttattgttttgagattgccaattttcctgatttccttaaggtaggagagaatttaacgtgtacttcatcgacacaacccatctacaaatgtgcccagatctaacaaagtaggctaagaccttccacttaaaagcatgtttaactggaagttgagagtctgctttgtacctcaagagttacatgagcatgttgtggataaatgtaaattatagtcaaagtaagatactctgccaagcttcctctgtagagaattcacttttctcaaattttaaaatttcgacttcagcctttgcactcaggaggttctgctccagcatgagctcttgtacttacatagatctaatttatacagtgagtcaagacgtagaataaatgctcccacatagcctttcttttgcttttgcttctctcctctgaagtgtgagttgagttctcatttaggtttgtaacatggctatttcctagttgtaaagttctgcatttataagtgccattgttgtaaggtggtgtttcctagaccttccctgatgcgattttacctttgttgaatttgtataaacaattgtac

SEQ ID NO: 687 - DNA, 5592 bp, Homo sapiens
gactgcttgtcatgaagatggtacagtgggagcctgtttcggaagagccaaggaagaggatgtggaaatggagtagagattgctaaaaaactgaacatccacaccttggggatgggatgcactactagtgtgattctgtttaaaggcatccgcaccgtttttgaaagaaactgtgcttatatgtgcaaacagcaaggagagaataatgcccttgaatatacagcatacaattggacaaaagaagattcagaactattgatctcctcctggctggcaaagccaaagctaattgagccactcgactatgaaaatgtcatcgtccagaagaagactcagatcctgaacgactgtttacgggagatgctgctcttcccttacgatgactttcagacggccatcctgagacgacagggtcgatacatatgctcaacagtgcctgcgaaggcggaagaggaagcacagagcttgtttgttacagagtgcatcaaaacctataactctgactggcatcttgtgaactataaatatgaagattactcaggagagtttcgacagcttccgaacaaagtggtcaagttggataaacttccagttcatgtctatgaagttgacgaggaggtcgacaaagatgaggatgctgcctcccttggttcccagaagggtgggatcaccaagcatggctggctgtacaaaggcaacatgaacagtgccatcagcgtgaccatgaggtcatttaagagacgatttttccacctgattcaacttggcgatggatcctataatttgaatttttataaagatgaaaagatctccaaagaaccaaaaggatcaatatttctggattcctgtatgggtgtcgttcagaacaacaaagtcaggcgttttgcttttgagctcaagatgcaggacaaaagtagttatctcttggcagcagacagtgaagtggaaatggaagaatggatcacaattctaaataagatcctccagctcaactttgaagctgcaatgcaagaaaagcgaaatggcgactctcacgaagatgatgaacaaagcaaattggaaggttctggttccggtttagatagctacctgccggaacttgccaagagtgcaagagaagcagaaatcaaactgaaaagtgaaagcagagtcaaacttttttatttggacccagatgcccagaagcttgacttctcatcagctgagccagaagtgaagtcatttgaagagaagtttggaaaaaggatccttgtcaagtgcaatgatttatctttcaatttgcaatgctgtgttgccgaaaatgaagaaggacccactacaaatgttgaacctttctttgttactctatccctgtttgacataaaatacaaccggaagatttctgccgatttccacgtagacctgaaccatttctcagtgaggcaaatgctcgccaccacgtccccggcgctgatgaatggcagtgggcagagcccatctgtcctcaagggcatccttcatgaagccgccatgcagtatccgaagcagggaatattttcagtcacttgtcctcatccagatatatttcttgtggccagaattgaaaaagtccttcaggggagcatcacacattgcgctgagccatatatgaaaagttcagactcttctaaggtggcccagaaggtgctgaagaatgccaagcaggcatgccaaagactaggacagtatagaatgccatttgcttgggcagcaaggacattgtttaaggatgcatctggaaatcttgacaaaaatgccagattttctgccatctacaggcaagacagcaataagctatccaatgatgacatgctcaagttacttgcagactttcggaaacctgagaagatggctaagctcccagtgattttaggcaatctagacattacaattgataatgtttcctcagacttccctaattatgttaattcatcatacattcccacaaaacaatttgaaacctgcagtaaaactcccatcacgtttgaagtggaggaatttgtgccctgcataccaaaacacactcagccttacaccatctacaccaatcacctttacgtttatcctaagtacttgaaatacgacagtcagaagtcttttgccaaggctagaaatattgcgatttgcattgaattcaaagattcagatgaggaagactctcagccccttaagtgcatttatggcagacctggtgggccagttttcacaagaagcgcctttgctgcagttttacaccatcaccaaaacccagaattttatgatgagattaaaatagagttgcccactcagctgcatgaaaagcaccacctgttgctcacattcttccatgtcagctgtgacaactcaagtaaaggaagcacgaagaagagggatgtcgttgaaacccaagttggctactcctggcttcccctcctgaaagacggaagggtggtgacaagcgagcagcacatcccggtctcggcgaaccttccttcgggctatcttggctaccaggagcttgggatgggcaggcattatggtccggaaattaaatgggtagatggaggcaagccactgctgaaaatttccactcatctggtttctacagtgtatactcaggatcagcatttacataattttttccagtactgtcagaaaaccgaatctggagcccaagccttaggaaacgaacttgtaaagtaccttaagagtctgcatgcgatggaaggccacgtgatgatcgccttcttgcccactatcctaaaccagctgttccgagtcctcaccagagccacacaggaagaagtcgcggttaacgtgactcgggtcattattcatgtggttgcccagtgccatgaggaaggattggagagccacttgaggtcatatgttaagtacgcgtataaggctgagccatatgttgcctctgaatacaagacagtgcatgaagaactgaccaaatccatgaccacgattctcaagccttctgccgatttcctcaccagcaacaaactactgaagtactcatggtttttctttgatgtactgatcaaatctatggctcagcatttgatagagaactccaaagttaagttgctgcgaaaccagagatttcctgcatcctatcatcatgcagtggaaaccgttgtaaatatgctgatgccacacatcactcagaagtttcgagataatccagaggcatctaagaacgcgaatcatagccttgctgtcttcatcaagagatgtttcaccttcatggacaggggctttgtcttcaagcagatcaacaactacattagctgttttgctcctggagacccaaagaccctctttgaatacaagtttgaatttctccgtgtagtgtgcaaccatgaacattatattccgttgaacttaccaatgccatttggaaaaggcaggattcaaagataccaagacctccagcttgactactcattaacagatgagttctgcagaaaccacttcttggtgggactgttactgagggaggtggggacagccctccaggagttccgggaggtccgtctgatcgccatcagtgtgctcaagaacctgctgataaagcattcttttgatgacagatatgcttcaaggagccatcaggcaaggatagccaccctctacctgcctctgtttggtctgctgattgaaaacgtccagcggatcaatgtgagggatgtgtcacccttccctgtgaacgcgggcatgactgtgaaggatgaatccctggctctaccagctgtgaatccgctggtgacgccgcagaagggaagcaccctggacaacagcctgcacaaggacctgctgggcgccatctccggcattgcttctccatatacaacctcaactccaaacatcaacagtgtgagaaatgctgattcgagaggatctctcataagcacagattcgggtaacagccttccagaaaggaatagtgagaagagcaattccctggataagcaccaacaaagtagcacattgggaaattccgtggttcgctgtgataaacttgaccagtctgagattaagagcctactgatgtgtttcctctacatcttaaagagcatgtctgatgatgctttgtttacatattggaacaaggcttcaacatctgaacttatggatttttttacaatatctgaagtctgcctgcaccagttccagtacatggggaagcgatacatagccagtttaacaaagtgtgtggctcttctccttcctgcttggaacaggaatgatgcatgccagattgcagcagctgggcagcctggataactctctcacttttaaccacagctatggccactcggacgcagatgttctgcaccagtcattacttgaagccaacattgctactgaggtttgcctgacagctctggacacgctttctctatttacattggcgtttaagaaccagctcctggccgaccatggacataatcctctcatgaaaaaagtttttgatgtctacctgtgttttcttcaaaaacatcagtctgaaacggctttaaaaaatgtcttcactgccttaaggtccttaatttataagtttccctcaacattctatgaagggagagcggacatgtgtgcggctctgtgttacgagattctcaagtgctgtaactccaagctgagctccatcaggacggaggcctcccagctgctctacttcctgatgaggaacaactttgattacactggaaagaagtcctttgtccggacacatttgcaagtcatcatatctgtcagccagctgatagcagacgttgttggcattgggggaaccagattccagcagtccctgtccatcatcaacaactgtgccaacagtgaccggcttattaagcacaccagcttctcctctgatgtgaaggacttaaccaaaaggatacgcacggtgctaatggccaccgcccagatgaaggagcatgagaacgacccagagatgctggtggacctccagtacagcctggccaaatcctatgccagcacgcccgagctcaggaagacgtggctcgacagcatggccaggatccatgtcaaaaatggcgatctctcagaggcagcaatgtgctatgtccacgtaacagccctagtggcagaatatctcacacggaaagaagcagtccagtgggagccgccccttctcccccacagccatagcgcctgcctgaggaggagccggggaggcgtgtttagacaaggatgcaccgccttcagggtcattaccccaaacatcgacgaggaggcctccatgatggaagacgtggggatgcaggatgtccatttcaacgaggatgtgctgatggagctccttgagcagtgcgcagatggactctggaaagccgagcgctacgagctcatcgccgacatctacaaacttatcatccccatttatgagaagcggagggattttgagaggctggcccatctgtatgacacgctgcaccgggcctacagcaaagtgaccgaggtcatgcactcgggccgcaggcttctggggacctacttccgggtagccttcttcgggcaggtgagcctcctgtccattctgcagactgtcctaagtccttt

SEQ ID NO: 688 - DNA, 4107 bp, Homo sapiens
gaacatgctctactatacgcggggtttccagtccatgggcatgtacagcgtcatgatccagaaggtcattttgcatgatgttctgaagttcttgtttgtatatatcgtgtttttgcttggatttggagtagccttggcctcgctgatcgagaagtgtcccaaagacaacaaggactgcagctcctacggcagcttcagtgacgcagtgctggaactcttcaagctcaccataggcctgggtgatctgaacatccagcagaactccaagtatcccattctctttctgttcctgctcatcacctatgtcatcctcacctttgttctcctcctcaacatgctcattgctctgatgggcgagactgtggagaacgtctccaaggagagcgaacgcatctggcgcctgcagagagccaggaccatcttggagtttgagaaaatgttaccagaatggctgaggagcagattccggatgggagagctgtgcaaagtggccgaggatgatttccgactgtgtttgcggatcaatgaggtgaagtggactgaatggaagacgcacgtctccttccttaacgaagacccggggcctgtaagacgaacagatttcaacaaaatccaagattcttccaggaacaacagcaaaaccactctcaacgcatttgaagaagtcgaggaattcccggaaacctcggtgtagaagcggaacccagagctggtgtgcgcgtgcgctgtctggcgctgcaggcggagtcaccgactctgtgcagagaggctttgagggatgatggagtccggctctgctggcctagaagcagagtgcaccctcgtgctcagtgctcagtgggtgtctgaactgaggggcagttgtcaatttgtctgagtgggaaacatcctggattttgttacttggcaaacagctggtgtaaacctacagccagcagcagtctggagcctgggagcctcctgaagtcccgggtgaagcctctggttttaccaattgcaggtcggcttggctgggagagatggatggcgggaaaggggcagcagtcttgaggagcagggagaggagtctttcctcctgccagcttcccccgtcagccccaaccccagcccacacattgtaccatctcttctgctgtgactgggttgcctgaatttgtgggagacccgtgatcccatcccagagtgtgcgggggacggaggtaagctggatatcctgggggaggaggggaatgcgctctggaaacacccttccggaacccttcggggaaaaggagaccatccttggagtgaacgtcccctgacaccccaaggttcaaactgtctcaagctgagagatgtttttagtagcagaattaacacagggttttaacttgcaatacggaaaagacatttcagttgagaatgaaaattactacaatgaagtttgtgattttaaaagtggagacagactgggggctttggggctggatgtaagtattatatatttggcctcagggtgcccagagcaagacaaaaagcttttcttcacacacacaaaagtctgcatgagacactccgggcaagtcctgctgggccgccgcgatctgggtgaaaggtcctggctcttttcctcgtcctgacctcacagtagcgcatgcctgtgtgctgggatcgtggctttcgctgaagcagaaatagcagctgctcgatcgatatcatcttggaactcagcagttagtcgcatacctcagtacgtctcagtgggggaatttaacaaaatgcctcaactgctttggtacgaagtattttttttttaattttaactgtgaattttgaagctgaaggggaagcttgtgagagaaaagcatttgccaagactttgagcttatttttaggtcctcgtcctctgatgttctctttctgaaatgacacggagtcagtctcgggggcagaggtgaagtggagacggaaggattttccaggtgactggggccgaaaccaccagaaaatccactctgccgccgttatctggtgaaaggattcatgtaaaaatgttcgaggtggaattataaaaatagtaaccataaatgttaatcttaaatggcagaaatagaaatttggccttcagataacatggcgatagataagttcatctggcttgaggcaaactgaagagtcggggcctagcagtgcactctgggccagtttctctgccctgggccactctgtgtgccagactagctggaccgatagagactttgtgcccctgatggggccgattggggagaggtgggctggggtgtgcaggcttcacaatccacagcagcccctgccctcccagctgacccagggagtaatcgcgtgctctaagccacagtggtcggggctgggcatgggcctctggagaagagaagatttgaggagaactgtcctagaggcaggaggagcagatgtgtttcagaatgggcagaattaggaaattgagaaagattttggctcaacagaatccagcaactgctccagatgttggagatgtttaagcagaagctggttgagcacttaatgaggaatgttgttgaaaatggtcattggaagaagtttaaggtcccttttagcctggagattgtacaaatcagcattccacatctggagttagctacccgcattaagcctgaacagacatcttggtctgaaaggaagtggtttggattcatgatgccaagctccacactatggagctgggaattccagaattgctttgactcagatattaatggagaaagtcatatccattaatggataaagccgtatctgttatggataaagccatatccagagttgctttgactcggatgttaatggataaagccaattattgatttctatttgcctaacctgccagcttttgtccaagtggggaatggagagccatagggatgtttgtcatctcacatgttttggtgatctgctgtctgtgggtctggacggaatttgttggcaagaccattttctgtattggatattcttcccaacagtgtccaccccaaaaggctttcagccaaaacatctgagcctaggtaggtttaccaagggaagccataagtcaagaagcatcagagtgaaaaggagcacttccttcattttacgcccggaggctaatgctccgagaggaatgtgtacttgggcaaagtcatgcaggaaggtcatatcagagctgtggaggctggagtgtcctgattcttggaccacagatgtctccctgagccattatttatttatttttaaaaagcacagttattccatcattttgagtctttgtatttcgcttatattggggggcaggactattttctcaggtgtctcatttggcagtcaacattgtcccctatgttccctatgactagttgaaaattcaagtgtgcccacaggggtgcacaaaaccacacccatgcacacacacaccctcagcccccacacacaccccgttgaacccgtgggtctatcaggacatcctaaaactccgtgattgacatttcagtaatttcaggggaaggtgttttccagggatggggtctcccaggttcagatagtgcctttggctgcaaatgctcctttagctaaacttttcctcaggaagaattcattattctagacattatgtgatatatctgttaggaataaaaggtgcttaaccttcctccctgggatgtgggagaaggtgctggaggttgtactgtgaagtcttcaggctcttagaaggctccggcctgagagagccctttattattgacattcctgtccttcctcaaggcctggtgacctgtgacctttcgctctgggcagggcccaggtagatgggccgtcatccgggcctgtaagccgtacttgatttctgcattgatttacatattttttactgtgatcttggttccaaacacagaatcgtcaccccattctcccttgaatgtgccggatccttgtaaattctcatttacctacttgttcttagtgtgtatgtgtgtgcgaaactctatgttcaagaaagaaatcatacaaagagtaagaacatgtttgtgccattgaagaaatggttttttgatttctaataaatatttgttttgcctcgtt

SEQ ID NO: 689 - DNA, 3872 bp, Homo sapiens
agacatgagtggacaccttagggggctcggctgcggaaaaggtgctgcagtccacagggaacatggggggattggacgggttgcctgaagaagagaggaaagaatccctcaccccagcccccaaaaggctgtgatgggatggggaaaccccataatcgctgtcttccggacaccttttgccccttggctgcagttccactggtcggcgcccttctcagcctggcttggaaccgtcctcactcacctccactcctcccagcagcgctcaggcacaacggtgtgtcctccctgtgacaacgagttgaaatctgaggccatcattgaacatctctgtgccagcgagtttgcactgaggatgaaaataaaagaagtgaaaaaagaaaatggcgacaagaagattgtccccaagaagaagaagcccctgaagttggggcccatcaagaagaaggacctgaagaagcttgtgctgtacctgaagaatggggctgactgtccctgccaccagctggacaacctcagccaccacttcctcatcatgggccgcaaggtgaagagccagtacttgctgacggccatccacaagtgggacaagaaaaacaaggagttcaaaaacttcatgaagaaaatgaaaaaccatgagtgccccacctttcagtccgtgtttaagtgattctcccgggggcagggtggggagggagcctcgggtggggtgggagcgggggggacagtgccccgggaacccggtgggtcacacacacgcactgcgcctgtcagtagtggacattgtaatccagtcggcttgttcttgcagcattcccgctcccttccctccatagccacgctccaaaccccagggtagccatggccgggtaaagcaagggccatttagattaggaaggtttttaagatccgcaatgtggagcagcagccactgcacaggaggaggtgacaaaccatttccaacagcaacacagccactaaaacacaaaaagggggattgggcggaaagtgagagccagcagcaaaaactacattttgcaacttgttggtgtggatctattggctgatctatgcctttcaactagaaaattctaatgattggcaagtcacgttgttttcaggtccagagtagtttctttctgtctgctttaaatggaaacagactcataccacacttacaattaaggtcaagcccagaaagtgataagtgcagggaggaaaagtgcaagtccattatgtaatagtgacagcaaagggaccaggggagaggcattgccttctctgcccacagtctttccgtgtgattgtctttgaatctgaatcagccagtctcagatgccccaaagtttcggttcctatgagcccggggcatgatctgatccccaagacatgtggaggggcagcctgtgcctgcctttgtgtcagaaaaaggaaaccacagtgagcctgagagagacggcgattttcgggctgagaaggcagtagttttcaaaacacatagttaaaaaagaaacaaatgaaaaaaattttagaacagtccagcaaattgctagtcagggtgaattgtgaaattgggtgaagagcttaggattctaatctcatgttttttccttttcacatttttaaaagaacaatgacaaacaccacttatttttcaaggttttaaaacagtctacattgagcatttgaaaggcgtgctagaacaaggtctcctgatccgtccgaggctgcttcccagaggagcagctctccccaggcatttgccaagggaggcggatttccctggtagtgtagctgtgtggctttccttcctgaagagtccgtggttgccctagaacctaacaccccctagcaaaactcacagagctttccgtttttttctttcctgtaaagaaacatttcctttgaacttgattgcctatggatcaaagaaattcagaacagcctgcctgtccccccgcactttttacatatatttgtttcatttctgccgatggaaagttgacatgggtggggtgtccccatccagcgagagagtttcaaaagcaaaacatctctgcagtttttcccaagtgccctgagatacttcccaaagcccttatgtttaatcagcgatgtatataagccagttcacttagacaactttacccttcttgtccaatgtacaggaagtagttctaaaaaaaatgcatattaatttcttcccccaaagccggattcttaattctctgcaacactttgaggacatttatgattgtccctctgggccaatgcttatacccagtgaggatgctgcagtgaggctgtaaagtggccccctgcggccctagcctgacccggaggaaaggatggtagattctgttaactcttgaagactccagtatgaaaatcagcatgcccgcctagttacctaccggagagttatcctgataaattaacctctcacagttagtgatcctgtccttttaacaccttttttgtggggttctctctgacctttcatcgtaaagtgctggggaccttaagtgatctgcctgtaattttggatgattaaaaaatgtgtatatatattagctaattagaaatattctacttctctgttgtcaaactgaaattcagagcaagttcctgagtgcgtggatctgggtcttagttctggttgattcactcaagagttcagtgctcatacgtatctgctcattttgacaaagtgcctcatgcaaccgggccctctctctgcggcagagtccttagtggaggggtttacctggaacattagtagttaccacagaatacggaagagcaggtgactgtgctgtgcagctctctaaatgggaattctcaggtaggaagcaacagcttcagaaagagctcaaaataaattggaaatgtgaatcgcagctgtgggttttaccaccgtctgtctcagagtcccaggaccttgagtgtcattagttactttattgaaggttttagacccatagcagctttgtctctgtcacatcagcaatttcagaaccaaaagggaggctctctgtaggcacagagctgcactatcacgagcctttgtttttctccacaaagtatctaacaaaaccaatgtgcagactgattggcctggtcattggtctccgagagaggaggtttgcctgtgatttcctaattatcgctagggccaaggtgggatttgtaaagctttacagtaatcattctggatagagtcctgggaggtccttggcagaactcagttaaatctttgaagaatatttgtagttatcttagaagatagcatgggaggtgaggattccaaaaacattttatttttaaaatatcctgtgtaacacttggctcttggtacctgtgggttagcatcaagttctccccagggtagaattcaatcagagctccagtttgcatttggatgtgtaaattacagtaatcccatttcccaaacctaaaatctgtttttctcatcagactctgagtaactggttgctgtgtcataacttcatagatgcaggaggctcaggtgatctgtttgaggagagcaccctaggcagcctgcagggaataacatactggccgttctgacctgttgccagcagatacacaggacatggatgaaattcccgtttcctctagtttcttcctgtagtactcctcttttagatcctaagtctcttacaaaagctttgaatactgtgaaaatgttttacattccatttcatttgtgttgtttttttaactgcattttaccagatgttttgatgttatcgcttatgttaatagtaattcccgtatgtgttcattttattttcatgctttttcagccatgtatcaatattcacttgactaaaatcactcaattaatc

SEQ ID NO: 690 - DNA, 4030 bp, Homo sapiens
aaatacattttcaaaattatctattactaggtccactggtctccacataatgaaactattctggcttcaagtggtactgaccgccgcctgaatgtgtgggatttaagtaaaattggggaagaacaatcagcagaagatgcagaagatgggcctccagaactcctggtacgcattggcttatagaagatgaaatgtcatatgcagattggattgtcattgatctctttatttcgagaatgggtcagaacttcgaattctagctcttgcagatggtttcaaaatggaggccctgaaggttattgcaactgggctttgacatttatcaaaaatagtaaatggagcccagtaggtttttatgaatgtttcactgagaatggtttgaggtcctggaaaatagtatatagtaatttctcactgatttcaactctggtatttgtgatggtttggggatggggagtgagtataattgctattcagttggcagtacttaacatttcctaacagtatagaaaaaattttaaatgctttttaagtttcctgcccagaaaaggagtgctttctcaatcttgatgttagcagagcccactatctccctcccatgcctgattgaagcatcacgcatctccttggccctttgaaagcttatgtggtggtatctgcccatcctcattcttcccgtctgagtccttcagtgctcacttcgtcatttttctatgaagcattgccggatttagcaatggttccctgtccttgctctgaatccaacatttgtctcctcccattatttggcagatagtcactcatcactctgtcatttacgattttagttctaatgccagtactcatttttggcacacttgtactttgtccatgagttttatttattcattttttctgtgaacctatggagtatattgaatgtccacaagttttcaaaggtaaagaaggtccttgagagcaagccctgcacacagaagatgttcactaagcccaccttgtaagaatgctccagacccttttattttgatgacggctttactgagatataatttacataccacacagttcacttctttaaagtgtacagttcagtggggagggagtgttcttgggttttgggggttttttttctttttttgttcttgaagtcagtggtttttagtatattcatagacttgtaaaactatcaccacaaatcaattctagaacattattcatcccctccaaaagaaactatagctatcacctcccaattctcttcttcctccagcccttggcaactactgtgctactttctggcactataagattgggctattctagatatttcatataaatatgacttttgtcttttgggactgattctttcacatagtacaatgttttcaaggtctccagctattttttttagggagagaggaaagcgtattactttgtatattatgcctctgcaacaattccaaggtccttgagaaaatacactaggattttgctttttacaagagagcttgaaatcaagggacatttgagagtagtaaactgggcctgggcatggtggctcctgcctgggatcccagcactttgggaggccaaggcaggtggatcacgtgagcccacaggttcaagaccaggctgggaaacatggcaaaaccctgtcctgtctctaccaaaaaaaaaaaaaaatgcatagattggccgggtgtggtggcgcgtgcctgtggtcccagctacttgggaggctgaggtaggagaatcgcctgggcccgggaagttgaggctgcagtgagccatcatcacaccactgcactccagcctgggcaatgggagtgagaccctgtcccaaaaacaaagtagtaaactattccaccagtatgctttgataactcctgtatgttttctaagccccagtgatcttaaaatatattcacctgtgtaccccttaagagtactctctctgtcgcccaggctggagtgcagtggtgcaatctcagctcactgcagcctctgcctcccgggttcaggtgattctcctgcctcagcctcccgagtggctgggactgcaggtgcgcaacaccatgtccggctaatttttgtatttttggtagagacagggtttcgccatgttggccaggatggtcttgatctcttgacctcgtgatccgcccgcctcagcctcccaaagtggtgggattacaggcgtgagccaccacacccggccagtatattcacttgtgtaccccttaagagtactttaaaaagctatttacctcttttttttttaagtcaaggtctggttctgtcacccaggctggagtgcagtggcgcagtcttagttcactgcaacctccacctcccaggttcaagctgtcttcccatctcagcctcctgagtagctgggactatgggcacaccccaccacgcccggctaattttcgtattttttgtagagacggggttttgtcatgttgcccaggctggtcttgaactcctgagctcgagccatccgcctgctttggcctcccaaagtgctgggattacaggcgtgagttttacccagccccacctcatatttttaacccgataagattattcggtaaaatagatacattgcataatacctagttggcaggcagagacctcattgtcaaactagagtcaaatcagactttgtcagaaagtgtgatgtcccagttccaaacagtgtatttagtactgtccttgtgaagaagtgtttcgtttaaatcttaattctaagataaaaaaataaggcatagtgcattccgacgaggttgtctcttgcggggaacaactgctctcttcagaattgtttagcaaagctctcaccttaggcatagcttatgagggactatctggagctatgcttttggagccagggattttctttcaccctggtgctgtctgtgtacgttggaagatgggcaagaagtatgcctctctcagtaaagtggagaggggaagaaccagaagactcctcaggccccttgtataatagaagagtatgttacatggcatataacggattgattaccttagatgtttgcacctaactgtatatgagcaaatgatgctggattaatgttcatcataatcagtatggaaatggcattttgactaggaaaatgtcctcattcttaagggatgcaggctgaagtcttcagccatttcattgtataggctcatggataaagcatcagttatgctagtattacttggtgaatctaggtaaagggtatacaggtatccattgtactatattctgtcacctattctggaggtttggaaatttgcaaaataagtataaatagattactgagcctgtaccaccttctaaaaccagacagcacccacccccagttggaatactgatagctctaaaaacttagtaaaacctttgttaggattaacaggagagtatatgaaatcaaagctttttttgttcttgtaacagtttattcatggaggacacactgctaagatttcagattttagctggaaccccaatgagccttgggtcatttgctcagtgtctgaggataacatcatgcagatatggcaaatggctgaaaatatttacaatgatgaagagtcagatgtcacgacatccgaactggagggacaaggatcttaaacccaaagtacgagaaatgtttctgttgaatgtaatgctacatgaatgcttgatttatcaagcgccaaaaaggcattgtatagtaggaaatgtaagtggggtggcttatggcttctttatcctctgattctagcactttcaagtgagctgttgcgtactgtatcatattgtagctattagggaagagaagaatgttgcttaagaaagaacatcaccattgattttaaatacaagtagcagggtattgcctttgattcaactgttttaagtcctcattttctcaaactaagtgcttgctgttcccaaatatgcaagaataacttttacactttttccttccaacacttcttgattggctttgcagaaataaagttttaaaat

SEQ ID NO: 691 - DNA, 4370 bp, Homo sapiens
tttggtttaggcacagcctctttttgccatctggaatcaaagagcttgtgctgacgtgcttgaccgcgaacttggccctgccaccacccactccaggacctcctggcctgacttgcgcacatgcacacagggtgtcgggaggtgggatcatggcaggagtagttttgacttgggactgcagaccttctccactggcatttaagaagtgtgctgtactcgcgaggaataatggcagtgtggctgcttgggtgccctgtgtgggtgccggcccagaccttgcttagcggtcccctcctggtggagacctgctgctgcagactcagtccctgcctttgacgatgcccgaccttccccgctcatggcagtggagggtgagggggtcttggcaacagtggagatacgtgtgctgtctaaggagggacaagaagctgctcacaagcctcgtgcccatcccaacactcagcgtggcctcctcacaggtcttgttccgagcgagtggtggcaagcccatcgccgtgctctgcctgactgtggagctgcagccccacgtggtggaccaggtcttccgcttctatcacccggagctctccttcctgaagaaggccatccgcctgccgccctggcacacatttccaggtgctccggtgggaatgcttggtgaggaccccccagtccatgttcgctgcagcgacccgaacgtcatctgtgagacccagaatgtgggccccggggaaccacgggacatatttctgaaggtggccagtggtccaagcccggagatcaaagacttctttgtcatcatttactcgtaagtgcacaggctttggggacctggaggcggtggcggaggagaggaggaggcaggcctggggctgctggtggattgaaagtgggcttggccccttcctaaaattgggggagctttcgggccttcgctttgtgaggcgggattctgctgcgagttcagggcccgcaggggtctagggaaggcaccttggaggggcacgtgcagcctgagggacttgggatgcagctcctgccaccaaggagagacaccagtcagcctctgtccccagatagtggcaagggccacccagaagcccctcattacctttttcttgctgagtccctaggctgaacagcatgaatgaagctgtggtccctcctgcggagaggcaggactgtggtggaaatgcccatccctctctcctccaggctaaatgacccggcccctttcccctcccctcctaagtcggatccccaagccctgtgagaatcctttcaaactggtgtgagctcggagatttcctgcagtgcttctgaggatggggcaggggctaacctgcactcagtgcccaccacagaggggccacgtgaccacgtctcagagtggcttcctcgtgagcccatgaagatgcctcacccagccccatttgactgtgaagcagcaggctcttggccctaaaatgctaacaggggcttccgtgctcaggccggcatgacctccagccccaccctgtctcctgcgtggcgctgcccttggcttagcctcagaacccctattgggggtggacacttgtccaggatgtgtgtttggccaaagcgtgccttgtcatttgtttgacatgtggttcctaagcagccctgctgcgccctgagagcctctgctgtgggtgggagatgggcagccaggggtggagccaccaggccctagctctgcctcctggggcctggtcctccggggctttccctgcgtggccccagctctgcctcctgtggcctggtcctctggggctttccctgcacagcctcctgtctgcccacgctcctggcagcccttgttggcctctcgtgggccggtgctgagtcctccgggacaagtgcagatggctcccatcccactgcagggatcgctggctggcgacacccacacagacgtggcaggtctacctccactccctgcagcgcgtggatgtctcctgcgtcgcaggccagctgacccgcctgtcccttgtccttcgggggacacagacagtgaggaaagtgagagctttcacctctcatccccaggagctgaaggtacggcctctctgggggctgttctgagcctctccccaaccccagcctggagacgggcagtgggcattcagctggagcacagtgggtggccctgacagcagcttttccagcgcctccagcgcgcagacgctgttaccagaggcctctcggcagttgcctttcgttagatgtgccattgtggggtgagtgacgtacacaccaaccccaaaggccggtgttcagaattcctggcaaggtgaacagtgacaggagctctggtgttagtgaagccacagttagatggggtgggagggcggcccctggtgccaccagctggccggggttttaagcccaagatggcttcagttctgtctgcggaggcagcgcttagggaatagtcgccgtgtgagaggagggacttgcctggtgtggacccaagtcgcggccacagtcatgtcagggttggttgtggcctcagatttggccgccccggaaccacccatgaccttgggctcccctggctgattgggctgcaggcgcccaggagccccttgcttgcacatcctgagaggctgtgctctgacccgcctctctcgctcttgaagacagaccccaaaggtgtcttcgtgctgccgcctcgtggggtgcaggacctgcatgttggcgtgaggccccttagggccggcagccgctttgtccatctcaacctggtggacgtggattgccaccagctggtggcctcctggctcgtgtgcctctgctgccgccagccgctcatctccaaggtctgtatgtgtggcaggcacaggctgaggggatgggggctcaataccagggcactgcaggacccccacctcggccctgtgactcggaccactggatacagtgttctgacccagcagggccgggtgcatgagtgtttgctcctgtgctgtgtctctcccggatggaagctccagagagcgtctgtcttatctctgtgggggtccccgtgcacggtgcacaggagactcagggaatacttggaggaagggccagtggctgttcccgtgagtggccgcagcgtctccctgtcccctccctccacaggcctttgagatcatgttggctgcgggcgaagggaagggtgtcaacaagaggatcacctacaccaacccctacccctcccggaggacattccacctgcacagcgaccacccggagctgctgcggttcagagaggactccttccaggtgtggtggggctgtgcctgggactcctaggggaagacccggggacctgaatggagggcagttagcctgcatttaggagcgagttcctcaaatcaccagcagtcttccaaaagccccagggcggtgacaggtaccatcccatagttgggtgggcccgttgtctctttagtagctggagatttagcaaagtttctcctgagtgtgggaaagggtgttgtgcccagggcttttcatggtaatgttagacagctcagtctcggaaataagtgtgccttcgagtccaagtaacgcgtcacactggctgagcactggttcccatccttgtaccgggcgctgaagtcaaaggcaggccttggatgcacccgcagggctcccctgccttgtcagctccccttggaaataaacacgaccatgcagagaggttgctggtgagagcgtgggacagcccgggggtggatgctgggatttggatgcttatttccaggtcgggggtggagagacctacaccatcggcttgcagtttgcgcctagtcagagagtgggtgaggaggagatcctgatctacatcaatgaccatgaggacaaaaacgaagaggcattttgcgtgaaggtcatctaccagtgagggcttgagggtgacgtccttcctgcggcacccagctggggcctgtctgtgcccctcctgccctgcaggctgtcctccccgcctctctgcagcctttcacttcagtgcccacctggctgacctgtgcacttggctgaggaagcagagaccgagcgctggtcattttgtagtacctgcatccagcttagctgctgctgacacccagcaggcctgggttccgtgagcgcgaactccgtggtggtgggtctggctctggtgctgccatctacgcatgtgggaccctcgttatcgctgttgctcaaaatgtattttatgaatcatcctaaatgagaaaattatgtttttcttactggattttgtacaaacataatctattatttgctatgcaatattttatgctggtattatatctgttttttaaattgttgaacaaaatactaaacttttacacgtc

SEQ ID NO: 692 - DNA, 815 bp, Homo sapiens
tacacacatcacaggttacgtccttcaacattgtgtacaggcacatacacacatccatgcactcacacacacatgcacatgcacgcgcacacacatcacaggttatctccttcaacattgtgtacaggcacacacacacatccatgcacacacacacatccatgcactcatacgcacgcacgtgcgcgcgtgcacacacacacatcacaggttacctccttcaacattgtgtacaggcacacacacatccatgcactcacacacacatgcacgcacgtgtgcacacacacacaccacaggttacctccttcaacattgtgtacaggtgcacacacacatccatgcactcacacacacatgcacgcacgtgcgcgcgcacacacacatatcacaggttacctccttcaacattgtgtacaggcgcacacacacatccatgcactcacacacacacatgcacatacacgtgcacgcgcgtgcgcgcacacacacacacacatcacaggttacctccttcaacattgtgtagagcacaggccagcaagcttttcctgcaaagagccggagagtgaacattttaggctttgtgggccagacaatctctgttgcaaggattcagctctgccatagacaatacataaatgcacagatgtggccacgctccagtaaaagcgtattcacaaagtcagacggcggggccaggcgtgggggctcacgcctgtaattccagcactctggaggccaaggtgggaggatctcttgagcccagtagttcaagaccagcctgggcacacataacaagacctcatctctac

SEQ ID NO: 693 - DNA, 5123 bp, Homo sapiens
agtgggggcctgatagcgcggcggtgtggaccgcgcggccgaagagcgcggcgcccagagcgcgggccgctcgcggagccacagcccgagccgggtcccagccggagccgagccccagccgagccgagccgggcccggagcgcccggtgcccgcagccatgccggccggccgcgccgcgcgcacctgtgcgctgctcgccctctgcctcctgggcgccggggcccaggatttcgggccgacgcgcttcatctgcacctcggtgcccgtggacgccgacatgtgcgccgcgtccgtggccgccggcggcgccgaggagctccggagcagcgtgctgcagctccgcgagacggtgctgcagcagaaggagaccatcctgagccagaaggagaccatccgcgagctgaccgccaagctgggccgctgcgagagccagagcacgctggaccccggagccggcgaggcccgggcgggcggcggccgcaagcagcccggctcgggcaagaacaccatgggcgacctgtcccggacaccggccgccgagacgctcagccaactcgggcaaactttgcaatcgctcaaaacccgcctggagaacctcgagcagtacagccgcctcaattcctccagccagaccaacagcctcaaggatctgctgcagagcaagatcgatgagctggagaggcaggtgctgtcccgggtgaacaccctggaggagggcaaggggggccccaggaacgacaccgaggagagggtcaagatcgagaccgccctgacctccctgcaccagcggatcagcgagctcgagaaaggtcagaaagacaaccgccctggagacaagttccagctcacattcccactgcggaccaactatatgtatgccaaggtgaagaagagcctgccagagatgtacgccttcactgtctgcatgtggctcaagtccagcgccacgccaggtgtgggcacgcccttctcctacgctgtgcccggccaggccaacgagctggtcctcattgagtggggcaacaaccccatggagatcctcatcaatgacaaggtggccaagctgccttttgtcatcaatgatggcaagtggcaccacatctgtgtcacctggaccacccgggacggggtctgggaggcctaccaggatggcacgcagggtggcagtggcgagaacttggcgccctatcaccccatcaagccccagggcgtgctggtgctgggccaggagcaggacactctgggtggtgggtttgatgccacccaggcatttgtgggtgagctggcccacttcaacatctgggaccgcaagctgacccccggggaggtgtacaacctggccacctgcagcaccaaggctctgtccggcaatgtcatcgcctgggctgaatcccacatcgagatctacggcggggccaccaagtggaccttcgaggcctgtcgccagatcaactgagcacggcaggccaggctgagcccgcccgccctcgccccctgcttgtgcggcgatgatctgttttgtgcgtctcttctctcccttttccccaggaatgaaccgaggccgtcgcccctgcacacgcacacgcacacagcctggttttgtcctcatgcacacgaagcagcccctgctcccatctgtccctgaggaagccccacttctctgtaggagcccggactctctcaggcatgccccattcacagctgaagtgggtgctgcaacgtcttgaacaaggcagaagttggtgagaggatctgtgtgtgcgtgtctacatgtgtgtgtctacgtgtgtgcgtgcgtggctgggggaggccttttctttgaggacgtacctcatttccttctttcttctggctttggaaaaatctcatgatgaaaattcatatttgccaactttgttagctgcgtgcgtgctttggggttggtgcaacctcagtacacgcatttgtctttgtttgcaaacctttctcagagcgacatatctttatattgatgtaataaatgtcttttagtggtttgtcaaaggccgggggcgggggctctctacagagaatttttattttgtaatagaagtgaactgtctctgaagggtgaaggcaggccgtcctgggatggtaccctgtgctctcccgtggaggagaggggatggctgaggacactggcccttaccccagggccagacagcatccatccctgctgtttgcatctgagagcagcatggggcctgggaggtcggcctgtgtgcccagctcagctagctctgccccaggacggccctgccctcgaccttcccacctcctcagatcctgcaaggctggggtctgcccctcccttctcacctctggagctgtgctgcactgcttcagcccagagggccctgagagaggagcgtgccacccacagcccgggaagccgggccccagcacccctctcctttggcctccggcagtgcagaccagaggggaccttttaaggaaagaagccgtgtttcgatgaagacctggccacatggggccactgggacttcaacccagcccatcggtgggaaggtcctttttgggggcctttgacagccatatccctcccagcacaccaggcgccaggtgagctggttcagacccctccaggggtactccagagacctcacgtgtggagccaggcctggccagggcaggggcctgaaacccactcctccatctcatggggctcacggcctacagcagcccacaagctgccactggccggcgacactgacacctgagcagtgtccagaacctttttgcctttttttgttccccgtgaaaagcaacatggacatttccttctagtccttccaaggaggggagagaagtgtatgtgcatttgtgtgtgtgtgtgtgtgttgtgtgtgtgtgtgcgctaagtgagaaagagagcaggctcgggaggccctgcccagggtaggaggagcttcctgctttgcaccatctggtggtcgcacgccctgagggcaccccgactctgtctccaggagtctcatcagcaaaccgctgacaagtctttctagaaattctactgcactgcctggctcagctgcagctgcagacatttctgcaggaggagcaggtgtttctgtcttctgttccttctagggccacctgtccccttaaacacaggtccacgttgtgtcaagaacctagtgcatctgtgtgtgtctgtcagtgtctctgtgtcagtgttcttgtgggtgtctgcacggtacccggccgccgttctgcaatgcatcactcccgcagaggggggtgcagatcaggcgccgtgctgcgcgttgttgttcaacagtggctttttcttagataatcgtgcttcctcagcgcccgtcgggttgtggcatccttggatctgcagggatcttctccgtttgcatgttcctcggggtggcgtgttccttgctccctgggtccgacatgtgttcccgcacctgcatggactgccccggttctgtgttgtgtgccgagtgccgcccagtgttctgtgaccacccgtgtagctactgaaaatggctgggtaagcaagtcaagggtgttggaggaggtcaagagagagctcagtttccctctccccctccccaaacacaccaagaagcatttttaacgtgtaggttgagaacaagcctaaaggattcccacagctgggagccagcaagagagcttggagtcgcctctctagaccagatctagccccaccctcactccagccatctcggagcccttgtgtaggcaacgcccggtgcgggctgtgtggggtgctcccctgccagcacctccggccagccccgcccctgccgatctactggaccgcagaccaccttctccccccgtgggccaggtgggagctgtccgttcaggaccatgagccatcctctgccctgactagcgaggggcagagcacaccccagtgcttacgcctccacccctgcagcctcctggcccgctcaccttcctcacccctcctctgacccacccatggtgccagggccgaagctgacctttagctccctcctgccccttgctagggtctgagccaagcccctcgactccctcactgtgttgacacttggcactttgctggccccgagaaaggtcgatgacacagccgcaaatctaatccacgtagttcccatttactccttaatctgattgatgttccctcttgcactgaataatacatgcctctctcaggtaagccattttataaaacaagaagataaaaagcactgttgaggcagtgtttgcttttgccgagctggtgtccgacagctccctgggtgtccggggtgggagagctgttgacagaagctctccgggccctcaggggcttagatcccacttgagtcgtaagccttcttgcttttgataacacagtattatttctcttactgtagaagaaaaagtttattaccaaacaagagtatttttatgaaagaaaaggacaaacctataaattaactcaacctatatctcccttgaaaatactttcaggctccaccaaaacgtagaactgaaagcatgtattttggaagaaagagatacattttgtatgctttcttttccttttgtagattcccagtttattttctaagactgcaaagatcactttgtcaccagccctgggacctgagaccaagggggtgtcttgtgggcagtgagggggtgaggagaggctggcatgaggttcagtcattccagtgagctccaaagaggggccacctgttctcaaaagcatgttggggaccaggaggtaaaactggccatttatggtgaacctgtgtcttggagctgacttactaagtggaatgagccgaggatttgaatatcagttctaaccttgatagaagaaccttgggttacatgtggttcacattaagaggatagaatcctttggaatcttatggcaaccaaatgtggcttgacgaagtcgtggtttcatctcttaaacacagtgtgtaaatttattcaactaacgatgggaaatgtattacttccgtacacagtggactgaagtgcaatttgttgaaagggaacaagtcattgaagagaaaaaaaaaagcccaatacttagagtcccaattttgtctcatttgcc

SEQ ID NO: 694 - DNA, 3692 bp, Homo sapiens
tggtagccctggcatacgaagcccttctacagaggggaaggggtagaatgggatggggtggcagcagccaggtctaggggttggccaaaggctcctttcccttggggaggcccaggagatgggcttggggcttgttaaagagacagcccctttcccctgcacaaatggggcaggtgcaatagtcttggagttggtagtattgggtgcccagctggtggaacagtggcctcaaggattgtcctgggtcctggaggtcaggattcgggcaagaagattgtatgaggcccatttgcttggtggagaaggtggtccagacaggcggcattcctggggtcagtggactcccactggaagcccctagtggcctgggtaccttgccctggtcttagagacccctgagcactgagcagaagagcagaggagcattttgcacaatggagaagccagaagaaagagggtggcccagatggctgggagagctgagaagcccttcccacaggcaaagacagagcccccagccccctggttggggccagggcactgagtctgtcaccaactgggcactggagagatgaaaccaaaggtgggcaggggttggcgacagcactggggactatccctgtgggtcctaggtctgtgaagcccctccccaatgcctgtgtcgcgtacagttttatgtaccaataggcgacatttggccagaggagagcccccctcaaacccagcctgacccagtctgtgtcttcccagaggggacctagtcggtccccatccccctacttcagggcatgtctctccgtagggggagggtatatggggacatatttctctcctagggtccttgaagcatgtttcacattccggggtggggggaagttctctgggcatccctcacctctggggtctctctaggccctatctctccccttgggagtctccgggggacatgtgttcccgctgaggaccacgggagcatgtctcccccaattacccaggctctctggggagcctgttttcctcccagggttcctgggagtacttaaggcaagtcagtttcgggccatctctcttcccagggaagggggctatctctgaaacacgtctgggaagggatgtttctggccttacccccatctctcctatgggggtttctctgccctgcagcactttaggatgaggctgggcatctctgagttgtcttttctcctaggagccctgggatacctctctctcccgagggtagggcctctggagccatttcttccctgggtcggggctgtctccgggtgttgggagggcttgtgttggccatgagaaagtctcttaaggggcgtctccactggggacttctctgggaggggggactgtgtcccgcccatggggtttcgggcgggtgtgtctccccccttccgggctcgaccggccccggcctcctccgtccggctcccgggtaaacacccgctccggagaggtcggaaaacagagaccggatcagccggttcctggccccgcctcccggggcgttgctccctcctccgcccctccccacccccacacccgcccagcgtcgcgcgcttttgctctacccgcgccctagctccctaggccggtactgtgtgggcctcgctccggaccccggggtcggtccagccgctgggattggccgaccgcagggactaatcccggatgagcctcgtgtaaacccggatcgacagcggggacggcgggggttgctggcaccccttcatccgttcccagacgcggagcatcacggggcatagagcccaccccgaggctccttgctgctttcggagagacccgagttggatctgcagttgggggcgtggcggggcaggagatgaagaacgcagggccgggatctgacgcgccgagagcctggcgcggggtgactggggtgtggggcggaaaggcagagatctctcgggcagtacttgaatctaccggcttaggtcagctccctactcagtctacaaccgaagccccctacctatcctccagttacagaatcacagaccctccccctaccagtgggtgtggcaacccttcctaaacctgaggcctcacctcattaggagaggcgctgaatcagcgggggaggggcccgcattgtctccacccctgacttgaccccacagtgaagggtgaggagttccttctgttaaggcctagcccaggaaaagatgtctggagttaaggaagttggaggagatgtggtggccgactgggtaccagaatcctgtcactggttgattaactcattctacaaacatttcctgagcccctcccatgtgccagaccggcacagggtactggaccccaagaatgacacacagtctctgtgggaaaggcagacaggtaaacaatgaccacatcttgtgttcggccctgccttgagccggaaattctggcaggagacctaaaggcgctgtcctctccaaagtctagaggctttctggaaggggtggtgccagagctgagtttcaaagggcaaatgagggataggctactgaggaaggggtcagccttgcaggctgaggaggagtatgtgccagggtctggaggtggaggaggaggtgaggtggctcaggagggcaggagaagttggagaagaaggcaggggccagaactaaggacctgctggtcaacttaaagtgcttggattgaggggttggagaggagccatttacagattttaagcctgtaaaagaaaaggtcagatttacattcttccagattctgtgttcctcccttccctgccccaggtttctctggggatgcctgggttgggagtggagatacacaggcagacaggaagaggaaccaggtgcagtttaggctggttaagaatggtccctggctggtcgcggtggctcacacctgtaatcccagcactttgggaggccgaggtgggctgatcacgaggtcaggagttcgaaaccagcctggccaacatggggaaaccccatctctactaaaaatatcaaaattagctgggcacggtggtgcgcacctgtaatcccagctacttgggaggctgaggcaggagaatcatttgaacccgggaggcagaggttgcagtgagccgagattgtgccactgcactctagcctggacagcagagcaagactccatctcggaagacaaacaaaagaatggtccccactttccatcaaacttggagtcagagagacctacgttagaaatttggctgtacttatttctagtggcatgaccttgggtaggtggctgagcctcagtttcttcctctgtaaggtggggataatagtgcttaccatcaccaaaggttattgtggggcttcaatgagataatttgtccacttttttatttatcacacgtctaacacctactaagtggcaggcactgtctcaggtgctagcattatggtgctgaataagacaggcatgatgcctactctctctctctgggaacttgcattctagaggaaaagacagacaataaacaaataaatgagataattatagattgtgttaaagtgctgtgaaggaaacaaacagtgggacaagaagggggataactggaggtgggggaggggagggggctgctttacccagccagggaagcttccctgaggaaacctgaaggttggccagtgtactccagcctgggcaacaaggtgagaccctgtctc

SEQ ID NO: 695 - DNA, 3910 bp, Homo sapiens
cttttttctttttctttttttttttttttttcttcgagactgagtcttgctctgtcgccaggttggggtgcaatggcgtgatctcggcttactgtagcctctgcctcccgggttgaagtgattctcatgtctcggcctcctaagtatctgggattgtaggcacccgctaccatgcccagctagtttttgtatttttagtagaggcggggtttcacagtgtttgtcaggctggtctcaaactgctgaccttaagtgagctgcctgcctcggcctcccaaagtgctgggattacagatgtgagccactgcacctggcctacttatgcttttttctattgtgaacttatagaatatattataaatgttttttttttttttaataagatgaaatcttgctctgttgccaggctgttgtgcagtggcgcgatcttggctcactataatctccgcttcctgggttcaagtgattcccctgcctcagcctcccaagtagctgggagccaccaaacccagctaattttttgtattttagtggagatgaggtttcgccatgttggccaggatggtcttgatctcctgacctcgtgatccgcccgcctcggcctcccaaagtgctgggattacaagtgtgagccaccgtgcccggcgaaatgtttttgtttatttatttatttaatttttgtttttaagaccgagtcttgctctttcacccaggctggggtacagtggcatgatcgtagctcactgtagcctcaaactcctggtcttaagtgatcctcccacctcagcctcctgagtagttgggactagaggtgtgccaccatgcctggcagggatacattataattttttttttttttttaaatggagtctcgctctgtcccccaggctggagtgtagtggcgtgctctcggctcactgcaacctctgcctcccgggttcaagcgatttacctttttttatttttcttttttgagatggagttttgctcttgtcgcccaggctggaagtggcgcgatcttgggtcagtgcggcctccgcctcctgggttcaggtgactctcctgcctcggcctcccgagtggctggaatcgcaggcatgtgccaccatgcctgccgaatttttgtatttttagtggagacggggttttaccatgttggccaggacggtctcaaactcctgacctagggtgatccgcctgccttgacctcccagagtgctgggattacaggtgtgagtcaccgtggccagcgtattatgagattttcttcccctgtgtcactggaacacaaactgtttccagcctgtgtgagctgcaaggattgttcctcctggtgtaatatagtttggatatttgtcccttccaaatctcatgttgaaatgtgacccccagtgttggaggtggggcctagtgggaggtgtttgggtcatgggggcaaatccctcatgaatggcctggtgccatcttttggtaatgagtcagttcttactctattagttgccgtgagatctgattgttaaaaagagtctggcacctactcctttctctcttgctccctctcttattatgtgacacaccagttccccttccctctctgtcacgattcattgctccctgaagccctcacaagaagcagatgctggcgccatgcttgtgtagcttgcagaactgtggccaaataaacctcttttctttataaattacccaccctcaggtatttctttatagcaatgcaaatggactaacacaagatggttgtttccctggccttgggtagttgacttatatccatctattgataagtattcacctgaagactggaaggcaatatgtttagtctctttctgtgcagttcttgtctccatgcgcctttcttctcttcagtgctctgccttgcaaattttagttgttttggtcttccagaattttcaactgtcttctcaactcagggagactactaggctctgttcaagttctctctccctacactttatcctgtaagttctccaagcagaaagcagtaagctgggacagtcatagtactcacctaatttctcccctttttgtgatcactgttctacactgtcttatcagctcattgtttgtttgtgttagtttggctatatctatttttaggttagttcaagattttgacaagtgaaattgagcatcacaattggcatatagtagataattcataaatgttcacatgaaataaatgggaggatttggttaagaaatttattacaggagttataggagtttcttaggcattgctctttttgtttgtttgttttgagacggagttttgctcttgttgctgggctggagtgctgtggcgcgatctcggctcaccgcaacctccgcctcccgggttcaagtgattctcctgccttagcctcccgagtggctgggattacaggcatgtgccaccacgcctggctagttttgtatttttaatagagttgtggtttctccatgttggccaggctgttcttgaactcctaacctcaggtgatccgcctgccttggcctcccaaagtgctgggattacaggcgtgagccaccatgcccggccacattgctctttcttattggctttcctattgtaggcattgtaatgtcatgtaactaacaagttaaaattttttttctttttttgagacagagactttctctgtcacccaggctggagtgcaacggtgcgatctcggctcactgcaacctccatctcccaggttcaattaattctcctgcctcagcctcccgagtgcctgggattacaggtgcctgccaccatgcctggttaatttttgtatttttagaggcggggtttcaccatgttgggcaggctggtctggaactcctgacctcaggtgatccacctgcctcggcctcccaaagtgctgggattacaggcatgagccaccgcgccctgccaaaaattaaaaaaaaaagttattatttttttgggatggagtctcactctgttgcccaggctagagtgcagtggcgcgatcttggctcactgcaacctctgcctccagggttcaagcaattctcctgccttagcctcctgaatagctgggattgctggcgcctgccaccatgcccggataggttttgtgtttttagtggagacggggtttcgccatgttggtcaggctggtctcgaactcctgaactcgtggtccagctgcctcggcctcctaaagtgctgggattataggcgtgagccactgtacccggcctaaaattattcttttaaaaatggtaacagggtctcactatgttgctcaagctggtttcaaactcctgcgctcaagcagtcctcctgccttggcttcccaaagtactaggattacagatgtgagccgctgtgcctggccccgagtagtttttattgtatacgtatactgtgactggaagttaggactgtttttaggaaatacactgtgagattttgaagtttgccgcattgtctttgttgtgatcagtgtgaagttttgaacatagtggattttgatttaggggatgaaaattcattcaagatgatactgtcagttttcagaaataatgaagttgtatagtgttttctgcaatggaaagctgaacttttacaaaggctcagttagcatttctgaaatgatggtgtgctaattatctgttgaaatttaataatgaaaaataaaattttcagtccatggacaaataaatagtattttatagattaaaaaactttgtatttcatagaaaattatcttttaattccaaaattagattgaaaaattataagcagaagttgtctgacatagttatgggaagtgtctttggaaaccatgctatatatgttacagataatgtgattaaaggttttttctcacttttaccaaaataaaattaaaagtag

SEQ ID NO: 696 - DNA, 3831 bp, Homo sapiens
ctctcccagcccctcagagcctgtgggaggtggtgggatggactctgctggcactggtgcgggatgggttgcagctgcagctgtgggtggctttgttcttacagcctagctttcagagtcctggtgcagcctggcagcagtgtttggggaacaggcgagatagaggagctgagccccttctccaacagccgtcctctctttctgttgaccaaccagagaggctttttgcctgaggtcagcaagctggcctccctggttggcagggggagtgcttggcttccatctggcatggtttccggatgggagaaagcccctgagggtctggtggtaagtctgcgatgcttcccatcaggagagtgcagtgtgcagtgtgtccccttgggcatcctgcagcttgccattcctctgctttctctctgcagctccggagttgggctgctcacaaaccaagctgtctgtttatatggagtgcctggagggcatctgccatgagtctgtcgctaactgcactaaccaggagagctggctggttggggagaagacactaaccctgagctgtggctaaaggaagtggaggggccgtgggatgcggagagccgagggctaactcccggacagcggaacagagagagctgccgacaaacagacgcaggcggaggagccgtcacctcccagaatgactagtgccgcccctgctaagaaaccctaccgtaaggcaccaccagagcatcgggagctgcgtttggaaattcctggatcccggcttgagcaggaggaacccctgactgatgcagaaaggatgaagctcttacaggaggagaatgaagagcttcgccggcgcctggcctccgccaccagacgcactgaggccctggaacgtgagctggaaattgggcaggactgcctggagctggagctgggccagagccgcgaggagctggacaaatttaaggataagttccgcaggctgcagaacagctacacggcttcccagcggaccaaccaggagttggaggacaagctgcacacactggcctctcttagccacagctggatttttgcagttgcgtctgagtttgtgtgtcttctcccttgccctggccttctcctcagctgagatctgggattgtgggccctggctgttaccctgtgccccttgagtacacccgctcctttctcttccctgtatgaggcccgtttaactgtcaatgcctccctcccaggagagaggtggggagcctagcctgctctgcccttggctctggtagaggtactgattgatgtctccactgaacacccaaagcttcttggctccagtggcagcaagcccaggctgtgggagtggggaggggaggctgcagatccagtccctgaactggagatcagaaggctacttttgagcctgcagcttgctccctgctcaacaaggtgccctggctgccaccgcgccctgcttcctcttccctctcctagcctgatgctggaaacagctgcacacataggaggcttcagccccctggtttgcagttactgccgttgaggtaccagctgccttgcctggtgcccagagcccctggaacctcaggggatggacagctcttatactgcctgtgtcctgggcccaggtggcaggaagtcatgctaagaaagcccccaccccacagccagtccagagagcgggagagatgcccagtctccttctgtctgtccgtcatttgtctctgctctgtccgccttggctgccctagcacctgtggcctcttgtgtctccaggatgggaggaggtggagggagaggaagggctggctagagtgtgggctgggttaacctcaagtctgtgcttcagatcaagaaggctgagatggataggaagacgctggactgggagattgtggagctgaccaacaagctgctggatgccaagaacaccatcaacaagctggaagagctcaatgagcggtaccggctggactgcaacctggctgtacagctcctcaagtgcaacaagtcccacttccgaaaccacaagtttgccgatctgccctgtgagctacaggacatggttcggaaacatttgcacagtggtcaagaggccgccagcccaggtcctgctcccagcctagccccaggggctgtggtgcctacctcagtcattgcccgagtgttagagaagccggagtctctactgctcaattcagcccagtcaggcagcgccgggcgccccttggctgaggatgtctttgtgcatgtggacatgagtgagggtgtcccaggtgatccagccagtcccccggcccctggcagccccaccccacaacccaatggggagtgccactctctgggtactgccaggggctccccggaggaagagctgcccctgccagcctttgagaagctgaacccctacccaaccccgtctccaccacacccactgtatcctggccgcagggtaatagagttctctgaggataaggttcggatcccccgcaacagccccctgcccaactgcacttacgctacccgccaggccatttccctgagcctggtagaggaggggagtgagcgggcccgccccagcccagtgcccagcacccctgcctcagcccaggcctcaccccaccaccagcccagcccagcacccctaacactcagtgccccagctagctctgccagctctgaagaggacctgctggtcagctggcagcgggcatttgtggaccgtactccaccacctgctgctgtggcccagcgcacagcctttggacgcgatgccctccctgagctgcagcgccattttgcccatagccccgctgacagagatgaggtggtccaggcaccttctgcccgacccgaagagagtgagcttttgctacccacagaacctgactctggctttcccagggaggaagaagagctgaacctgcctatcagtcctgaggaagagcgccagagcctgctgcccattaacaggggcacagaggaggggccaggcacttcccacaccgagggcagggcctggccactccccagctccagtcgcccccagcgcagccccaagaggatgggggttcaccacctgcaccgcaaggacagcctgacccaggcccaggagcagggcaacctgctcaactagggcccctgctggccttcctgccattgctgcaccaggactgcaaggagtccccacaccttggcagctcagggtccccagtccaagcccttgacctctcctctatccagacccgcacagctgtttcctgtgtggatggggtcaggttgtgggccatgccaggcctgtcagctgcgttgactgactgcagcagcttgcctcatggttttccctttttcttagaatatttattcttcagaggtaacatgcagttgggtctcaagacctttcctccaatcagcccaacccagcccagactgggcttttctggggagctgaggagtttatcagtattcatcttccatcctttcatagtcacaagttttgttattttgtttttttttgggggtgatggtgtaattgttaacctcatttccgtttcctacctgtttgcttccccccccagtcctccgcatgagctgttgccctccaggggcctggcacagctggccttggggacgagggagaggactgattcagggccccctcagctgtctcctccctccctctggaaaggagggtggggctcaggggcctcaagctgggctctgtgtgaggcctggcccccactcccaaccttggctctagactgttactcttaagctttgagaaattttcacattgatgactattttaaaatcaaataaaactattttactggt

SEQ ID NO: 697 - DNA, 4631 bp, Homo sapiens
acttgttccaggaagtaaacagtgtgatgtcggccacccaggaatttggaggggggtatacattcccaagagcccccagaggcgccggggcagaggccggctggactccatgggctgaagttgatggtcgtgggtcagttagaggggtggtgggggcaggtgtggccgggcaggggcacgcacggtggagagttggccagggcaaatcttgtgaccgacacacagacggcaaattcattccttcagccagtgttgaaagaataagttactgccacagaaatctcaccaagcacagaacaaatgcatcacacgcatttatagggcaccgactgtgtgcctggcccacggtgtgtgtcttggagccgggccatggtatacctgattttaattctgaggcttcaaataagagaagattaaaccctggaggatgccatgtctcggaggtgggcaacctgcagcccccatcccacagcctgcaggtttgcagcggtggctggggctgtgtcccagttccagccgtctcaccatgggtagctggtcacttgctgagtggggggaagctgatgcatttttgtccggcaaggacaggggtgtccacctgctcaagctgcccttgcaaggtcccccaaacgggcggtttcaacaacggaaagtgtcctcccgcagttctgcaggccaacgtcccggacggaggtgtgagcagggctgggccctcctgggggcaggagggaggatcttcccggcctctctccttggctctggggtggccgtcttcgccctgtgccttcacatcctcttcccctgtcagtttgtatctgcatccacatttcccttttatgaggacaccagccatgggaccagggctccccgcaaagaaccctgtttgaattctcttatctccaaaggaggcaaaatgaattctcacctccagaaagaccctgtctccaaataaggtcacgtggtggaattggaggttagagctccaatgtgtcattttcttggggggctcctggagacacgagtggggtctccacctggcgatgttggtggggcttgcgagacggttctggcggcgatttctgccagcatcgggcccctgagctcagctgctcaggggccccgggggtgtgagctcggggacagcaaggtgcatctggggagggcctggcgggtgcatcgggcggagtgtgggaaaagctgttctgtgccgggagagtggagccatggtctggaggctggagggccggccctggggaaggagcttggggcaggatgggtggtggctgtgggaccggccggggtggtgcagcccagttgaataggcctcaaacgccccgaatgcagcttgaacctcatcctgaggccgcgatgcttgaactcgcagcccagacctgtgccgtgtgggcactggctctggtgtgtccagagggcctggggtgctctgatctgcctggagctctgagagcctgactgtgggtctgggggtgagatggccctgcagggaaacccactggacagagccgctgctggcccctggggtggacggaaacaagtgcgggaggcagacagcctcctcctcctgcttgtttagagaaaaaacagacttgtgacactgccctcccggccgtccgggcattctttccggggacatggccgctttggtcagtgaccctagggaaggtctgcagaagagcttgagctttcaaagggctgggggcggggagagagggagggagagccggctcctaagccctgggggctgaggctgacgcccagcatggctgcagagtccctgggcatagacagccacccacgtgccctcgggtcacaccctctcgggggacaagcccaggcagacagaggcatcggcccaggcccgagcagacggaaaccgctttcgctgccactgagcccagggagggggctcctcgtcatctgtccacacggagaggagtccgcgccccatcttgtccggcgtgcagaagctccgcctgtgcagacgggtggtcctgccgtctgaaacctgttacctgggagggggtccaagctggaaacggtggagggttcccaaggatcccagcagattgatggacggcagggctgcaggcggacggggcgggggcttcctaaggagagaggtgggcagcctgcagcccccatcccactgcccccaccccaccgtgtggctgctgcctggcctcagtttccccatctgtgaaacaggtgaaatgggctcactgtccgggcctcggagcattcttatgggggtcagggcctggcaagggctgtgcaggctgggctcagaactaggccgcccaggctgcgtggccacaggggtctcggcccccacttctccgtttgagacctgcccagccttcctgtttgctgcagctacggccgtcagattcgccaccaggagctgcggttgtcctcccagacagggagactgaggccctgagaccgaggctggccggggtcagacatgcaggccggggtgaggcaggacacggcttgcagccccagctccctctgtggggccaggaagcttctagaacagtccagttcacgctgacatggcagcagctgctgtccgggaccccacaggcagcaacgtggacagacgggtcacgatcactatatttttgtttttctgagacggggtctcagtgtgttacccaggctgatctcgaattcctgggctcaagcaatccttctgccttggcctcctgagtagctgggactacaggtgtgagccactgcacccggcttccagatcatgatttaaccaaccctccctcccagaagccgcagcccgtgctgggagcctggtggtttttgtcggagggcctggggctgggctggggcctcctgggatcttggtgtgttttctgcccagggtatcctcccaaggtgcccatcaggagtcccaggaccagctggaggtcacgtggggctgtcctcttggcgtccccagaagggccctgctgtccaggctggccggggacctcacctcgggaacttcccgggacccttgcatccctgtggtgtagtgtgcgagtcaggggtgaggctgggccctcgctgagcacctgggaaggcactccaccacccaaagagagaaccatgtaacctcagtgggcttggcagctgtctccccgctgtgtgacctggggcaggcccccgagccgctgtctctgtgagatgcagacataaccggtgtctgctccacaggtcgggtgtgagccttaggttggtatttgtgaagcgctgagaaggacacccttcactgcagggtgaacagaagtcacccttccaacaacagaagcgatgatgtgtgggacgaggtggatccggggcctgtcctgccctcgggggcagcgtggctggccctctctgcatatggtgccgtcccctgccctgggagcctctctcctccgttccctgtggtcctctgggggcatcaggcctctgcgacccacctggtcaccaagcgttgtgatgggaagagccccctccgagctgagctgtgctgaaccgccctgggctggtgacctcacctcccaggcctgcttcctgccacctctgactgtggcaggagcactggtgaggggcggcctgtcagggtacaggaggtgaagctggggccgtctgatgtcgtactacggtcccagcagcatcaccgtggccggagcagggccgggagccctggcctctgcccacctgtggtcctgtgccacctcattccttcacagccccccatcctggcctcggtttctctgtttgggcaagatgacctctgaggccctccagcccctcccttcgtggactctgagctgctttggacatcatgtttttatcttccagaaacttcagtgctctcaagaaggaaaatatttatgaaaacaataaactggtgagtggcccccgccccggcctcacagctggcttagccagcctgctgagccccacccacgtccgagggaccgagggactccccccaggccctgcacctgccttgggagtcctgcctgggaatcgggggctccctgaccagcccggcaacgcgtcctgggctgggtgaccctagcgttctagaaatagcctcttatcttggcacccagggcatactggtcccctcttttcctgagctggggagcaaggtgccaggaggtggctggggaccctacttcactgcagggggctcagcccagtctgcctcaggcagaacaagggtctgggggtggctgtggggggctgtggatgggtcccagtgggcctgctgccactcccaccacatgggacctgccttccggccctgccaggattccagtcctgccctgctcaccccagcttccaggcccttccctgtgtgcagcctcagtttgcctgctgcagaataagcaccacgctccctcgtgggcagaggcaccggcagactcaccacgcgccctgcaggcatgtcctgtgctgtgccaggcaggccccggccacgtccctgcccccggagctggccttcagcggggacagtggtcagcactgaagacagtcatacctgcccggccggcactgccctgctcagcacggggacaatttgaacttaagctttaacttaattaaaatgaactaaaatt

SEQ ID NO: 698 - DNA, 5107 bp, Homo sapiens
tttatcacaaaggctgtgtaggctgcaaaaagacctaagagcccccaggcacgagatgaagacgtgggcgcctccctcttacagctgctcaggtggtgctgaggcgccagtgccccggttcttttcctgcacagacacagctgcacatgcgtcaggcagggtcctttactggggctgccggtttgggtatttactccagggctggggtcccctccaggggtccatgagccccacggcgacacttggccagccctgcactccaggccggcactttgggccactcagctccaagcgcttatcccgaccagggcccggtgtggatgcctctgcacgtctccagcgctgcttggtcacagcccttggcagaagctgggtgcggtctgtgaacagctggggatgcagctgggctttgcaacctccaggcagagatgggcactggacactgagcccttggcagccggtgcgcagcacgcaaccgtccatccctggcttacctgctggggccaaccaagcactgggccctgtcggaagctggcaccgtgctcaggaagccagtcaggaaagaaccttctcctagagctgcagtcgagttgggtcagggatgaaattggaccaagaaggcaaaagagatggctcagaagggcggggggaggggcaggggcacgcaggtggtggggcagcgctccctgaggaggtcaggacccttggggccaggaagagagctgtgtggtgtgggggtcaccagcagctctcagggaccgcagatgggctgaggctgcagactctggcttgttctgagtggggaggggcaccaggggctttgagcaaaaaaggctccgggcagacttgggcgtcgaaggccagctccggccactgtgcacagagcgtcctctcaagcaggcggctgaagccaccccaaggctgggcggtggaggcccagggctcccggtgctgagttggactgagggcggggactgagctttggtgggtcgggtaggagcctggggccggaggtgggggccgagtccgagggaggatctggggctgtgtgagtcttggacactcattcgggatgtgggatgggcagcatcatttatctgtttctgcctgcatacaggtacgggtgtttttcttttgggaggccttgagtatttatttaataatggaatcacatttataaaccactctgcagctttcctgctcagcagcacgtcatcagctattttcctgtgagcacatgattgccggctgtgcgctggttctccgagccatgttccccgttcacaggctcttacccgcagtgctgccacggcgccgtgtgcatcccaggatcttgcaggtgtccgctggccgccgtctgcagggagtggcccttaagccctcacttggttctgtgtccccaggcttgctctcctggcctcttccctcaccatgccgcgtccccttactctgaccttggccaatcaggacctgcgtgtctggtggattttggaagccacctcactggggacgggagacataggccaggggacagcctgtgagagggctgggccacggggactgcagaggaggagcatccacggcacctagatgcaggagaccctcgtgggcaggagcgtggctggtggcgcggtggcctcaggagcagtgaggccgtcccctcaacctcttctgtggaagcagagatgccactcgccagacggcgtccagtaaagagggcctgggaccctctgggggactctcaagtcccagaccccctggtccatgtccttgccactgtgctggccgaggggcccctcagcccacatggggcccagggagagggtcctgcctgtctgggcgggccccttggtgggccctggaggctccagtctcagggagaggaaagcctggtctgccttgacaccctcactcgcgtctccggggtctccagggcctggcccaggcttcccagggctgcgctgtgcttccttggtttctggaatcccttgcagatgacagacaagagaaacgggcctattgatgtctagcccgtgtgttgtttactgttcctggagtgagtggtggaaagccctgcgacgattggttcagaggataaggcctcacctggagagtatgtcttgtttactccgatgaggcctcacctggagagtgtgtctggtttactccaatgaggcctcacctgcagcgtttgtctggtttactccgatgaggcctcacctgcagcgtttgtctggtttactccgatgaggcctcacctgcagcgtttgtctggtttactccagtgaggccttacctgcagcgtttgtctggtttactccgatgaggcctcacctgcagcgtttgtctggtttactctgagcctcacattcctttcagtcgctccgtgaatcactgtctttggtgggtcaggaggaatccactccctgggcctgggcctggaccagtgctggtcagacctgctgtgtggggcctggggacgcttgcaggtgtggactggcagctcatcaggaagagctggggaaggcgtgagaccaagacagcctccggcctggagaaggcgtgaggcctaggcagccacatggctggggacagcgtgaggcccaggtagcctctgagggttgggggaggcatgaggtccaggcagcccctgagggctggggaggcgcaaggtccaggcagcctcaggactggggaggcgcgaggtccaggcagcctcaggactggggaggcgggagggccaggcagcctcaggactggggaggcgggagggccaggcggcctctggtgctgctgcgttgctcctgtgcagcctcggggggccccagggcatctggaggcatctgtgagcgtgtgggctgtcccagctgacgtgggtcctttgctccacaggccaccagcttgggctccccacggagggcagcaagtgggacttggggaacccggctgtcaacctgtccacggtggcagtgatgcccgtgtcagaggaagtgcccctcaccgccttcgccctggagctggagcatgccctcagcgccatcggcccgaccctgctgctgactagtgacaacataaaacggcgccttggctccgctgccctggacagtgttcacgagtaccggctgtccagctggctggggcagcaggaggacacccacaggatcgtgctctaccaggcagatggcacgctcacaccctggacccagcgctgcgtgcgccaggccgactgcatcctcatcgtgggcctgggtgaccaggagcccacagtgggcgagctggagcggatgctggagagcacagctgtgcgtgcccagaagcagctgatcctgctgcacagggaggagggcccggcgccagcgcgcaccgtggagtggctcaacatgcggagctggtgctccggccacctgcacctctgctgcccgcgccgcgtcttctccaggaggagcctgcccaagctggtggagatgtacaagcatgtcttccagcggcccccggaccgacactcagacttctcccgcctggcgagggtgctgacgggcaacgccattgccctggtgcttgggggagggggagcaagaggctgtgcccaggtgggcgttctcaaggccttggcggagtgcggcatccctgtggacatggtgggaggcacgtccatcggggccttcgtgggtgccctgtactctgaggagcggaactacagccagatgcggatccgggccaagcagtgggccgagggcatgacgtccttgatgaaggccgcgctggacctcacctaccccatcacgtccatgttctccggagccggcttcaacagcagcatcttcagcgtcttcaaggaccagcagatcgaggacctgtggattccttatttcgccatcaccaccgacatcacagcctcggccatgcgggtccacaccgacggctccctgtggcggtacgtgcgtgccagcatgtccctgtccggttacatgccccctctctgtgacccgaaggacggacacctgctgatggacgggggctacatcaacaacctcccagcggatgtggcccggtccatgggggcaaaagtggtgatcgccattgacgtgggcagccgagatgagacggacctcaccaactatggggatgcgctgtctgggtggtggctgctgtggaaacgctggaaccccttggccacgaaagtcaagctggaggtggtgaagagcagtgactactgcgagtacctgcgcccccccatcgacagctacagcaccctggacttcggcaagttcaacgagatctgcgaagtgggctaccagcacgggcgcacggtgtttgacatctggggccgcagcggcgtgctggagaagatgctgcgcgaccagcaggggccgagcaagaagcccgcgagtgcggtcctcacctgtcccaacgcctccttcacggaccttgccgaaattgtgtctcgcattgagcccgccaagcccgccatggtggatgacgaatctgactaccagacggagtacgaggaggagctgctggacgtccccagggatgcatacgcagacttccagagcacctcagcccagcagggctcagacttggaggacgagtcctcactgcggcatcgacaccccagtctggctttcccaaaactgtctgagggctcctctgaccaggacgggtagaggcctctgctaaagagcccggatgcagcgtcttccgtgggactgtccccaaggctgaggctcctgccaagtcctaggggcctctgtacctgccctgctggaagccctgacttccccggggccccaggctgtgttagggttctctgggcctcttctttgtaccagcagccctgcatacagggccctgtgagcccccctgcagtcctgtgaggcccctgaagctctgtgaggcccctgaagctctgtgaaccccctgcagccctgtgaggccccccgaagccctgtgaggccccccgaagccctgtgaaccacctgctgccctgtgaggcccccaaagccctgtgaactgcctgctgtcctgtgaactgcctgctgccctgtgaggtgtgggagccctgatgctgccgtgtgatgtttcaataaaggtggatctcactgtt

SEQ ID NO: 699 - DNA, 3806 bp, Homo sapiens
tattagatatccaagggacttggaagagcagggctataaatctgaatggtatttaaagccatggagctggatgaagtctcttagagcaagtaaaaagagagaaaggaggactaaggaccaagatctagagtccctccagcatttaggcagtgatgagaaagatgcagcaaaggagcagaaggaacagctagtgaggcaggcagagactcaggcgcataaggtgtccagaaaacaaaggaaaaagatgcctggacggtggccgtttatccttcaaaactcatatcaggttgctatgtcctccaaaaagccttgcctgacccactctccaccctcccctccaggctttgccagggatgccttttgtgctcctgtagcatctgtagaacacgtcacactgtgtcttggctgtcaggttgtctgctccactgaaggggagaggaacttaactaactcctctgaagtaaatggctcttccagattgtgaagcacacaggacaggctaggcctctgcttccccgaagcttaccatcctgtaggctaaagaagaataactaggctgggcgcggtggctcacgcctgtggtcccagcactttgggaggccgaggtaagcggattatgaggtcaggagttcgagaccagcctggccaacatggtgaaaccccgtctctactaaactccaaaaattagcagggcatggtagtacgtgcctgtggtcctagctactggggaggctggggcaggaggatcacttgaacccaggaggcagagatcgtggtgagccgagattgcaccagtgcactccagcctgggcaacagagcaagactgtctcaaaaaaaaaaagaaaagaggaagaagaactaaaaaactgcagcccaaggctgctggtcagatgagtgtaccatcaaagtcaagtccatccacatgctgaaggctggatctgagcttgtaccttgaggactggaacctccacctccacagctgctggcataaacagtgggctctgtcagcccatcttttctacctgagagccaggttgttcactgggggttttatctcatatttattcagaagtaaaaacaaattttacttaaaatcatctcaaggatgacataggatggtaggataggccttaccagcatcaagtgggataggtttagcctgcttgcttagaccactctggtgctgttttcacataagtttttagctcttcttaaacgtaaaccgtaaaataatagaatcaaggtctgagctacccaacctgagtccatctaagaaagggtgatcttgcctccaaaaccattcttctaaaaagactccttagataatgacagtagaaagacaataaaggtacagtctctgagacccaaaataatcaaacctagccaacctctgaataagatccagaaggagtttgaatttggcagatttaaagagcaatacagaatttcaatcaagaccctcagttaagtacagtaaggtctatcacctgaagaatatatctctcaggttccttttgtcgttaagactttgatcctttgactttcagatgcttacagatgagaagctattgctaaccagccctctccacccaggcttggagggcttcagggttgcagggtcccagagctcccgcctccatcagaactgctcttctcagcctctttaagtatttggggagtcaggtggatggtctgtggcatcattcataaacttgtttctgaaaatgtccttgtagaaccctacttgctcataacttggagataatctttctagagctttctgttctgatggattggactattcacaatatcatctttagagtcttatataattgcaagaatacaccttagtataccacttaaaaaactgttgtgtccattactgcagaaactgcacttgaatccagcttattgtatgcatagtctacttggtattagtttgatcagctattgtacctgaacattgtagactttctttccatagcttagaagagaccattgctgaaacctgacttcctaactcccacgattacagcctctttagaaactttaccatgtttgtgataggaatagtaaaggaggcctccttgggcccacctcaaaggaggccacttttacaaggatcaggatagattaagtcactgttcacattattttttggtttgttttttgggtttttttgtttgttttttgttctttttttttttttgagatggagtttcactcttgtcgcacaggctggagtgcaatggcaccatctcagctcactgcaacctccacccaccaggttcaggccattctcctggctcagcctccgaagtggttgggattacaggtgcccgctgccacactcggctaatttttgtatttttggtagaaacagggtttcaccgtgttggccaggctggtcttgaattcctgacctcaggtgatctgccctcctcagcctcccaaagtgctggaattacaggtgtgagccacagcacccggcctacattctatcttttcctttccacctggccaccttcttcccccatcaccgtaacaacacacatctcacattgatcagttatggtgtcatcaggtgtaatgagaagaacaagatgaaattgtagccttcttccacggttctgaggcatgtgaagcataagacagcctcatcccatgggctcttggccccttccatgcaccttctaatcacctcaacaccatttcctcggtcagttttcttatttgcttcccagaaccctaagtgttctccctagtgttgtgcctcactgcataaaacctacatggcagtaagaaaaagtaaagaatgtaagacctatcacaactatatgccagtgacaaaagaaaacatagaatgtcagcacataccagggactgtggaatgtcactgagctgcagcaggtttaagtgcaggaacagccctctgagagatccacaggaagaagaatatagccagagtagatttcaggtgtctacccactgcagatctcttccccttaaggtaggtgcccacctgggctcaccccaattccctctggagatttacttttttagacttccccagctatcatcattgaaccatagggttttttaccccaattacaattctgagatgatggctaacaggaattttgtgatttcagggcaaagatggcactgcagcagtacctggcatgatgggagtgcccctgggcacctgcgagcatcccacctccttgtttaaggaagtacaggaaccagcctcatttgattccttctatttgcacaagtcaccttggactgcagggagctgttttgcaaaagcagtttagtaggcttagatctcaaattcatcttgagaacatttttttgaggtagtaatttcctcagaagactcttgtgttttgttttggtttttttctctgagctactcggactctttattagaacaatcaatcattttcctttggacctacaatttttgcctatgctgcagccactttgtgagtgagaatgaatatgtctgtgtgaacacacaggcatgcgtgtgtatgtgcacgtacatgggccagaatgaatggatgtgtgtgtgtgagggatacctcagatttttcttttcttatcttgtgtgaaaatctcttttctacagattttccagggtttaagcattgcttgctgtataaaaaactttactgaattatatacagtttgaatgaaatgttattttaaaaacaaaacaattgttaagtgttccataaaggttatgttgaattttggtcagatgaatatttgtaagtaaaaaatatatgcatttctg

SEQ ID NO: 700 - DNA, 4644 bp, Homo sapiens
aacctgtctttggaagtagtgatggccatcgaggcaggcctgggggatctgccacttttgcccttctcctcccctagttcgccatggagcagtgaccctttctccttcctgcaaagtgtgtgccataccgtggtggtgcaaggggtgtcggcgctgctcgccttcccccagagccagggcgaaatgatggagctcgacttggtcagcttagtcctgcacattccagtgatcagcatcgtgcgccacgagtttccgcgggagagtcagaatccccttcacctacaactgagtttagaaaattcattaagttctgatgctgatgtcactgtctcaatcctgaccatgaacaactggtacaattttagcttgttgctgtgccaggaagactggaacatcaccgacttcctcctccttacccagaataattccaagttccaccttggttctatcatcaacatcaccgctaacctcccctccacccaggacctcttgagcttcctacagatccagcttgagagtattaagaacagcacacccacagtggtgatgtttggctgcgacatggaaagtatccggcggattttcgaaattacaacccagtttggggtcatgccccctgaacttcgttgggtgctgggagattcccagaatatggaggaactgaggacagagggtctgcccttaggactcattgctcatggaaaaacaacacagtctgtctttgagcactacgtacaagatgctatggagctggtcgcaagagctgtagccacagccaccatgatccaaccagaacttgctctcattcccagcacgatgaactgcatggaggtggaaactacaaatctcacttcaggacaatatttatcaaggtttctagccaataccactttcagaggcctcagtggttccatcagagtaaaaggttccaccatcgtcagctcagaaaacaactttttcatctggaatcttcaacatgaccccatgggaaagccaatgtggacccgcttgggcagctggcaggggagaaagattgtcatggactatggaatatggccagagcaggcccagagacacaaaacccacttccaacatccaagtaagctacacttgagagtggttaccctgattgagcatccttttgtcttcacaagggaggtagatgatgaaggcttgtgccctgctggccaactctgtctagaccccatgactaatgactcttccacactggacagcctttttagcagcctccatagcagtaatgatacagtgcccattaaattcaagaagtgctgctatggatattgcattgatctgctggaaaagatagcagaagacatgaactttgacttcgacctctatattgtaggggatggaaagtatggagcctggaaaaatgggcactggactgggctagtgggtgatctcctgagagggactgcccacatggcagtcacttcctttagcatcaatgctgcacggagccaggtgatagatttcaccagccctttcttctccaccagcttgggcatcttagtgaggacccgagatacagcagctcccattggagccttcatgtggccactccactggacaatgtggctggggatttttgtggctctgcacatcactgccgtcttcctcactctgtatgaatggaagagtccatttggtttgactcccaaggggcgaaatagaagtaaagtcttctccttttcttcagccttgaacatctgttatgccctcttgtttggcagaacagtggccatcaaacctccaaaatgttggactggaaggtttctaatgaacctttgggccattttctgtatgttttgcctttccacatacacggcaaacttggctgctgtcatggtaggtgagaagatctatgaagagctttctggaatacatgaccccaagttacatcatccttcccaaggattccgctttggaactgtccgagaaagcagtgctgaagattatgtgagacaaagtttcccagagatgcatgaatatatgagaaggtacaatgttccagccacccctgatggagtggagtatctgaagaacaatccagagaaactagacgccttcatcatggacaaagcccttctggattatgaagtgtcaatagatgctgactgcaaacttctcactgtggggaagccatttgccatagaaggatacggcattggcctcccacccaactctccattgaccgccaacatatccgagctaatcagtcaatacaagtcacatgggtttatggatatgctccatgacaagtggtacagggtggttccctgtggcaagagaagttttgctgtcacggagactttgcaaatgggcatcaaacacttctctgggctctttgtgctgctgtgcattggatttggtctgtccattttgaccaccattggtgagcacatagtatacaggctgctgctaccacgaatcaaaaacaaatccaagctgcaatactggctccacaccagccagagattacacagagcaataaatacatcatttatagaggaaaagcagcagcatttcaagaccaaacgtgtggaaaagaggtaagaaggggccaatggcaactgtctttatatttgtaaaataatccttagagatctaactgtataattattcagatcaaatcagggcaatttatcaaaagaatcagtataaatagagggaaataaaacataaaataaaaaatgtatatggacactaaaatgcagtgtacacaatatactgtcatggttagaagtgtagtcatggactctaggatcaaccctctggatccaaatcctgtctccaagacttatgatatgtgttactttgtgtaagtcacttatttaatctctctgcacctcaagttcctcatttgtaaagtagagataaaaacagtacctatttcctagagttgttgtaaagattaaataagatcatacatgtacatctctgaatgaaaggaaatgcctaataaatattagctattattatgtacaaaatacatgtaagaattaatgaataccgcaggcaattaattccatgttttactgtctttttggcatatttccactccctactcctttctagcattcctaggaacagagtattggaaatatgaaacagacatgtcatgcctaattcatttcctggcacttttctacaaactccctagcaaagagcatcttattaataggaaataacaaacattaaatgcattaatgacatctgaaaatcgaagctcttcactctcaccacaccaggctgtggatgactgttccctatttcatggtgactaaagatgtcagaagcacttgggtctggttcctggctagtctctgctgcctgctgcctaaggcaaccctactgattcttttgtacacccagaggcctcagatgagggcacacctctcatcataacagaagaaaaagggatggaaaacaggattctttttgtttgtatcttttctgggactgctgcagtccccttctatgcagtctccatctagcttgttggaatcatttcctttatctcttgaagtatctctttccagtcaatgagcactctcccctcccctctcagtctgtggtattcctgcatcatattgcaagtctgttagtgacaagctgtatactagtccagtcacagctgttccatgacatgttacatctattttttctatttttaacataaatttttaataacagtaacacaagaagacatagcagcaaatgtatcatcttacaatgaaaaaatatttgttttccagctataatagaaacaggaagcccaatgatcccatctccaactgtgatatgattcatattcacatctttctcacataaattgaaaaccatttgtgtcttttgatgcaacttacccagttttcttggcagattcccttcctgaaccccttattttgaggatctaaggagaacaggtgttcatggtttagcttgggctcacatttcctgtgcctacctctatacaacccaacattagcaacctgtcaaacacaatgagtgtttggcgtaccatagccgtcatgtctctttggaatagtccagtggagtattgaacctcagtgttacataattgctccagggaagcctattttacccatttttagtgttaaatacagctcactcactggtcacgtaacactctaagactgacgaaggcttgaatcaaagcaaagcctaaatgttactgaggctaggagtataacaccagccttgggttattttttccaagtagacactgagtcttacactcagcatttgtcaccttgcactcataggtacccacatcaaatatcagatgcctggtgatactagcaactagaatttggcacaaagtccagcatttgtttattcttctatattatattaccagatagatatacaaagctctggagaagaccagtccagctatctttacttaccttatcactgtggctgtctagacagttgaagaaaatgtgtagatgctctactctcaggttttccctgctatgaaacattgtagggcattagaatgctctccctctcttctcttggaagtatatctatgcaaatgctcatgcatgctacaacttgacatccctcctctgtgccccatatttactgaac

SEQ ID NO: 701 - DNA, 3557 bp, Homo sapiens
gtactgtacttaggacgatggtgaacaaagaaaagctctttgcagcgtttgatgaatgggattctgcctcctataggccacactccgagtcttccatacggtacaatctccggactcggtggtgttaggaaagtggcccccggaatggcttgcattccgggtctgggatcctggggtgggcatttgtgccgtcgccttcgccgccgcgctcgccttgcaggagcgggtgcagatggagccaggctgacggttgttcaagaggaacaaatgtttgttcaattgttggatggtggagaaaagggactgtttcctattgactgctgcaggagttggaatggcattgtttattggcctgggaagccaggcaagcgtcttgtgctgcttacaacatattagcagacttccaaatgacatgctagcatatgtgttcccagcagtccccaccggctggcagggagattcctccttgctccagatcctggactcgtttaaaagatgccacctggtttgaggacttgggaaggaatggagtcagccgaccagggagttgaccacatttggccatttcccagaagggccccaccccaagggtgagtggccaatggggagctgtttctgctgacatcaattccccaggaggtactcaccccaagtctgcccaagtgaagatggctgatacccaccctgggatggagcccagcgcctgaggcccttatcatggtgatggtcctaagtgaaagcctcagcacccggggagctgactccattgcatgtgggaccttcagccgtgaactgcacacgccaaagaagatgagtcaaggacctacacttttctcttgtggaattatggaaaatgacagatggcgagacctggacaggaaatgccctcttcagattgaccaaccgagcaccagcatctgggaatgcctgcctgaaaaggacagctcactatggcaccgggaggcagtgaccgcctgcgctgtgaccagtctgatcaaagacctcagcatcagcgaccacaacgggaacccctcagcaccccctagcaagcgccagtgccgctcactgtccttctccgatgagatgtccagttgccggacatcatggaggcccttgggctccaaagtctggactcccgtggaaaagagacgctgctacagcgggggcagcgtccagcgctattccaacggcttcagcaccatgcagaggagttccagcttcagcctcccttcccgggccaacgtgctctcctcaccctgcgaccaggcaggactccaccaccgatttggagggcagccctgccaaggggtgccaggctcagccccgtgtggacaggcaggtgacacctggagccctgacctgcaccccgtgggaggaggccggctggacctgcagcggtccctctcttgctcacatgagcagttttcctttgtggaatactgtcctccctcagccaacagcacacctgcctcaacaccagagctggcgagacgctccagcggcctttcccgcagccgctcccagccgtgtgtccttaacgacaagaaggtcggtgttaaaaggcggcgccctgaagaagtgcaagagcagaggccttctctagaccttgccaagatggcacagaactgtcagaccttcagcagcctcagctgcctgagcgcagggacagaggactgcggtccccagagccccttcgcccgccacgtcagcaacaccagggcctggaccgccctgctctcagcctccggcccagggggcaggacccccgctgggaccccggtccctgagcctcttcccccttccttcgacgaccacctcgcctgccaggaggacctgtcctgtgaggagtcagacagctgcgccctggacgaggattgtggcaggagagcggagccggctgcagcctggcgggaccgcggggcccctgggaacagcctctgctccctggacggcgagttggacattgagcagatagagaagaactgagggggtgtgggcccaggcagggctggggtgtgctggcatcgacagcccccactctgggcactaggtgggcccttgaaggggagcccaactcgtgggcctgatgaaagcttcctgagtggtgtcgggtcccagagagggagcccacctgctgcctgggggagagcctggcctggccgcgtcatacagcgggtgtgtcagcctctcaccggctccccgagcgtggcagccaccaggtccacagaactactgcagcccagaggacagctttgaagtttgcgtcttttctgcctctttccctgtgggatgttgggcagtctctgttgtccccggcagagctgggcaccgctctgtatccccctggtggtgggggctgtcagggagggcctggggtgggggccaggggccatctgctatgtcagggcccttcttggcctcactcaggttcacttctggggagtcggccccgcagcttctttcactcagttttactccgtgccttctctcccaggtctccctgcttcaggcttgggaaggttcgggagatgcttccttctgtaacaccagaaccatttggccttaattccaatgtgagagacagaatccctggggtgctggactggccctccagagggtaagccatgtccggagtctcgggcccaaggaacgatttggagggtgcttgttagggcctcccgtgttgggtagaaatttggtggatctgttggctgaaaagacggacttgcttgcctctcctacagcatggagaggctgaccccatggctctgccaccgttggggcagggttagcagatggcagcccttctctgtggctgacaggtcactgagtgataagcatggttggttccggtgagtgtagggatggcacgataccagggcagcctcttgaaaacggcctcgggagacgggagctgcgagcaggtgggcagatgagggccctatgcgcactcaggggtgaagggcgtccgctggccactctgcaggggcccctgcaggattccaggcacctcccgtttgtccttgaggactgctggctgtaaccagggcacatcacccacctcaagacaagcccacgcccttgtcagcttagggggagcccagtcctgagggctgcatctctgttgtaggcccagccaccggcacaaagctggattcatgctccctgcccctaccccaccctggctcctcaccctggggcatccgaggagcctagccccctgagggtttgctctcctctcaaggtttgtagctcctctccggctgccttgcagacaccaccacatgggctccgctctatgggaatctggcttttagcgaatgtggcgtcttctgcaaacaatagcaattgggctggcttaggagcaagtggctcattttcccataaggctaaaaataactggtgcgctcccttgtgttggctgacacgcgcgttcaaagcacttttgtagtcactttgcttttgctcgtcttcatggacgagtgaacgcctcgcttctgcaggttgagtccagatgcttctcaccttctttctcctcaagaaagatgctttttggg

SEQ ID NO: 702 - DNA, 5882 bp, Homo sapiens
cagagagccaggaagagcaaccgagcaggcgagagtgtgcagaggggagcaggggctccagcccagttttcttcctgatgctgaacactcaggtcctgtccagtgctgagctcagcctcctcttcaatagaagctggggcacaggcggtcttcctggttgttggtctaggctggatggagggcccagccaaatttctctcccctactcactttgtaaaggaggagggagataccccagcgcccctgggcaggggctctgctattgttctctgtgtcttagagagctcaggcctgtgtgtgcctgtctcctcccaggagatggactcagatggccacagcatgggggagtgcatgtgcacaagcagccctgtgttgccgtggacacagccccaggcctgtgtgatgaatggttccctgccagggggaggagggaggtcttgtcagcccaggggaccacccagctactgggagccatggatcccagggaagcctggtgtctgcggtcctgcaaagccccaggactgggttaatgttggtttccacctcggttgaaaggaactggccttcagggtgttcaggtgccagcaggcctggcctgataggtgctctgcacacatgaggccctgcgggcatgtccactggacagatgaaggctctttgtctggctgaatacaaccatttctccatcagggtactactacgacctcgatgactcttacgacgagagcgatgaggaggaggtcagggcccacctccgttgcgtggccgagcagccgcccctcaaactggacacgtcctctgaggtactgggctctcctccccacggacatgctctgggctgggctctcgttcctagcgtccacaccctgcagtccaccccactgttgctaggttcctccgaagtcctggcgggttcgccccatgaagctcttctcccaccaggcgcagccagctacggcccacacttcgaggaccccaggaggggaccccgggacagtgcaagcataccactgccagtggcttcaaactcatttgttttctttcccaatctagaagctagagtttttgcaactttttggcttgaccacccaacagcagaaggaggaattggtggcccagaagcggaggaagcggcggaggatgctgcgagagagaagcccgtcgcccccaacaattcagagcaagcggcagacgccttcaccgagactggcgctgtctacccgctatcagccctgatgagatgaacaacagtcccaacttcgaagaaaagaagaagttcctgaccatcttcaacctgacccacatcagcgctgagaagaggaaagaaccagccacgcagcaagcctctctggatgtggagaagccggttggtgttgctgcttccttgtctgacatcccaaaggccgcggagcctgggaagctggaacaggtccggccccaggagctgtcgagagtccaggagctagctcctgccagcggggagaaggccaggctgagcgaggcccctggaggcaaaaagagtctgagcatgcttcactatatccggggcgctgcacccaaggacattcctgtgccgctgtcccacagcaccaatgggaagagcaagccgtgggagccctttgtggcagaagagtttgcacatcagttccacgagtcagtgctgcagtccacccagaaggccctgcagaagcataaagggagcgtggctgtgctgtctgcagagcagaaccacaaggttgacacgtccgtccactacaatattcctgagctgcagtcctccagccgcgcccctccaccccagcacaatgggcagcaggagccccccactgcaaggaagggccccccaacccaggagttggaccgggactcggaggaggaggaagaggaggatgatgaagatggagaagatgaggaggaagtccccaagcgcaagtggcaagggatcgaggccgtttttgaagcttaccaggaacacatagaagagcaaaatctggagcggcaggtgttacagacacaatgtagacgactggaggcccggcactacagcctcagcctgacggcagagcagctctcccacagcgtggcggagttgaggagccagaaacagaagatggtctcagaacgggagcggctccaggcagaactggaccacttacgaaagtgccttgccttgcctgcaatgcactggcctaggggctacctgaagggatatcccaggtgacggtttcccttgcactaggccgaacctatagtatagaaatattatctattttattaccttggatatttaatatttttcactgggaggtttgaagcttacaaaatgagaatgtgccatgcatgaagcaaaggattccaggctccagaaaaaatgaatgaactcaccttgacgtcaatgcaattgaatcaccgttgtcattcagcgagcaaccaatgtaggattgcccacagtttttctttttaaaggtggttttcgcccttcctctcccacattaatctgaacatgaaggctccattagcaacactaaaacttgatcattaacagccccctgtgcatatgagtggatcaaaccggttctgttctttcttgtgttgccatgttactatgcctcaagcccagtttgcttttgccacagcgatggggccagtctcattcctccccaggagtgaaacttgcttcagctgaaaaggttgggtgcatcgtcagtaaaaagggcttatttgtttcattttactttcctgcaaaattttcttcaaagcaacaagtcctaggagcacacaaagcaacccaaaggcttttccctggaaaagctctttcttacctaaagataaaaccaattcacaaactgaaggtagctttttattactccgtggggagcatgtacagagctctgtgtatacacagcttcacacccaccagattgttactacagtgggttgggttttcatacagacgtaaattttgagagaaaagtcaaaggtgcttcagccttgtactgtgtatatatattaaaaaaaaaacaaagttttgtatgtttttattactttaactattgttataaaaagcctgccatttttaatatgtggtttgggggatttttgtttgtttttcctgtttgggggttttgtttgttgttttggttttttttgggcaaaaaaaaaaaaaaaccttgcttttagtgtttgtactgctgctggtcaggacattaaaatattgaagtgtttttaaaaattaaagaagaagaaaagtaaaagagcttaccactggcgcctatgcgatcacttcatttttagtttgagttgcaccagaagctgccgtagaaagccatgcgctactgcttacctcctccactccccctgcctgcccccagcatctggacaagctaatagcaaatattacccattgctatcaagggaggagggggtagtctgtagaacccatgtgtgacagtcatgtgcacacatgggcgggggcttttaaaaacctttcaggaagtcaatgatttctgtgattgatataattctaaggtgtctgagagcaggtacagaataggaacttcagaggctttgtttaaacgcaaagctttgtaaaagccacaaggtctgagctgaacccctcctttttgaacttactgtgacaagcacaggaacggtcagaaactgggctcatcacaccaaggcaaagcaacgggcgagtcttcctccttgtcctagttactgcctatggaggcagtgtttagatcaagaaggcctctcttgctcccaagggccctcaccagaggccagggctgccagtcactggtctggggggtggaggcctgagctgagggcagggtgcctgacctgtgtgccggctgctcactgctgtgaccagcagccgagcccttggccctagcccttgctgcgcagaacagcttgctggcagctggcatcgtgtcgctttatctgcccccgcacagtttgctttgtacgtctgccaagaatcttccagttattagcaaactcagacgaatgtaccgccagtattatcagcagtcaacaagcaccttcctctccacagaagcagctggaagagaactcgaggggctgtgctgcaggcctcccctcgaaagacactgggaggtcagcatgttccacaggtgttcagagggagtctgctacaaactatcagggcaaaatctcactggatttctccactgaaaacctacttgaggtttctggtctgaaggcttaagagtcacatcttagcacttccgctctcaggcctcctcctccatcacagatgtctggatgcttttggaaatggccttggctaaagtaaaagggaaaagtagatccgataacttaaaaacgtagctcatcccttaccatccaaggggcactcccttggttggattttctatgacagcacaggggacaggtggcacaccatgagaggtctgcccagggtgggagcagtgtcactgtgctagcaatagttggcttctcccctgtcagtggaaaccccacttctgcccggcccttgagcttcttgcccactgtctccccatccttccacctacttgtggcgatctgagtactctactcttgctcaagaagtaatacgacaatcagaatacaaaccagtaaggcaacacgaataaactaagaaaaaggtaagaactgtctcaaaaacgaaagcacaccacccaagacacagtacccagtcatggtttccccatccaactattagattcatactttgaaaacttactttcagattattctcaaagaacacagtagcacctaaatctgttttcaattgggcttaaaaattgacatgcaatctcttaagtaagttttttgttcagctacttcacactgagtacctcaaatctgctctggagtcgattatgccacctgtgtgtcaggatgcacatgaaagccctcggctcggtccttagaccatcttcctacattacctggaagggagctgccatctgtccctctgcagagggataccttccaatagtaaattatctggttcctcactgaaacaagttatttttgcttcatatagtcagagtcagactgacatgataaaatatcatgttcctaatctgttgtctcagataagtgaccaagacgggactttccacattttagtctacattctaatcttaaaggaataaagcactgaattgggactaacattctgataggttgcacccttaagagtattcagagagcatcaaaaggagcccacaccttcagcagtgaaggattctaacacagggaatctgcagtttgtagcagaatggtattttcctcaagtagctcataatactgccaaatctcaaaagttaagctgaatttcacaccagatcctacccctttccctgagccacgtgtttcacacaagtgtagaaaatgccagggatccaccacaagatggagatggtcagcacaaaccgattctgttcctctttaaagtgtatattagccacttagcaatctctatattctttcaagtaaccaagctgttgactttcttactacttgcagtagcctgtccccaacttttccatccagtgcttaacctaaaaaactccttaactctgccttgacctgaggaagaccatgctaactggtgttattttgtatgtaccctgtgcttaattctataacagtaaaccccatacacaggtgggagggaggaacaccggtgcctcggtcactctgggggcagtttagatgctgtgaaattaaacctgttctaagtgtacttgtttgaattaattgtattgtaatattatttgttgaatgtagtaattaggtatttatgaatatattgctgtaatttctgacaacatccaaaaaataaaatcttcctaaattatgtt

SEQ ID NO: 703 - DNA, 4599 bp, Homo sapiens
gttttcttctagtatgtttataacatactacctcttacatttaggtctttgattcgttttgcattaatttttgtatatggtatattagtccattttcactactgataaagacatacctaagactgggcaatttacagaagaggtttaattgtagttacaactccacatggcaggggaagcctcacaatcatggcagaaggcaaggaggagcaagtcacgtcttacatgaatggcagcaggcaaaagagagaaactgtgcagggaaactcccatttttaaaaccatcagatctcatgagacccattcactaccacaagaacggcacaggaaagacctgcccccatgattcagtcatctaccactgggtccttcccacaacacatgggaattatgggagctaccagatgagatttgggtggggacaaagagtcaaaccatatcagtgtgaggtcagggtccaaggtcatccttttgcatgttgttctccagttgtcccaggaccatttgttgaaaagaactttcctctatttgctgcattctttctttctttgctgcctagagcctttccctgcccttcgcccttctgttactcgtattttaagtcaagtctcagctcagcggttaccccttctaagaggctatccctgatcgtccctctgtgtgtgtgagagagccccctcatgccttaatcctgatgtttatcattgtaggatttcagctgttcatcttccccacttgttttccaggccaggtcttgggagacaggggctgtgtgcttaacatcttacattacttaatatgcacttacatatattcaacttcagggggaaggggagatagtacttgaatcacagtgtaatcttccattacctgtgaactctagattgtacagaaaatccggttataacttgtaattctttgagtacatcagtaatgcaccttaggtttaatgtgaggaacaggactgatagttctcttcaacctaaacatccactggtagacagggaaaagcccagcacccgctccctgccccttctccctgaaccatggaatgtaagtcctttcattaggctactgggccaatttttagacctaagctcatggctggaccaatagtagccttcatagatgccaatgcccttccttgatgggcttcagtgaggactcctgaccaatcactgacgaggggggttgggaggacttctgatgggggagttggcctccctggtcctacacctacctgcctggagaaggagccaaagccacttaagcaaaactgagcagcagcccacagtgtccatctaccatgtcaccccagtgctgagcgatttctaaaaggttacttttttcaattatttaaaaaaaacaccaaaaattcaagtaatacggaaataagtaaaggagaaagtcccctgtaatttttcatagagaaagaggaaggaatggggggcagctgtgtaagtcaaacatgtttgtaaaactccgtgagtttgaaactagtaaaatagaaagtgaaagcctgctataattatggtggaattgagggtgtcttattgtgttactagagaattttttttaagtaggtttttaacattttgaccttgttaaaatgctccacttttcaaaacggtcctgacaggatatcctgcttccttccacgcagaagaggtggtttgtgcagaagtgcaggcctcagaatgctttgcacatgagaggaatggcaagagttgcctatcactgaggatttggggaggagggatcacaggatatgggactgaaaatgagacagggccagatagcaaaaggccttgaatgctacactaagcacgaagcagctccttaatttgtgcatcactgaagcaagaatagagtggaggacatggcccgtgtggtcctcgtgttctgagtggctatgacatggagttctgtgtgagctctccatgaagaaaatcccgtctccaggcagtcagtggagatttgatccttaccacaagagcacgtggacaaatttgaattatcgtggatgtatatgggcagaagaaggtctcagagccataagggtggggccctgttagctctgttggttccactcagcagcccacagtgtgagtgggaccctgccagccctgctagacttgagcattgtctggtgacgctggtccccgccttcattactgcagcagaggaagtgtggctgtggcagttgtgggttttgtattttctatttaaatatgtcccttaatgtgccagttgttaaaaagactaccagtgggctctgaagggatgcctggacactttgaaagtgtggttcagatgtgaaattgcactcaaaagatgttttaagagagacgagggcacgttgatgtcagtttcggtttgggctgtgtagtagcagcattttgaacttggccctctctcctttctgagagctaaagaccttatctccctgcggatggcattgcgtgcagttaattatggccagatggactcagccgcttcttcatcgtcttctctcggactctgcagacctacaccgtgcctttaaaggaagcagggccctccctgctgaagcattcagtgagcccaggcaccagcatcttcaaaccgagtcttttctctccttagtgctgctccccgctttccaggccttcctgggatatcttagagagagctcagaaatatgctcagcaagtcttgcagaaggaatgtcgtcccaagtttgccaagacatcaatggcgctgttatttgagcacaggtatagcgtggacttactccctttcgtgcagaaggcccccaaagacagtgaagctgagtccaagtacgatcctccttttgggttccggaagttctccagtaaagtccagaccctcttggaactcttgccagagcacgacctccctgaacacttgaaagccaagacctgtcggcgctgtgtggttattggaagcggaggaatactgcacggattagaactgggccacaccctgaaccagttcgatgttgtgataaggttaaacagtgcaccagttgagggatattcagaacatgttggaaataaaactactataaggatgacttatccagagggcgcaccactgtctgaccttgaatattattccaatgacttatttgttgctgttttatttaagagtgttgatttcaactggcttcaagcaatggtaaaaaaggaaaccctgccattctgggtacgactcttcttttggaagcaggtggcagaaaaaatcccactgcagccaaaacatttcaggattttgaatccagttatcatcaaagagactgcctttgacatccttcagtactcagagcctcagtcaaggttctggggccgagataagaacgtccccacaatcggtgtcattgccgttgtcttagccacacatctgtgcgatgaagtcagtttggcgggttttggatatgacctcaatcaacccagaacacctttgcactacttcgacagtcaatgcatggctgctatgaactttcagaccatgcataatgtgacaacggaaaccaagttcctcttaaagctggtcaaagagggagtggtgaaagatctcagtggaggcattgatcgtgaattttgaacacagaaaacctcagttgaaaatgcaactctaactctgagagctgtttttgacagccttcttgatgtatttctccatcctgcagatactttgaagtgcagctcatgtttttaacttttaatttaaaaacacaaaaaaaattttagctcttcccactttttttttcctatttatttgaggtcagtgtttgtttttgcacaccattttgtaaatgaaacttaagaattgaattggaaagacttctcaaagagaattgtatgtaacgatgctgtattgatttttaagaaagtaatttaatttgtaaaacttctgctcgtttacactgcacattgaatacaggtaactaattggaaggagaggggaggtcactcttttgatggtggccctgaacctcattctggttccctgctgcgctgcttggtgtgacccacggaggatccactcccaggatgacgtgctccgtagctctgctgctgatactgggtctgcgatgcagcggcgtgaggcctgggctggttggagaaggtcacaacccttctctgttggtctgccttctgctgaaagactcgagaaccaaccagggaagctgtcctggaggtccctggtcggagagggacatagaatctgtgacctctgacaactgtgaagccaccctgggctacagaaaccacagtcttcccagcaattattacaattcttgaattccttggggattttttactgccctttcaaagcacttaagtgttagatctaacgtgttccagtgtctgtctgaggtgacttaaaaaatcagaacaaaacttctattatccagagtcatgggagagtacaccctttccaggaataatgttttgggaaacactgaaatgaaatcttcccagtattataaattgtgtatttaaaaaaaagaaacttttctgaatgcctacctggcggtgtataccaggcagtgtgccagtttaaaaagatgaaaaagaataaaaacttttgagg

SEQ ID NO: 704 - DNA, 3932 bp, Homo sapiens
ctttctgctttttttctcgctcactcacccgctggagtgcagtagtgcagcctccacctcccgggctccagtgatcctcctgccttagcctctcaaagtgctgggaccacaggtgcgaggcaccatgcccggcctgttcttttctctctgcccttttttgtattttttcctttctcctttccttcttccctaatgtctgtctctctccttcccttcttaacttcccttctctctccagccctctcctaccctccttttctcttttcccctatctccagccctctcctaccctccttccctccctctttctctctccccctccgcaccgctccatctccctctcggtccagtccgctgtctgtgccccctctctgttccgttttctctcccacccttcttccctctcccatttcttctcttttcccctcttcctgttctctttttctcgctgtcctctctgtggccaccctcctttttctcacttctgctctccctgtccggctcttctctctcctctctcccttctagcagattctctggctgtttcctctcctctccctctgtgctcctccctcctcctctctcctcccagccactatcctctctcttcaccctcttctctttctgtctcatggtctcctcctagctcttttccttcccagttcctagctctctcctttctctttcctcttctctggctggagctccccgctcctccatccctccctctcccggggccccctctcccccaccctcttctcccccaacaccctctcccccacccacttctccctaggacgctccctccttcacccgtttctctgcttccctcttctccgagctcaccagccatggcacccaccctctccctctcttccttcctgtcccaggccctgggtagtgaaaggagaaggtagtcgaggcagtcaagggtgaccccacacgcaggaggcacgccacaccagatcacgccacacgcaggctgctcccaactggcagggcctgacccagccaggaagggccaggtcctaagattccacagtgccaggagtgcccgaaggggccaggtcccaggattcccacagccccaggtatgcctggaagacccgggtcccaggattcccacagccccagctatgcttgggggggccgggtcccaggattcccacagccccaggtgtgcctggaagacccgggtcccaggattcccacagccccaagagttcccggaagagctgggtcccaggattcccacagccccagctatgcttgggggggccgggtcccaggattcccacagccccaggtgtgcctggaagacccaggtcccaggattcccacagccctggatgtgcctggaggggctgtgccacctctgcagagatggaagggctggtgttgaagcctgaggatttcgccctcaggtccaggtcagaacatcccagcaccactttcaggccacgtctgccctgcagttttgaccactgaattggtcttaagagtggccacccattcccctccaagtgagggggcaagacacaagtaggggacgggtcactttctgtcaccctgaaaatacgctgggcacgacacaagtaggggatgggtcactttctgtcaccctgaaaatacgctgggcacgacacaaggggggctgatgaagtcaggcccgcccctccaagtccacctcgaaatcaccgtctggcttccccgcacttcccaccacctgacaccgccaagccccttgcttcagattttctgtggtctgtattcatacccttgcttcagattttctgtagtctatattcatgcctgcttaggcccctacaaaagtcctcataaaaccagcaccacctttatctgcctccaaaacacacactgctttcccatcaggaagatcagcaatgtggtttccggcctggttcttagtcaaaaagttagtgtctggtggtttctggcctttttgcaggacggggcgcagggaacggctgcacggccaggcagcctccgctgtccacctccagccccggttttgcagccgtgtgtgatatcaagggatagagttagggtttctgtgggttttgtttttgctgaggaaaggatgtgcaggtcgatagctattgtttcctttccattcctgtgattctctttacatctgtatatatctatcacaccatgctgactttgtgatgagtcctgttcctcagaaacatcaagctgggttccttttcaaagaaacacacagatcatatttctccatctcattttgttttcacagggagcttttcttatcaacaaagtcgcatgcttttttttttggatataatgtttatcacgtctggagagccataaacagtaaatacagaggatatcaatgcccagaatagttagagtattttgatgaaatcctatttttagataataaatttcaagatgtgtctatagtgtattgtttaaaacaactgaagacatttgagacgtacataaagtagacatttttaatttagggaaacttatatgcccttttttaagaagccattctaataaaataatctgactaattggcccaaaatacaataagtatcactttctaacagagaccaaagggaagctgagaggctttccttttatgtactaccgttggatcgctgcagccgcctctcataacacccaacagaacccggtgaggctctgtgggcttcccgcggccctcagggaggctgcagagtcccctagtccatgtcagggagccgccatcccacatacctccaaagcctgtcctcgcctgcagtttttgcagagctcgcggttggaggtggaaatttagaagccctgtgttgcaggagaggcagtagcacccccaggcagctcttagcagggacagaccacccgccgcctcgctggtattttagggtcttttggtattttgccactgtgtggggctaggcgggtggctggaggacacggtgtaggccttgccgctgtctgggttcctcgccactgcaggagcaggactgtttctggaaacactgggctgctggtgacccgtcaaacttctcccacaaattctgaatccgagaaagtgaaggaaggatggtggggaagtgaggaggcaggagcagaggccacagggaccgaccagagatgcggtggagacagaggagcttccttctcaggctgtttctgggaagcctgagaggcggccagcaccaccctccgctcactctcccctcagcctcttcgcttcccttctcaaccctttctctcctcctcgcctcttccctttcttgctgtcttgttagtccctgtcccaaaactcctggctcctttgttctgctgccgtggcccccacccaggaggaggtctcaggcaccattccccccacgagggatccacacaacaggttcatgctggggctgggggagccccgctgggttcctgatgccttgtgcacagggagttgctgcagtcatttttggactctcctgaatgtgtccacatgttctgacctcccaccagaaggaacgctggtggccacatctctagagatctatttacttttttgagaccggcttatgagattggctaatttttgtatttttggtagagatggggtctcaccatgttgcccaggctagtctcgaactcctggcctcaagtgatctgcccaccccggcctcccagagtgctgggattacaggcatgagccaccgcgctggcctctagagattaacaccaaacaatatcactcctgcgggaaccgcagacagatcaaaccctggtgagaggaacactttatttcccaactcatcatcctaagccaaggttggagggatgagcattccctaaacaccaaggcgagatcacctggtcccagtgcctcttttcacacaggccctagatttctatctctctgcagtttatgcatcggt

SEQ ID NO: 705 - DNA, 4395 bp, Homo sapiens
aatgcccagtacaaggttgacaccgcgggccccaggttgccattctctatattttccttcctttgtcctatttggtttctgaagttaaatggtctcttttttgatatgaaaattaatttctggacaaaaagaaatatgcctgcacaggggccaaatttgtgttgtctcccagcacggctgtaattacactgtagatcaaactgacgccttagttttcagtggcttttttccctctccgatgtccctgaagttgccaggctcaccaagagcagcagttttcattagcagcaaagccaggggatggggatggatggccggggccagccctcactcctgggtttctctcctcaaattcttcttttggatggacatgtgcaatccaggccaatgcagagaactgcaggactcagggtcctgagttgcttgccacagtgtgggggtgaatggcggtggctctggggtacccctcatcctatgggtttcaccctgtggaacaggcactaccaggcttctcttttaagtgtcagacacaagaagggtctcacacatttcccatggtctctacacatttcccattacctttgtgcccagcagaaatctgtgttcacctgctaaaaatggtcactgtgaattagtatcaagctaagaacttgtgaaatagggcagaaccaatgcaaaattttccggagtcatgaaagtgaagtggcttttacactgcattcaatattgtgagttctagaggaattttcagggaaactgtggctcccttcttatcctaactttcatagtcaattctcgattgcccatacatagctccactattgtttgttgggtataattagacactatgttctgtggccctcaggtggacatctatgctttgccaataagccatgaattactccccagagaagcttatgtgattttgacatctacaaggtgaatgcaaactatttattcacaatgtgatgggcattccttcaatttccctataatatgttgaatgtaaatgatttgtacgtggagagaggagtgcttggtcagacttcatatgtcagaaagtcaacctgggtggtgtgaacaactcccgtcaaatgagtcaaagccccagaatgagattctatggtctcttggattgaacttggggccaagggatgtgggctttgatccctgcagctttgtcactggccctgagtggccattcatctaatttttccatctgccaagtgaagcaacaatccctcccactgccaagcttacagtcacattataaagatgattgagattccatgcctcagtggacttcaggaggaaaagtgttaccctctaaatccttcctcacactcccacacccacaagttttctttttttttttttaaagagtccagtgttaatagtgttttgactgctttcaagatatcaaaacagcttttgttggaatgaaataaacaaaagaagatgggttttggaacagagcattttaaggttcaaatttcaactttatcacgtatgagtattataagtcagttactcacactcttggaactttattttcctcatctgaaaagtgaggacaataatggctcccttgaaaggccgcagggataatgagctgccattattgcatcagtgcaattccagcatagtgagaaaggtttgtgtctcttagctgctttctgaccggatggcaagcctctcctcaccccacactggccgccgttggcatacctatgtgcatgctctgtcctccgcggttcctgtggagaactctaaaagtcagggaagctcagtgccacgttttggaacttgtcagccatagagcaacctacctatttacttccagtggatgaatgggaaggtattgctgtatcacataaggactctcctagggagggcagtgttagcagcatgaaaagagggacattccagtgtcacacaaagtcccagatgggaaacggcagttgccaaaggcagcctgaagtgctgcgttctcttcgctcttcaaatgcagacaggtctatagcagcagcttgaagatgaagaccctggaaaaccatgagcaagggggcctcaaaatgacagggaaacaccaacaatgaggagggagctaaacgcacagtctcttacacccaggagtgtgattatctgacattttggtttaatgaaaaaatcaatagttttggagccaagcgtgggtttgaagcttcgctctgacactttactgcgcagattgctgagtaagttactttggtcaccgactctcagttttcttatttacaatactgggataatgcctcactcgcagggctgatgaatgagatcacagtggtgtggtggaaagcatgggctacgttgtaagagtgtattcaattcccagcctcactggttacacttctgggtctttaggagagctgccggcatccatgtgcctcgatttccacattgtaaaataagggtaataactgttgcctgtctcaaggggtgttgtgagggttatgtatggagcacataaggagtctaaggtgcacaaaatgaatactcacaatgaacgctcaacaaatagttccatttttaaattaataaatggctgttagtaatattattattttattagttttagcttattatccacaaaatagttcttacctactaattggacaagggtaggacactaattaaacgatgtgtgtcatttttgatggctcacactaaaatccatagaaaagtgtttattttcttcaattttttttcttgactctggggtttctgtccttctaatccatgagtctctctctgtctctgtctggggtttctgtccttctaatccatgagtctctctctgtctctgtctgtctccttctttcctctccatgcagtaaaacagagctgcaggcagtcaatttcgagtcagtgggctgtgaaaagcagttagaataatagtttattgaccctgaatgtggcagctggaactgagggtcggctgggctcaggcacagtgtaatggtcacaatagaagtttgatcatctttgatcatttccttggactttaagagagaaggtgttgccaggcatggtggctcgcgcctgtggtcccagcactttgggaggccgaggcgtacagatcacaggtcaggagtttcagactggcccgaccaacatggtaaaaccccgtctctgctaaaactggaaaaattgaccgggcatggtggcaggtgcctgtggtcccagctacttgggaggctgaggcaggagagttgtttggacccgggaggcggaggctgcagtgagaagagattgcaccactgcactccagcctgggcaacagagcaagaccccgttgagagagagagagagagagagagagagagagagagagagagagatgttttttggagcctgggagcacctccaaatagcccaagtccaggggcggtagcctacccagaaggggctgggtttggttggaaggagataagtggaggagggcaggatgagggcctgagttctgtaccacttgtgggagtggagccttcatcactgggggtctgagtgcctgagcacgagggatgctgatccccatttcaaatgtgtcccaagcatagacatgcgctctgttttctcagattacctttggaagctggacttttctcctaagcactgcagtgatatgccttcttattcactctggtgatcatggattttccggtagaaatgtaattataaataaaaagtacatcttcaaactactttaatacttccatattagaagcaatttgtttgtaagtggaattattaataaaaacatagttgaaagcagagactaaggaaattcaaagagaaagaggagaacatgaatatataaataaaggatggcctatatttttacataatttgtgaattaaaaaatagaaatgtattgtcatagactgtataaactcatgcttccttcgatagctcagctggtagagcagaggactgtcgaagacacggaatcaacctaaacgtccatcagtggtagattggataaagaaaatgtggtacatacgcaccatagaatactatgtagccataataaggactgagatcatgtcctttgccggaccatcaatggagctggaggccattatccttagcaagctaacacaggaacagaaaaccaaataccgcatgttttcacgtatgagtaggagctaaatgatgagaacacagagacacagaagagaacaacacacactggggcctattggagggtggaggctgggaggtgggtgaggaccaggaaaaataactaatggataccaggcttaatacctgggtgttgaagtaatctgtacaaccaatccccatgacacaagtttacctatgtaacagagctgtgcatgcacccctgaactt

SEQ ID NO: 706 - DNA, 4876 bp, Homo sapiens
ttgtacagtaaatgtaattcagctgtggtccccacgttttgctgtgtctggtggggtgggtccggcagtggcggtgccccgtgccaggggccagtgctgcttcatacccggcaaactgacctctggcctttgttttgcctgctgttccctgcgctgaccgggctgacctgccgcggttggctgggttcgcctcaaagtgagggctggagctgggctggagcagctgggcctggtcacggccattctcctcttcccggtggatggaatcccagctgggctgtgctgagccctcgctcacagtccccggcagcagatggcctggggcggactgtccccaacagcagcaggactccagagggccaggtcctccagtcagtcggcccgctcagcagagccgcctgcacgctggccaatctggtgtctgctatgcccggcccaggggggtgtggacgccccggaggtcacagctgagctggaacggggcactccagttggtacagggaccagaccacagcctctggctcaggtgcctccctgtgctgtttcgtgggcatgtccgggccttaagcccctccctggcagctccagcccagccgcctgctgctgggtctggcctagctacccccacccccacgctatcagggcccacccccagtctcattgtagagcagggactggcgcctggagccgtctccgggtctcattctgaccagaccaggctcctgttaccctgcctcctgggtcagaggtcagacacagggtcagggggacactcccatccggtctcaagagaaccactccctgaggccccagacatctggagccacagagggtttggaagggtagattccaggcagccttttgtcctgctgcaccaggcaggccagccccctgccctccccaacgaagaggagccagcctggggatgtgtgccccgccgacggggggctggggcagggcaaggctctggtgccctgggacactcgctcttttcagctgcagacgcccttgcacttggccttccctcgggcggtgccatcccacgcggagccacgtccagggctacacggtgcgtgggccgaggctccggcatcagcgtttcgggctgttcttatgcttgtggtggccacaggcctcttcctgctgcacctgccccgccttggggacaggcctgacccccaagcccgctgcctggtttcagggatggggtctctgggaatgcagtcctgccgggttgggccccactccaacaggggcagcagagcagaggaggccggctgtgctgggcgtcctgcagacccctgtgcccctgaaacagccatggaggggggaaggaacctcggagcggagtgaagccctcggccgcacgtgaccgttgccagcctggacctggcccgggggacccaggctgtggtcagccacgctctgcggggagggcccgtgcctgccacccccatggcataggagcctggggtccagagggcgccggggacaaaagctgggatctgctggccctgcccccaccctactgagggtcgtcaaggagattgatctcagcccaggggtggacgaaggggttcaggttacagggtcccctcccctccccctctccagccagagccagcccttccccgccccggtgaccctcatggccagtggctctgtgctcatgggcctctggcccctccccaacctcctcccctctgccctgtgctgaccagggcctgggagcccccgcacggttcagacagaggggccaggctgaagctggagaggaaccagcgtcacacagacggcctctgagaacttggagaccccgttacccacccagcaggggtgtcaggacaagcatctgctgcaggcttcagcctcaggggcaaaagggagccccggggtcctggtgggggcaccgaccacaggcccggagggtggatgcctgcaggaagctgggctctgtggagcccgaggaggggctggtggccacaccccccggccccctggctcggcggccctcatgcccgccctacgtccactcctgccgctcctgctcctcctccggctgacctcgggggctggcttgttgccagggctggggagccacccgggcgtgtgccccaaccagctcagccccaacctgtgggtggacgcccagagcacctgtgagcgcgagtgtagcagggaccaggtgagtgtggtcgggccggggtcctggggctcagagcagccagcctgggcaagaccctgctggaggtgccaccttctgcctgggctccccagacttctggggggtctgggtctgggccccttaaggggcccagagacacccccatcgttgccctcatttgtcttaagaataagagccctccccactccagctttcatgctccccatgtgcctccaccctgggcaccatcatcctcggcgaccacccccaccccgtcactgcctctcctcccaccctctcctcccaccctctcctcccatccacttctcccaccccttcactgcctctccttccatcctctcctcccaccctctcctcccatccactcctcccatccacttcttccatcctcttctcccaccccgtaactgcctctccttccatcctctcctatccactcctcccatccacttcttccatcctcttctcccaccccatcactgcctctccttccatcctctcctatccactcctcccatccactttttccatcctcttctctcaccccgtcattgcctctccttccatcctctcctcccatccacttctcccaccccttcactgcctctcctcccaccctctcctcccatccactcctcccatccactcctcccatccacttcttccatcctcttctcccaccccgtcactgcctctccttccatcctctcctcccaccctctccttccatcctctcctcccaccctctccttccatccactgtcctccctgtcctcccaccctccttccatccgggaccagtgcagatggtggtgggggtgctgcagccgatgtccagcctttgtcctggcccgcaccacctgctgggtggtcctgagcactgtacgccctccttgggcctcagtttcctcgtctgtacaacgtaaagaataacggaacttgcttgtgggtgtgaggattctggaaggtaagccaggtggcacctctggcgaggtggctcctcacactggatggaaaggacactgagtccccggggaggcagccacagagcgggaggctccctgctaccccacctgggcctccccttgcaggggccaggccagagccccggggcggggggcattggggctcccacctaagtgtcccccatccccaggactgtgcggctgctgagaagtgctgcatcaacgtgtgtggactgcacagctgcgtggcagcacgcttccccggcagcccagctgcgccgacgacagcggcctcctgcgagggctttgtgtgcccacagcagggctcggactgcgacatctgggacgggcagcccgtgtgccgctgccgcgaccgctgtgagaaggagcccagcttcacctgcgcctcggacggcctcacctactacaaccgctgctatatggacgccgaggcctgcctgcggggcctgcacctccacatcgtgccctgcaagcacgtgctcagctggccgcccagcagcccggggccgccggagaccactgcccgccccacacctggggccgcgcccgtgcctcctgccctgtacagcagcccctccccacaggcggtgcaggttgggggtacggccagcctccactgcgacgtcagcggccgcccgccgcctgctgtgacctgggagaagcagagtcaccagcgagagaacctgatcatgcgccctgatcagatgtatggcaacgtggtggtcaccagcatcgggcagctggtgctctccaacgcgcggcccgaagacgccggcctgtacacctgcaccgcgcgcaacgctgctgggctgctgcgggctgacttcccactctctgtggtccagcgagagccggccagggacgcagcccccagcatcccagccccggccgagtgcctgccggatgtgcaggcctgcacgggccccacttccccacaccttgtcctctggcactacgacccgcagcggggcggctgcatgaccttcccggcccgtggctgtgatggggcggcccgcggctttgagacctacgaggcatgccagcaggcctgtgcccgcggccccggcgacgcctgcgtgctgcctgccgtgcagggcccctgccggggctgggagccgcgctgggcctacagcccgctgctgcagcagtgccatcccttcgtgtacggtggctgcgagggcaacggcaacaacttccacagccgcgagagctgcgaggatgcctgccccgtgccgcgcacaccgccctgccgcgcctgccgcctccggagcaagctggcgctgagcctgtgccgcagcgacttcgccatcgtggggcggctcacggaggtgctggaggagcccgaggccgccggcggcatcgcccgcgtggcgctcgaggacgtgctcaaggatgacaagatgggcctcaagttcttgggcaccaagtacctggaggtgacgctgagtggcatggactgggcctgcccctgccccaacatgacggcgggcgacgggccgctggtcatcatgggtgaggtgcgcgatggcgtggccgtgctggacgccggcagctacgtccgcgccgccagcgagaagcgcgtcaagaagatcttggagctgctggagaagcaggcctgcgagctgctcaaccgcttccaggactagcccccgcaggggcctgcgccaccacgtcctggtgaataaacgcactccctgtgcctcag

SEQ ID NO: 707 - DNA, 4587 bp, Homo sapiens
gcactcagattctccccaaacgccaaggatgggggtcatggctccccgaaccctcctcctgctgctcttgggggccctggccctgaccgagacctgggccgcgactccgtgagtccgaggatggagcggcgggcgccgtgggtggagcaggaggggctggagtattgggaccaggagacacggaacgccaagggccacgcgcagatttaccgagtgaacctgcggaccctgctccgctattacaaccagagcgaggccggtatgaacagttcgcctacgatggcaaggattacatcgccctgaacgaggacctgcactcctggaccgccgcgaacacagcggctcagatctcccagcacaagtgggaagcggacaaatactcagagcaggtcagggcctacctgagggcaagtgcatggagtggctccgcagacacctggagaacgggaaggagacgctgcagcacgcggatcccccaaaggcacatgtgacccagcaccccatctctgaccatgaggccaccctgaggtgctgggccctgggcctctaccctgcggagatcacactgacctggcagcaggatggggaggaccagacccaggacacggagcttgtggagaccaggcctgcaggggacggaaccttccagaagtgggtggctgtagtggtgccttccggagaggagcagagatacatgtgccatgtgcagcatgaggggctgccagagcccctcaccctgagatgggagccgtcttctcagcccaccatccccatcgtgggcatcgttgctggcctgtttctccttggagctgtggtcactggagctgtggttgctgctgcgatgtggaggaagaaaagctcaggcagcaattgtgctcagtactctgatgcatctcatgatacttgtaaagaggactatgcctgttcctgttctggtgtctgcgttctgatctctttctcccctgggtgtccctcatctctgacagcagcaggagtcatttttcctgtcattaaccccacaaggtggaaggcagcccctgcacacagaagtctgtggtattaagagatgaattttcaagcccgtgcagcttttaccctatttccagggctctttcttgggttgtattttctatcttttccccaacctttttaaaggaactagattctgaaattagcagagaagagggatgccacaagttctcatcttaggtaactttctagtggaactcctcttctgctcagctctcctacccactctcccttccctgagttgtagtaatcctagcactggctctaatgcaaactcatggatctataaagcaaagtctaacttagatttatatttgtttggaaattgggattcatagtcaaagattgttctttcctaagagggaaatataattgcatgctgcagtgtgcagagggttggtgtgaaggagggatgcagggaggaagggagggaggacacacaagcagcactgctgggaaaagcacaggcggcctggatgtcagtgtgaggggaccttatgctgtcgttgctgcaaaaccgcatttggcctgaggctatgttaataaagatactgcctttagaataggaggtgctctacagtgatgattcattcagccgacatttgctgtctgccagacatatgacagaatgtttttgcatctggggaaagtcattgaagtaaaatcagaaaaatctctagccttgtggagcatgtgttccagtgggaagaggcagacggtacatacactctaatatatgcagagtaaatgaggaaagtgttagaaggtgataagtgctgtggaacaggtgatcagagtatgggttgtgggacagagaaggtagctattgtgccggggttgtcagcgtgggccttgttgggaaggtgacctttgatgaaatatttgaaggacataaaggaatttgtcatgagggtatctggaagaagttttttctagggagtaggaaccttcagtgtcagtgtaccagggcaggatcatgtctgtgtgttctgggaagaacacgggatcgggtatggctagagcagagagtcactgagataaggtcaggggtttggtcagatcatgtgggcatagggctcaagtatgtgggaaggattttgattttgaatgagatagttttaagcagaataaagacatgccacaacttctcttttaaaaggatcactgtagctgctctgctgagaacagaatccaaaggccggcgatgagcaaggcaggtgggagaactgtaggaaatgagtgcagtatttcaggctggagatgtcggttacttcaactggggtgtgagcagtggaaatagtgggacgtgattggattcctactatttccaatcactttataccgcattttctaatggactaaatctggggtatgagaaagaagagtaaaggataccaaaaatgtcagactgtgactaaaaagagttgccatcagctgagaatgagaagactagcaggagcatatgagaggaggggacgtcgcaggcagtcactatgggagacgtgggatctgagatgccgctgagaaataccagtgaggtagtcgggttggcagttggacagatgaatctggagacatttaggagaaatagacttgggaggtgatgtcatataacagttatttaaagccttgagtctgaatgacgtctccaagggagtgattggctgtagaagagaacaggaacaaggactgaacactaggcctctgttgctaaaggatctgatcagacaacacacctagatcagactgcacagtcctgaccccacatctagaaggtacatagaccagggagttctagactttcctgtggacaggaatcacctggacatcaccttaagtctaagctgatctggaatcgagaatgagatttcctacttatataatgttgctgttggcgctgatgctgctggtcttcagatcccacttttggtagcaagaacacagaccaggattcctaggctatgcatcagcctcgcctgtgaggcttgttaataagcaattcctgcactccatgcgcaacattctgacacaggggcatctgtggagaggcctgagtattctacaacaagcccacagcaaacctggtgctcagccagatttgatatcactgagatcagtagttggagaatgcccaggatggggaggggtctcagacccacatttaagtgttgctttattctgggttttttatttatttatttatttatttttaaggaggatgtgtttctttaattataagacaggatgctgagagataaatgtcattttctctatcatggggtatagccagatggaagattgagaagtggctcacagctcagcagaatgaaaaaatatctgaatgctgctttctgaaactactctccagaatgatttcacactcactccttggagcaaacaatgacttgcaaatttttctaatttaaacataaaggagtgtacatattggtattagtattcattttattttggggaagggcactgtattagtccatagtccgttttcacactgccgataaagacatacccaacattgggaagaaaaagaggtttaattggacttacagttccatttggctggggaggcctcagaatcatggtgggaggcgaaaggcacttcttacatggtggtggcaagagaaaatgaggaagaagcaaatgccaaaacccctgataaacacattggatctcaggagacttattcattatcatgagaatagcatgggaaagactggcccccatgattcaattacctccccctgggtccctcccacaacatgtgggaattctgggagatacaattcaagttgagatttgggtggggacacagccaaaccacattggacacagaaccaggtttgaagctacacagccaggaacataatccacagccaccctaattcagatctctcataggaaccactgtccctgctcctgagcacagatgctactgcatatacctctgataccctgatggccgacactgggccctgtggcaaagactgctatcactgctgctcctgagaactgctccactactgctcctcagccatctttaccaaaatgcagtatttactgtcccagcctctctgtgtcatctcatcctgattagaagcccacatgtggttatctaaattgtgcagccaaagcctcttgcagtgtttaactgcaataatgttggggaaagtgaatttttctcctttgtagaaggaggtagtccctgccttctaataagactcttcaacataggaagagaattcagttgctggaggtagaggggtgagggatggaaaaagaatgacaaatttcaattcctagaatcatgttctgagactagaactttatctagtacattgcaggcacctgggtttggttgagtgtataataaatgacatagttcaacttattcccttgacagtttgttttggggtccagcttttgtctaccccagttttcacacacagatacgtggagaagcattgtgtgatggtaaaatgtttacttgaaagcctttttccctatctttgtctcttgctaggattaaaaacccgtatctgt

SEQ ID NO: 708 - DNA, 3812 bp, Homo sapiens
caaacccacaattccgtcattggcgtgcccatccgggagactcccatcctggatgactatgactgtgaggaggatgaggagccacctaggcgggccaaccatgtctcccgcgaggacgagtttggcagccaggtgacccacactctggacagtctgggacatccaggggaagagaaggtggactttgagaagaaagcagcagctgaggcgactcaggagacagtggagtccctgatgcagaagttcaaggagagtttccgcgctaacacgcccatcgagatcggtcagctgcaaccacccctgcgcagcacatcggcagggaagaggaagcggaggagcaagtctcgaggaggaatcagctttgggagagccaaggggacgtcgggctcagaggcagacgatgaaactcagctgacattctacacggagcagtaccgcagtcgccgccgcagcaaaggtttgctgaaaagcccagtgaacaagacagccctgacactgattgctgtgagttcctgcatcctggccatggtgtgtggcagccagatgtcttgtccactcactgtgaaggtgactctgcatgtgcccgagcacttcatagcagatggaagcagcttcgtggtgagtgaagggagctacctggacatctccgactggttaaacccagccaagctttccctgtattaccagatcaatgccacctccccatgggtgagggacctctgtggacaaaggacgacagatgcctgtgagcagctctgcgacccagaaaccggagagtgcagctgtcatgaaggctatgcccctgaccctgttcacagacacctgtgtgtgcgcagtgactggggacagagtgaaggaccttggccctacacgacacttgagaggggctatgatctggtgacaggggagcaagcccctgaaaagattctcagcttgggccaaggcctctggcttcctgtcagcaaaagctttgtggttccgcctgtggagctgtccatcaaccccctggccagctgcaagaccgatgtgctcgtcacggaagaccctgcagatgtcagggaagaagcgatgctgtccacatactttgaaaccatcaatgacctgctgtcttccttcgggccagttcgtgactgctctcggaacaatgggggctgcactcgcaacttcaagtgtgtgtctgaccggcaggtggattcctcgggatgtgtgtgccctgaggagctgaaacccatgaaggatggctctggctgctacgaccactccaaaggcattgactgctctgatggctttaatggcggctgtgagcagctgtgcctgcagcagacgctgcccctgccctacgatgccacttcgagcaccatcttcatgttctgcggttgcgtggaggagtacaaactggctcctgatggaaaatcctgcttaatgctctcagatgtctgcgagggccccaagtgcctcaaacctgactccaaattcaatgataccctctttggagagatgctacatggttacaacaaccggacccagcatgtgaaccaaggccaagtcttccagatgacctttagggagaacaacttcatcaaggactttccccagctggccgatgggctgttggtgatcccgctgccggtggaggagcagtgccggggggtcctctccgagccccttccggacctccaactgctcactggagatatcaggtatgatgaggccatgggttaccccatggtgcagcagtggcgggtccggagcaacctctaccgtgtgaagctcagcaccatcaccctcacagcaggcttcactaatgttctcaagatcctgaccaaggagagcagtcgggaggagctgctgtccttcatccagcactatggctcccactacatcgcagaggccctctatggctcagagctcacctgcatcatccactttcccagcaagaaggtccagcagcagctgtggctccagtatcagaaagagaccacagagctgggcagcaagaaggagctcaagtccatgcccttcatcacctacctctcaggtttgctgacagcccagatgctgtcagatgaccagctcatttcaggtgtggagattcgctgtgaggagaaggggcgctgtccatctacctgtcacctttgccgccggccaggcaaggagcagctgagccccacaccagtgctgctggaaatcaaccgtgtggtgccactttataccctcatccaagacaatggcacaaaggaggccttcaagagtgcactgatgagttcctactggtgctcagggaaaggggatgtgatcgatgactggtgcaggtgtgacctcagcgcctttgatgccaatgggctccccaactgcagcccccttctgcagccggtgctgcggctgtccccaacagtggagccctccagtactgtggtctccttggagtgggtggatgttcagccagctattgggaccaaggtctccgactatattctgcagcataagaaagtggatgaatacacagacactgacctgtacacaggagaattcctgagttttgctgatgacttactctctggcctgggcacatcttgtgtagcagctggtcgaagccatggagaggtccctgaagtcagtatctactcagtcatcttcaagtgtctggagcccgacggtctctacaagttcactctgtatgctgtggatacacgagggaggcactcagagctaagcacggtgaccctgaggacggcctgtccactggtagatgacaacaaggcagaagaaatagctgacaagatctacaatctgtacaatgggtacacaagtggaaaggagcagcagatggcctacaacacactgatggaggtctcagcctcgatgctgttccgagtccagcaccactacaactctcactatgaaaagtttggcgacttcgtctggagaagtgaggatgagctggggcccaggaaggcccacctgattctacggcgactggagagggtgagtagccactgctccagcctcctgcggagtgcctacatccagagccgcgtggaaacagtgccctatcttttctgccgcagcgaggaggtccggcctgcaggcatggtgtggtatagcatcctcaaggacaccaaaatcacgtgtgaggagaagatggtgtcaatggcccgaaacacgtacggggagtccaagggccggtgagggagggtattgccctccgtgagcacagagactctccatgggagggggagcagtattctcctggatcctggggcctgggtgggctgggggacagctgaggatgggcctagcagatgaagcttgccagcaaggccaaagcaaacggtttctcctgtggatagtggacagagacctttgtaaccaatggaattattcatttttctctatcttttattttttcaaagatattatttgactctatcaaaagtctctcctttttaaaccttttcttatggatggctgtcaatcccaaggcagaagttttcaggtggagaccaagcggcctttgctcttcttccttcttcctgccacactctgctttcttcctgccatggacccctggaggagacctatggagggacagttttgacctgacccctagaggagacagttttgacctcttcagcaccaggaaggaagctctgaggatggttgcagtgaggaagcatgggtctttaaggacttctctctcttttttgctggacattattgagtttgtgggaccctgcctcttcctgctacctgtgggtctgcccagagtccctgcaggcctgtccatgcattaaaaattcctattgtctctc

SEQ ID NO: 709 - DNA, 4346 bp, Homo sapiens
tgtatttttagtagagacgggatttcaccatgttggccaggctggtcttgaactcctgaccttgtcatccacccgcctcggcctcccaaagtgctgggattacaggcgtgagccactgcgcccggcctgaacggaactttttaatcttaagagcctagagtccgtttaacactgtcacctggacagttctttgcggtgaatagaagtggagcatccaggcctccccgtgccgtgggaagcacgccgccagctccgcacagtcaagtgatgtttgtgtaaccaccgactatacccctaggatccccaaggaaggagccacccctcggccagtcaccatgtctgcggtgctcctctcacgcccttgtccccttgggctcgggcatcacccctgctctcccctcagacctgggagtcacccctgcactccccgcaggcccaggagtcacccctgcgctccccacagctccgacgtcacccctgcattccccgcaggcctgggtgtcacccctgcactccccacaggcccaggcgtcacccctgcgctccccacggccccaacgtcacccctgcgctccccgcggcccgggtgtcacccctgttgttcccgcaggccccggtgtcacccctgcatttcccatgttcccgatatcacccctgtgttccctgcagtccccagtgtcacccctgcgctccccacggctccgatgtcacccctgcattccccgtgggcctgggcatcacccctgctctccccgcaggcccaggcgtcacccctgcgctccccgtgggcctaggcatcacccctgctctccccgcaggccctgggctgcatcttgtacctgctgtgcttccggcagcacccttttgaggatggagcgaaacttcgaatagtcaatgggaagtactcgatccccccgcacgacacgcagtacacggtcttccacagcctcatccgcgccatgctgcaggtgaacccggaggagcggctgtccatcgccgaggtggtgcaccagctgcaggagatcgcggccgcccgcaacgtgaaccccaagtctcccatcacagagctcctggagcagaatggaggctacgggagcgccacactgtcccgagggccaccccctcccgtgggccccgctggcagtggctacagtggaggcctggcgctggcggagtacgaccagccgtatggcggcttcctggacattctgcggggtgggacagagcggctcttcaccaacctcaaggacacctcctccaaggtcatccagtccgtcgctaagtgagtgtgaggctccagagccctggacctgccgcacgctcgttccaggctgcagccccggcccttgcttcctggctgcggtggaacagctggtcatcaggccccacaggggcccctgaggcagtgggacagcatcacccgcttctcccagggagtcggaatgagcccagcatcccacagagccaggcagatccctttcctttcatcgcctggggggcaaggccctgctgaggagatgcctgggccctcccctcccttgctgcaatgtcgcccctcactctggggcgttcctggcttgttcccgggactctgtaaattgggtgaaacctcggtggtggcgcctcactgagccagtccttgagttaaagccctagttactcagacttagaccaggtgagtcccagcctgtggtgggagaaagtctccctctgggtgggctgtccaagggcgcgtctgtgcgggggtggccccgacatcggcccacaggcccggcagcctctgctcacggaacactgggaatgttccagagtgcggcccctctgcgttgcggggtccatgcgctggctcttctgaggagctgaacgcccaggagcacgctggctgctcatctggccctgcggtcgcaccagctcaagggcgtcggctatgtcaggaaacagcctaggagctgggctggactggtgcccgtgatgcaggaactgcggcccctggtgggcccacgttccttccacagctggcgacaccttcgggctttttcttatgttttttgttctgtgctgtgatcactgttttgtgtccccagcaccaggtagacgtgtgtgcacttgtgcctgcatgtaccgcagcgtctgcacatgtgagcgtgggtgcatgtgtctttgagcatgtgtgcatgtgagggaatgggtgtgttaacatacatatgtgaacatgtgtgcatgtgtgtgtaaatgctggtgtgagtatgtgcataggcgtgtgtgattgctggtatgagcatgtgtgctggtgcttgtgagtccttgtgcttgtgaatccttgtgtgagctgagtgctcgtattgtgtgcaggcacgtgtatgagcacatgtgcatgttggagcatgtatgcgtgtgtgcatgtgtatgcatgtgtaggagtgcttgtgagtgcgcgtgagctgtgtgcatgtgtacacgtgtgcgagtgcctgtgagtgcacgtgaactgcatgcatgtgtacgcatgcgcgcgagtgcctgtatgagccgcgtgcatgtgtacgcatgagtaggagtgcctgtgagtgtgcgtgagctgcgtgcatgtgtacacacgcatgcaagtgtgtgtgagccacatgcatgtgtacgcatgcacacaagtgcctgtgtgcgtgagctgcgtgcatgtgtatgcatgtgtgcgagtgcctgtgagtgcatgtgagccgcatgcatgtgtgcacatgcgcgcgagtgcctgtgcctgagctgtgtgcacatgtatgcatgcgtaggagtgcctgtgagtgagcatgagccgcgtgcatgtgtacacgtgtgagtgcgcgtgagccgcgtgcatgtgtacacgtgagtgcgcgtgagccgcgtgcatgtgtacacgtgagtgcgcgtgagccgcgtgcatgtgtacgcgtgagtgcgcgagccgcgtgcatgtgtacgcgtgtgtgcgcgtgagccgcgtgcatgtgtgcgcatgtgtgtgagccgcgtgcatgtgtaagcgtgtgtaggagtgctgtgcgagcgcctgtgtgtgtgagctgtgtgcctgtgagtgcgtgtgggccgcgtgcatgtgtaggagtgctgtgtgagtgcctgtgtgtgtgagctgtgtgcctctgtgtgtgctgcatgtttggctgtgtggttccattacctgtgtgccttgtccttgtgcaaccttttggaaagaaacctgctcttagtgggcctgcatatccccagagcaggacgtgagcccactcgcacctctgggcacctcctctgtgacgcctcctgcctgagttgtggctgacagaagatcagaggcagctctgtctgtctggtgccagcgcaccacccactgggcccagggctgtggctcctgcagggtcctgacaggtgacactgcgtgtggagcgtcagcagggctagccatggacccagggggatgagagactctccagcgtcatcttggtgagagtgatgttgggatcagagtggaaacaagacagagaggatgcggcagcaaagccataagtgaaagtcactaggaacggtcactttcggcatcagtgaaaatggtctccatggccgcagcacattgtggggacaggcagagtggagtcagcagagggaggaggcatgtggggcgttcagggagccgggcacagctccagagtcctccctgggggactccaggccacgctccctccccagcagctgtggggatggtgggagctgctgtctgctggaagcctaaggccgcaggggctggttctagaaatggctctgctgggacccatgggttccaggccctaggaggacacagtttggcttgagcaggcgctgcttgcatggcactcaggcacagctagctgctgcttgttaggggatggtgggaaccctcctgacacccccaggttccagctgagggcagccctgctgtttgttttgctctgccttctgttcacatcacgtgcttgaggcagatgaagctgcataacctcgtgtttctaaagttgacttagaagcaacagtgagttctggttgggcctggaggctcaaaagatggctgggcacggtggctcgtgtaatcccagcacttcggggggccgaggagggaggatcacttgaagattgagacgagcctggacaacacaacaacacagcaagaccctgtctctacaaaaataaaaaattagctgggcgaggtggcgtgcacctgtggtcccagctacactggggcctgaggtgggaggatcgcttgagcccaggaggttgaggctgcagtgagttgtgattgtgccactgcactctggcctggagtgagcaagaccctgcctcaattt

SEQ ID NO: 710 - DNA, 5328 bp, Homo sapiens
gtgggtttcatagctgtgtgttttcatttggctcctcttccttggggattgccttgtctcctagcaagattcagggtgctggggactgtggctgtatttcttcagcagttcagagtctttggtttattggtcatcatcacccacttgtggaaaagacacattcatgtgtccagcacatgtcttgtctatccccggctccatcttatgcctgcgggaggggagattctagtccccacaccgtgttgtgagggtttgggaaggacctgaagccagcaggcagccttcattgtgagagctatgctctgatcccaaagctgacttttccatgccaggtttccccattgccctaggatctggtgtccctggtggaacttcgtcccgtgtctatgtgctctggaggcttaggtgtaggatccctggatgactggtggggaaaggctgggggaccctgttgtccagccttcttctttcacagaggtggaaaccagggcccagagccattaaatactgccttccgggcatttcagagcccgctgcttctatttttctattctcagtctgtcagagagaccagtaagtaccagaattttgacttcccagagcctaggagagtgtatggcatatgacaggtgtttattaatgtgtgttcgtgggaagaacaaattgtgtcgctttcattgtctttcaatacaatgaagatcagttcctctcctgggccccacttcatagaaatatgcattcctgacttcacaaatggaactgcccaagaatccccactcatgttttctccccggagcttcccctgcacccacattctctgcattggttaggaatatcctcataggcgcaacactcctgaatagcagaccttacacttgtaccccgacaggcctccttgttccctgaagctaaccctgggcctggctttggggtttgcagccggatttgtcatcttctgtctgccagtttcactgacttggttattccaaggaattcctgggacttccctttgttaaaaaataaacgttaggaatgagaagaggaactagctactgcctgtgtcttcactctgagtgactgagggaacttcattaaatctcagattcccctaacgatcctgagaatgaaggtgaacccacagtcctgtagaacattctctctgactgttgagcactccgctttgtaccaggtgttctcatcaagtgtgcaagccccttttatgctcatacgaccctcccaacagccctaggatgtggagctgctattgtccgcatttgcagatgaggagactcaggctcagggaggttgagtccccagggaggctcaggccactggagatgcctgtggacaagggtgcctgtttgtatttggcctggacctgctcccagcatgctggggtttaaacctgggcagttgggagccattaaaaaatgaaaaggggtcaggtgtggtggctcatgcctgtgatcccagcactttgggaggccaagggggggagatcacttgaggccaggagttcgagaccagtctggccaacatgatgaaaccctgtctctaataaaaatacaaaaatgagccggccgtggtggtacgtgcctgtaatcccagctacttcagaggctgaggcaggagaattgcttgaacctggaagtggaggttgtgctgagctgagattgcaccactgcactccagtctgggcgacagagtgagactccgtctcaaaaatgaaaataaataaaaataaaaatgaaaaggatgggctgggtgtggtgactcacccctgtaatcccagcactttgggaggctggtctcgaactcctgacctcaggtgatctgcctgcctcggcctccaaagtgctgggatgacgggcgtgagccaccgcacctggcctgaaccattttaaagtgtacaattcagtggctttcagaacattcacagtgttgtgcaagccctacctctgtctggttccaaaactttttcatcaccccaaaaggagatggtggctctttcaagacgccagctttggcatcaactggaccttctggttgtctgacttcggacaagcattgtaatttccagcctttgcttcctcacctttaaaatggaaataatgttgatcaccttacgggcctttttaaaaagaacttgattgaggtatgatgtatgtacctcaaaatcaagtcatcctaagtgtactttttcagtactttttcgtgaatttgtggagttgtgcacccattaccacaatcccaattttagaacgtctctatcatttcctgttcccatctccagctctgtgtaaccacgagtctgctttctgtctgtatgggtttgccttttttagacatttataccaatggcagctgacagtacatggtcttcatgcctggcttctttcactcagcatcctgtttccgaggttcatccatgtagttgcgtgtggcagcgcttcattcctctctgtggctgaggaatattccattgtgtggacggaccgtgttttgataatccactcctctgttgatggacataggggttgcttccaccttccatgattcatatttactactgtgtgtcattctcagtactgtggcactgtgctggtacacataagtgcttaataattgtggttagccgggcgtggtggctcacgcctgtagtgccaacaccttgggaggccaagctgggcggatcacttaaggccaggagtttgagaccagcctggccaacgtggcgaaaccctgcttctactaaaaatacaaaaaatagctgggtgtggtggcggacgcctgtagttcgagctacttgggaggctgagacatgagaatggcttgaaccctgggggcagaggttgctgtgagccaagattgcgccactgcactccagcctgggcaacaggcttttctctcaagaaaaagaaaaatggtggtcattgtttatgttatttccttatgggctttttttttaatgtggatgattttcttacctttagacgtgttatttgtggttttgatagcttttttttgtcatgctgtccgtcatcgttctgaaattttgtttgttaaagtcttatgatccacatatggcagtaactgtgtatcatcatggcttaagggtgtctgataagccaggtcacctggttccctcattcatgccacaagcgtttactgagtgcatcatgggtgcctgcgggttctatgggtgaaacctgtgtactgcaagaggaaagactgactgcatccattttgctgagccctgtagccccacagcctggcgtggtatttgttgaaagaaggcagagcctctacccccgtgtaactcagtgcgggtggagagcccatggcagacccaggactggaggctcctgcgtcattaggaacattggtggctgaagcttgcttgtcccagctggcgagagccaattacgcctgtctccttccacctccacgtatggtgacatcactttgatagcttgacgtcagccactgggggactatttacatcatggatatgggcaaaagacaccaatctgagcttttgtccttttcttttttttggagtgcctgcacacccgtgagcctttccaacctcgtaacctattattttcctgacgagatagttttttacagatgagaaagtcgaggcacagagaattgaagggacttggccaaggtaacagcccaaattcaagccccagcttcctcgggccatccccacggacatgggaagacgcagcatcagatctgccccactccctcctcccagtcaggttttttctgccagatgactctgctgttcaatttccattgactctgctgctgaatttccattgactgactctgctgctgaatttccatttccatctctcatcagggttttcagtgctttgcttcccagtgtgttgcctgagccaccctcacatcctgtgccttccttcttaataggaacgctgtgttttcctttgttcttgcagaatttcgctaaggagtttgtgatcagtgatcggaaggagctggaggaagatttcatcaagagcgagctgaagaaggcggggggagccaattacgacgcccagacggagtaaccccagcccccgccacaccaccccttgccaaagtcatctgcctgctccccgggggagaggaccgccggcctcagctactagcccaccagcccaccagggagaagagaagccatgagaggcagcgcccgccaccctgtgtccacagcccccaccttcccgcttcccttagaaccctgccgtgtcctatctcatgacgctcatggaacctctttctttgatcttctttttcttttctccccctcttttttgttctaaagaaaagtcattttgatgcaaggtcctgcctgccatcagatccgaggtgcctcctgcagtgaccccttttcctggcatttctcttccacgcgacgaggtctgcctagtgagatctgcatgacctcacgttgctttccagagcccgggcctattttgccatctcagttttcctgggccctgcttcctgtgtaccactgaggggcagctgggccaggagctgtgcccagtgcctgcagccttcataagcacacacgtccattccctactaaggcccagacctcctggtatctgccccgggctccctcatcccacctccatccggagttgcccaagatgcatgtccagcataggcaggattgctcggtggtgagaaggttaggtccggctcagactgaataagaagagataaaatttgccttaaaacttacctggcagtggctttgctgcacggtctgaaaccacctgttcccaccctcttgaccgaaatttccttgtgacacagagaagggcaaaggtctgagcccagagttgacggagggagtatttcagggttcacttcaggggctcccaaagcgacaagatcgttagggagagaggcccagggtggggaccgggaatttaaggagagctgggaacggatcccttaggttcaggaagcttctgtgcaagctgcgaggatggcttgggccgaagggttgctctgcccgccgcgctagctgtgagctgagcaaagccctgggctcacagcaccccaaaagcctgtggcttcagtcctgcgtctgcaccacacattcaaaaggatcgttttgttttgtttttaaagaaaggtgagattggcttggttcttcatgagcacatttgatatagctctttttctgtttttccttgctcatttcgttttggggaagaaatctgtactgtattgggattgtaaagaacatctctgcactcagacagtttacagaaataaatgttttttttgtttttc

SEQ ID NO: 711 - DNA, 4995 bp, Homo sapiens
ttgatggagtgtcacacaggtggaggtttgcacagcactactgctatgttagaacatacaactgggcatccactaattccatacgtgcattttcatctcctacagggtgtgtggctggaaatgcagctccatggcttaagcccttgctttaggtgtctggccaagtagatcatggccaagcagaggggagttcactgttttctggggccaggcaagaaccgacactggcagagccaaagagagtcggcatgtccaagagtattgggcaaggggctgccaaagaggcagggtgaaatctgctggagagtcactggcctccctattccacaagtaagcgtggcaggggtcagtagaggagagagaagagagagagagcagattgcaggagaggcctcaggcagcctgaagaggaaaagtgcctcccctccctggccctgctctggtctgggtgtcccctcaggccccaggcccttcacagggaaccccagataagcaatttgccttccttgggtgaggcaagagtttgccctttcggggaagcaggttgatgatactaggggcctgggggtcaagggcttggctcctttggtcaactcattgcccctgaggtccactctggggtcactagactttctttccctggaggaaaccccatgaagggcccggagcaggcttgtatgtccacctgattgtcaaagctgccctggcatggcaggctgtctgtctgtcggcccctgtcacctgtcctctaagcctctccaccttctgccacaggtgccctgaactctacctgcctcctcccttcctgccactgggcctctggcccaagttgtttcctctgctaggaaggccccctgatctcagctctttttcagggctctaggctgtcctttttgagtgtccctgggtgctccagtgtgacctgacgcacagtggactcccctgtccctatccccggccagctgcgtagcccctctcaggggccatgcccagctaacttggaagtggggctttctgggtgttttcttgacctcatccctggctgacagccccaagggtaagacccagcacagagggttgcacgctgccaggggctggtgaaacacacgccacccacggcctgcctcatcactgcctacattctcaggccctgcgcagctcctggtgtgcactgctacctctggctgggcctgtgggccctcctgggtcctggtccctaggagacattcccttctggcccagttggcagattcagcctgaggtacgcttgggattagctctagacaacccttctgagggcttagaggagccagggtggccctgcctgccggggggcttgtcttgggtcctaatctctacgagggctcagcctcctcatctgtgaaatgggtatgttcaagcctcaatgctttggggaccatttgacccacgagaaacaactttaaattccctccaatccattgtgtcagtgccctccgtccgctctactgtccgcccccaggggagaagttaggcagtgggcatttgaacaccaatgggaacagtgcccggagttctaaccaaaagctgccccataagtgtgggatgatttggggaccgtcttggggaaccaccaccatgtcttggaaaccagtgtgtacgaggacagctcaggatattatagctggttgggccttatagtcccctcccattatagggggtaaattgaggcctagagagggaaggggttgtgccccagacccgcaaagaagatcagggcagtgcagtggccttccagcggcctgagggtcccagatgagctggaacacacttccttatgaggctgttcagtggcttgatgtctatccttcaaggttgacctcagagtctacttcctccttcgctgacacccgctccagtcccccttcctgaagcccacagcagctgttgagcctctggggctgctttctgtatagttgtctgatttgagatggggtcccaggtctcggtggaatcgggagctctgcacgtggtgattgtgggtgggggctttggcgggatcgcagcagccagccagctgcaggccctgaacgtccccttcatgctggtggacatgaaggactccttccaccacaatgtggctgctctccgagcctccgtggagacagggttcgccaaaaagacattcatttcttactcggtgactttcaaggacaacttccggcaggggctagtagtggggatagacctgaagaaccagatggtgctgctgcagggtggcgaggccctgcccttctctcatcttatcctggccacgggcagcactgggcccttcccgggcaagtttaatgaggtttccagccagcaggccgctatccaggcctatgaggacatggtgaggcaggtccagcgctcacggttcatcgtggtggtgggaggaggctcggctggagtggagatggcagcagagattaaaacagaatatcctgagaaagaggtcactctcattcactcccaagtggccctggctgacaaggagctcctgccctccgtccggcaggaagtgaaggagatcctcctccggaagggcgtgcagctgctgctgagtgagcgggtgagcaatctggaggagctgcctctcaatgagtatcgagagtacatcaaagtgcagacggacaaaggcacagaggtggccaccaacctggtgattctctgcaccggcatcaagatcaacagctccgcctaccgcaaagcatttgagagcagactagccagcagtggtgctctgagagtgaacgagcacctccaggtggagggccacagcaacgtctacgccattggtgactgtgccgacgtgaggacgcccaagatggcctatcttgccggcctccacgccaacatcgccgtggccaacatcgtcaactctgtgaagcagcggcctctccaggcctacaagccgggtgcactgacgttcctcctgtccatggggagaaatgacggtgtgggccaaatcagtggcttctatgtgggccggctcatggttcggctgaccaagagccgggacctgttcgtctctacgagctggaaaaccatgaggcagtctccaccttgatggagaggccaggcgggagaactaccgcagcaggtgggcgtacggactgcttggcgcatggcacccgcctggcaagtgctagaactaatgctattcttctggaataagatgccaatgatgtggtggctagaaatgcaacttgtataaaacaaaaatgggagagagagaggtattaaacaaataccccccttagaggatactttctgggtttggaaggtgtgcttgctgtggtactgggtgagcggctcatgtgtgctggctgcatggtgctggggaggccacagccagcccttcctctgcacctgcctcctctgggatgtgcatgtgtgtgtacgtgcttgtggtcatgacgcgtgccatttagagctctcagagcagggcagattgctgggctctggtggccagtgtctgtctgtgagggcaggaaggagagctgcacattgagaacaaaggagggacctgaggtggagagaggcccagcaccccaaatctctgccatcacacggtcggggagcccatacattctgcaacaaccagggacttcacaggagccttgttttcaatttgctaacaggtgcataatccctgtgctccttaagcctcatggccttcctacatttccactttatttgtttgtttgtttatttatttttgagacagtctcgccctgtcacccaggctggagtgcagtggcacgatctcagctcactgcaacctacgccttctgggttcacgtgattctcttgccttagcctcccaagtagctgggactacaggcacgtgccaccatgcctggctaatttttgtattttttaaatagagacggggtttcactgtgttggccaggctggtctcgaacacctgacctcaggtgatccattcgtcttggcctctcgaagtgctgggattccaggcgtgagccactgcggccagcacatttccacttttagatcctactccataccacaggtttcatttaagaagaaagagctagataaatgtgctcttctggttaccccaccctgacagagtgcatttttacacggctagcaggggttgagactgcagcctggcctgccagccattggaggtgtttaaggaagggcagataatgtgactctttgcggggtgccatctgcttacccattagcgagcagagggggtttctgcgggtgacccccagcatatttctaggttacttatgggcagatttgtaagtgacaaaactccagctgatgctgggaatggggagagggcccttgagggactttgtggttttgtgcttctggtttcctggccaaccccagggtcacttgtctggaggcccagctgggcactaatgtctgccaccgactatgttacagtgtataaatgattcctctatttgggagagatcttccaatccagaggagcccctcttggactgcctgggttaaatctgcatagcagaagtggttgatgagttcatctgaagaaattcaggccccacctccccaccctgcccctccctgctcccttttgatggtggcctctgggtactcgggcagagtccttgggacaccagcctctctggggttctcaggccatcccgttggggctgtcgcccaggcctaagtgagtcgtgtgcctctattggaggatggctgttcccctggtggttgcatccaagtatctgtctttctttatggaccacgaagggaagcccaccttcctggaggcaggaccttcggcctaagaaacacaggccctggtgctatctgacctggggtccagcgaggtgggaatcccagtgtgtgagcgacaggccttcttctattgacttacaatattctagaaggacctacgtgtggggacacagttttccaaactgaggaaaatgttgcaataaaagaatatgttgtaag

SEQ ID NO: 712 - DNA, 3963 bp, Homo sapiens
actctgcagcagcccccataccagcaacccctgcggtcgggctcagggccccacgactgcagacacagtcctcacgggtgctgccccgatggccacacggcatctctcgggcctcagtggcaaggctgccctggggccccctgtcagcagagcaggtacgggtgctgccctgacagggtatctgtcgctgaggggccccatcacgctggctgcacaaagtcgtatggtggtgacagcaccgggggcaggcccaggtcaagggcagtggcttctacagtccacaacacccaccagccccaggcccagcagaatgagcccagtgagtgccggggctcccagtttggctgttgctatgacaacgtggccactgcagccggtcctcttggggaaggctgtgtgggccagcccagccatgcctaccccgtgcggtgcctgctgcccagtgcccatggctcttgcgcagactgggctgcccgctggtacttcgttgcctctgtgggccaatgtaaccgcttctggtatggcggctgccatggcaatgccaataactttgcctcggagcaagagtgcatgagcagctgccagggatctctccatgggccccgtcgtccccagcctggggcttctggaaggagcacccacacggatggtggcggcagcagtcctgcaggcgagcaggaacccagccagcacaggacaggggccgcggtgcagagaaagccctggccttctggtggtctctggcggcaagaccaacagcctgggccaggggaggccccccacacccaggcctttggagaatggccatgggggcaggagcttgggtccagggcccctggactgggtggagatgccggatcaccagcgccacccttccacagctcctcctacaggattagcttggcaggtgtggagccctcgttggtgcaggcagccctggggcagttggtgcggctctcctgctcagacgacactgccccggaatcccaggctgcctggcagaaagatggccagcccatctcctctgacaggcacaggctgcagttcgacggatccctgatcatccaccccctgcaggcagaggacgcgggcacctacagctgtggcagcacccggccaggccgcgactcccagaagatccaacttcgcatcatagggggtgacatggccgtgctgtctgaggctgagctgagccgcttccctcagcccagggacccagctcaggactttggccaagcgggggctgctgggcccctgggggccatcccctcttcacacccacagcctgcaaacaggctgcgtttggaccagaaccagccccgggtggtggatgccagtccaggccagcggatccggatgacctgccgtgccgaaggcttcccgcccccagccatcgagtggcagagagatgggcagcctgtctcttctcccagacaccagctgcagcctgatggctccctggtcattagccgagtggctgtagaagatggcggcttctacacctgtgtcgctttcaatgggcaggaccgagaccagcgatgggtccagctcagagttctgggggagctgacaatctcaggactgccccctactgtgacagtgccagagggtgatacggccaggctattgtgtgtggtagcaggagaaagtgtgaacatcaggtggtccaggaacgggctacctgtgcaggctgatggccaccgtgtccaccagtccccagatggcacgctgctcatttacaacttgcgggccagggatgagggctcctacacgtgcagtgcctaccaggggagccaggcagtcagccgcagcaccgaggtgaaggtggtctcaccagcacccaccgcccagcccagggaccctggcagggactgcgtcgaccagccagagctggccaactgtgatttgatcctgcaggcccagctttgtggcaatgagtattactccagcttctgctgtgccagctgttcacgtttccagcctcacgctcagcccatctggcagtagggatgaaggctagttccagccccagtccaaaatagttcatagggctagggagaaaggaagatggactcttggcttcctctctctggctggcaaagggagttatcttctggaatacattagctctttcaaaaacccacccagtgtttagcctcaacggcagccagttaccagcttctctctgtagccttcagcagtgtttgcatctctgacataaccacaggctgctgttttcaagaagagcaatctgtttggataagaaaaacctttactttacagcttccctttataatttgttacacaggaatagttaaatgcatttgtttgtttgttttttgagacagagtttcactcttgttgcccaggctggagggcaatggcgcgatctcagctcactgcaacctccgtctcctgggttcttgattctcctgtgtcagccttctgagtagctaggattacagatgcctatcaccatgcctgggtaatttttgtatttttagttgagatggggtttcaccatgttggccaggctggtctcgaacttctgacctcagatgatctgcccgcctcagcctcccaaagtgctgggattacaggcatgagccaccacgcccagccatcaatgcattttttttattttttttttgagacagagtttcgcacttcttgcccaggctggagtacaatggtgcgatcttggctcactgcaacctccacctcctgggttcaagcgcttctccagcctcagcctcctgagtagctgggattacaggtatgtgccaccatgcctggctaattttgtatttttagtagagacggggtttctccatgttggtcagactggtcttgaactcccgacctcaggtaatccgcccgcctcggcctcccaaaatgctgggattagaggtgtgagccactgtgcccagcccatcaatgtgttttaaagctagctgtcagggttccacttaatttaaagctgggcagggagatgtgtaatgatttcaaagttaacacctgtttgttttctaaagggcatgccaagtcctgctgtatcagggaagtattctgtgctaaaatcagcgatggttcattgctctagtctctctcacccttctaggcagtgcatcagtcagctctaaatctggtgcagagggttaacagcataacccttgttggcaaaatggaatagatgttaagacctcaaatagggatttgggatgaaacagctgcagttagcactgttatctgagcatgaaagaactggaaacgctccttacgtcgagatgttggaccttgaagccctcctgaggccaacatgcaaatctggctgtgacggttcatctgacacctgtgtaaagctgaccagcctgctctgtacagtgacaatgaggagcccctctcttccttaagtaggaatctgtgaagcaaaatgtttgctgccaaagacaaatcagactgtcagtcattaaaaacagcattagcaggatgaggatagcaatggggaagggttgtgggcaatgcagtaacagggaaatggcttcagaaatggtttgagttggaagacaacattcttcatctctcaggacttctaattccttgatgctaaaagaagaggcatggattctatgagcttccaagtccctttccactttaaccttctacaaatctttcagaggactgcctagtagcaaaggttattcctggacacaggaaagacgggcattacagggaccaaagctctgaaaggtgacttttattaccaacacactggctggaaaagggacaaaccacatcacgggtgagtgatacttctcagtcttctctactcattcaacaaaggaaatgtgggctggggcagaggtcttttttcatttaatactggaaaaatattgaagagcatccatgttcacttatggctggttttgctatagaaattggaaaataaaggccacttttttg

SEQ ID NO: 713 - DNA, 4053 bp, Homo sapiens
atttaaataatgcaggctaatgatgttgatggcttggatcaagatagtggcaggggaagtgataagaaatgggcagattttgaatatataatatatgtcaagccaggaagatttgtgtatggaatatgagagagaggaatcaagaatgactccagtttttatcctgagcaaatagagtggagttgctatatgctgaaatacaaaaactttgaaaaaagcaggtttagtgagaaagatcaggagcatagttttttattttatttatttatttatttgttttattatactttaagttccagggtacatgtgcacaacgtgcaggtttgttacatatgtatacatgtgccgtattggtttgttgcacccattaactcatcatttacattaggtatttctcctaatgctatccctcccccattcccccaccccatgacagggtgtgtgatgtcccccgccctgtgtccaagtgttctcattgttcaattcccacctatgagtgagaacatgcggtgttcggttttctctccttgcgatagtttcctcagaatgatggtttccagcttcatccatgtccctacaaaggacatgagctcatcttttttatggctgcatagtgttccatggtgtatatgtgccacattttctcaatccagtgtatcatggatggacatttgggttggttccaagtctttgctactgtgaatagtgccacaataaatatacatgtgcatgtgtctttatagcagcatgatttataatcctttgggtatatacccagtaatgggatggctgggtctaatggtatttctagttctagatccttgaggaatcaccacactgtcttccacaatggttgaactagtttacactcccaccaacagtgtaaaagcattcctatttatccacatcctctccagcacctgttgtttcctgacttcttaatgatcaccattctaactggtgtgagatggtatctcattgtggttttgatttgcatttctctgatggccagtgatgatgagcattttttcatgtatgtgttggctgcataaatgtcttttgagaagtgtctgttcatatcctttgcccacattttgatggggttgtttgattttttcttgtaaatttgtttaagttctttgtagattctggatattagccctttgtcagatgagtagattgcaaaaattttctcccattctgtgggttgcctgttcactctgatggtagtttcttttgctgtgcagaagctctttagtttaattagatcccatttgtctattttggcttttgttgccattgcttttggtgttttagtcatgaagcccttgcccatgcctatgtcctgaatggtattgcctaagttttcttctagggtttttatggttttatgttcaacatttaagtcttaatccatcttgaattaatttttgtataaggtgtgaggaagggatccagtttcagctttctacttatgactagccagttctcccagcatcatttattaaataggaaatactttctccatttcttgttttggtcaggtttgtcaaagatcagatggttgtagatgtgtggtgttatctctgaggcctctgttctgttccattggtctacatctctgttttggtacgagtaccatgctgttttggttactgtagccttgtagtagagtttgaagtcaggtagcatgatgcctccagctttgttcttttggcttaggattatcttgacaatgtgggctcttttttggttccatgtgaactttaaaatagttttttccaattctgtgaagaaagtcattggtagcttgatggggatggcattgaatctataaattaccttgggcagaatggccattttcacgatattgattcttcctatccatgagcatggaatgttcttctatttgtttgtgtcctctttcatttcgttgagcagtggtttgtagttctccttgaagaagtccttcacatcccttataagttgtattcctaggtattttattctttttgaagcaattgtgaatgggagttcactcattatttggctctctgcttgtctgttattggtgtataagaatgcttatgatacatctctagaactcttcaccccaatcaacagaatatacattcctctcagcaccacattgcacttattccaaaattgaacacatagttggaagtaaagcactcctcagcaaatgtaaaagaacagaaatcataacaaactgtctctcacaccacagtgcaatcaaattagaatttaggattaagaaactcactcaaaaccgcatgactacatggaaactgaacaacctgctcctaaatgactactgggtacataatgaaattaaggcagaaataaagattttctttgaaatcaatgaaaagaaagacaacattccagaatctctgggacacatttaaagcagtgtgtagagggaaatttatagcactaaatgcccacaagagaaagcaagaaagatctaaaatcgacaccctaacatcaattaaaagaaccagagaagcaagagcaaacaaattcaaaagctagcagaaggcaggaaataactaagatcagagcagaactgaagaaaatagagacacaaaaaacccttcaaaacatcaatgaatccaggagctggctttttgaaaacatcaacaacattgatagaccgctagcaagactagtaaagaagaaaagagagaagaatcaaatcgacaaaataaaaaatgataaaaggaatatcatcaccgatcccacagaaatacaaactaccatcagagaatactataaacacctctatgcaaataaactagaaaatctaggaagaaatggataaattcctcgacacatagactccccccaagactaaaccaggaagaagttgaatctctgaataggccaataacaggctctgaaattgaggcaataattaatagcctaccacccaaaagaagtccaggaccagatggattcacagccgaattctaccagagatacaaagaggagctggtaccattccttctgaaactattccaatccatagaaaaagagggaatcctccctaactcattttatgaggccggcatcatcctgatatcaaagcctggcagagacacaacaaaaaaaagagaattttagaccaatatccctgatgaacatcgatgcaaaaatcctcaataaaatactggcaaactgaatccagcagcagatcaaaaagcttatccaccaagatcaagttggcttcatccctgggatgcaaggctggttcaacatatgcaaataaataaacgtaatccatcacataaacaaaaccaaagacaaaaaccacatgattatctcaatagatggagaaaacaccttcgacaaaattcaacagcccttcatgctaaaaactcaataaactaggtattgatggaacgtatctcaaaataataagagctatttatgacaaacccacagccagtatcatactgaatgggcaaactggaagcattccctttgaaaactggcacaagacaggaatgccctctctcactactcctgttcaacatagtgttggaagttctggccagggcaatcaggcaggcgaaagaaataaagggtattcagttaggaaaagaggaagtcaaattgtccctgtttgcagatgacatgattgtatatttagaaaaccccaccgtctcagccccaaatctccttaagctgataagtaacttcagcaaagtctcaggagcatagttttttgattgtcaatattttgttgctgaaataggaaattcatcaattgagggggagagagaggaagaggtaaggaaggcttgaggcctgtcacatagattttaggattttttggaaaaaaagtcttctacttatgaagacttctatatcctgagattataaaaatagatttatatatttcttacaggattttcatggtttttttctgtacatttgcattttaatgcacctgagtatttctgtatgttgtatgaggtgagaaactaactttattttttttcccaaataaatatccagttgactgag

SEQ ID NO: 714 - DNA, 3475 bp, Homo sapiens
tataaatgcttctcatcagactcaaggcctgaggtgatgctgatgctgtgcctgaattccagcagggaggaggcatgaggtgcgtccgactcccttcccatcacagctgagctagtttttcaggttaactttggaatgcccatggctaagaccaggggtccatccagacagttcagggcttataattttatttttggtttatgagggaacctagaaggcagcccacacgcacctttctcctcccagcaggggacaccggccagaccccaagctccacactcccaccctcagcacccacccaggccagcagccgggggcaccttggtgccaccttagtgcctgttctgcggaggctccactggacagtgcagttgatgcccggggccgagggggctctgcctgggaggctgttcacctgcctgggtgcaggaccccagagggaccccaggccacccctggcctgcccatgcccacgggaatcccgaccttgggctgcctgtctattgcaccagaaccgtcccagggctgactcagagtgaccctgagtgggggacgctcaccccaggggaggaaacggggctctgggataggaggtcctggctggggtcccacagatgccaggcgcctgccatctccagggcagtgctgtcacagaagacaacaccgctccctcgttacctgtggcccggccacctcagcggcccaaggaggtgagctcacagccatgctcggtcaatggggcctggccgtctttcctgggagagagcagaggcatgggcccaaagggagccagggatgcctgcccgtcccttctctcattcaggctcacctggtcatggtgcagtgaccacaggacccccacatgccgggagctgggttcgccccaccccaccccctgcaccgggccagcgaggggatggcccagaagagggggaggaccatgtggattcaccagtgctggacatgtgctctgtggctaccccctctgcctactctctggcccgatacaggggtgtgggacaggcctgggtgactccagcatggctttcctctccaggacgtcaccggtggcagctgcttccttccagagccggcaggaggccagaggctccatcctgcttcagagctgccagctgcccccgcaatggctgagcaccgaagcatggacgggagaatggaagcagccacacgggggggctctcacctccaggctgcagcccagacgccccccaggccggggccaccatcagcaccaccaccaccacccaaggaggggcaccaggaggggctggtggagctgcccgcctcgttccgggagctgctcaccttcttctgcaccaatgccaccatccacggcgccatccgcctggtctgctcccgcgggaaccgcctcaagacgacgtcctgggggctgctgtccctgggagccctggtcgcgctctgctggcagctggggctcctctttgagcgtcactggcaccgcccggtcctcatggccgtctctgtgcactcggagcgcaagctgctcccgctggtcaccctgtgtgacgggaacccacgtcggccgagtccggtcctccgccatctggagctgctggacgagtttgccagggagaacattgactccctgtacaacgtcaacctcagcaaaggcagagccgccctctccgccactgtcccccgccacgagccccccttccacctggaccgggagatccgtctgcagaggctgagccactcgggcagccgggtcagagtggggttcagactgtgcaacagcacgggcggtgactgcttttaccgaggctacacgtcaggcgtggcggctgtccaggactggtaccacttccactatgtggatatcctggccctgctgcccgcggcatgggaggacagccacgggagccaggacggccacttcgtcctctcctgcagttacgatggcctggactgccaggcccgacagttccggaccttccaccaccccacctacggcagctgctacacggtcgatggcgtctggacagctcagcgccccggcatcacccacggagtcggcctggtcctcagggttgagcagcagcctcacctccctctgctgtccacgctggccggcatcagggtcatggttcacggccgtaaccacacgcccttcctggggcaccacagcttcagcgtccggccagggacggaggccaccatcagcatccgagaggacgaggtgcaccggctcgggagcccctacggccactgcaccgccggcggggaaggcgtggaggtggagctgctacacaacacctcctacaccaggcaggcctgcctggtgtcctgcttccagcagctgatggtggagacctgctcctgtggctactacctccaccctctgccggcgggggctgagtactgcagctctgcccggcaccctgcctggggacactgcttctaccgcctctaccaggacctggagacccaccggctcccctgtacctcccgctgccccaggccctgcagggagtctgcattcaagctctccactgggacctccaggtggccttccgccaagtcagctggatggactctggccacgctaggtgaacaggggctgccgcatcagagccacagacagaggagcagcctggccaaaatcaacatcgtctaccaggagctcaactaccgctcagtggaggaggcgcccgtgtactcggtgccgcagctgctctcggccatgggcagcctctgcagcctgtggtttggggcctccgtcctctccctcctggagctcctggagctgctgctcgatgcttctgccctcaccctggtgctaggcggccgccggctccgcagggcgtggttctcctggcccagagccagccctgcctcaggggcgtccagcatcaagccagaggccagtcagatgcccccgcctgcaggcggcacgtcagatgacccggagcccagcgggcctcatctcccacgggtgatgcttccaggggttctggcgggagtctcagccgaagagagctgggctgggccccagccccttgagactctggacacctgaaccagacctgccagggctgtgcgatctcttggcctggtccttgcagctgtggcagcagcaggctccccagcggcccagggtgggccagaccagcagcccaggaagcagcacacgcggccgtggggaggcaggcaccgggcatgtcggcgcctctggtcaaaccacctacactgcctggggtgggtctcaaggaggcccggggcggaggggggttcccgcgtgcacacgagtgcggctggacgtgccgacacgcggtgatgtacccatgctccgtgtgtctgtgtctgcatgtccacacgtctgatgcacctgtgtacgtgtgtcaagcctagccacctcagctgcagggaggcagaaggcaaggcaggccccacggacacacttgggctgctctgaaataaagctgttgactcc

SEQ ID NO: 715 - DNA, 3767 bp, Homo sapiens
atgcggagggtggtgctcctcctgggcctcttgaatgaggatgacgcgtgccacgcctctttcttgcgggtatccaagatgcgcctcagtgtctttttaaagaagcaagaagagagccagtttcaccctctggagtggttggcaagggaagcctgcaaccaggacgctctccaggaggcgggcacattcaggcacaccctctggaagcgggtccaaggtgctgtcacccctctgctggcgagcatgatatcattcatcgacagagacggcaacctagagttactgaccaggccagatactccgccctgggcaagagatctttggatgtttattttcagtgacacgatgcttctgaacattcctcttgtgatgaataatgaaagacataaaggtgagatggcctacatcgtggtgcagaaccacatgaacctttccgagaacgcttccaacaacgtccctttcagctggaaaatcaaggactatctggaggagctgtgggtccaggctcagtacatcacagacgcagaaggactgcccaagaagttcgtggacatctttcagcagactcctctgggcaggtttcttgcccagctccatggagagccgcagcaggaacttcttcagtgttacttgaaggatttcattctcttgaccatgcgtgtgtcaacggaggaggaattaaagtttctgcagatggctctgtggtcctgcactaggaaactgaaagcggcgtcagaagcgcccgaggaagaggtttccttaccgtgggtgcaccttgcctaccagcgtttcagaagccgtctgcagaacttttccagaatcctgaccatctaccctcaggttctccacagcctgatggaagcccgttggaaccatgagctggctggatgtgagatgaccctggacgcatttgccgcaatggcctgcacggagatgctgacaagaaacaccctgaagcccagtccccaggcgtggctacagttggtgaagaatctttccatgccgctggagctcatctgctccgatgagcacatgcaaggcagcgggagcctggcccaggctgtcatcagggaagtcagagcccagtggagtcggattttctccaccgcactcttcgtggagcacgtgctcctaggaaccgagagccgcgtccccgagttacaggggctggtgaccgagcacgtcttcttactagacaagtgtcttcgagagaactctgacgtgaagacgcacgggccttttgaggccgtgatgcgcactctctctgaatgcaaggagacagccagcaagaccctcagcaggtttgggattcagccgtgctccatctgcctgggagatgcaaaggaccccgtctgtctgccctgcgaccacgtgcactgcctgcgctgcctcagggcctggtttgcctcagagcagatgatatgcccctactgtttaactgccttgccagacgaattctctccagctgtttcccaagcgcacagggaagccattgaaaagcatgcccgcttccggcagatgtgcaacagtttcttcgtagacctggtgtccaccatttgcttcaaggacaacgctccgcctgagaaggaagtgattgagagcctgctctctctcctcttcgtccaaaaggggcgcttaagagatgctgcccagagacactgtgaacacacaaaatctctctctccattcaatgatgttgtggataagactcctgtcatccgctcagtgatactgaaactgcttttgaagtacagctttcatgatgtaaaagattatattcaggaatatttgaccctgttaaaaaagaaagcattcataactgaagataaaactgaactgtacatgctcttcatcaactgcctggaggattcaatacttgagacaccagtgcttactccagaaatgatgaactgaaccacctagaagaggaaggtcgtttccttaaggcatattctccagcaagccggggccgagagcctgccaacgaggcctcggttgaatacctgcaagaggtggcccggatccgcctctgcctcgacagagctgcagatttcctctcggagcctgagggaggcccagagatggccaaggagaagcagtgctacctgcagcaagtcaagcagttctgtatccgggtggagaacgactggcaccgggtgtacctggtgcggaagctcagcagccagcgggggatggagttcgtgcagggcctctccaagcccggccgcccgcaccagtgggtgtttcccaaggacgttgtcaagcagcaggggctgcggcaggaccacccaggccagatggataggtacctggtgtacggcgatgaatacaaggctctccgtgatgctgtggccaaagctgtcctcgagtgcaagccactgggcattaagactgctctgaaggcctgcaagaccccccaaagccagcagtcagcctacttcctgttaacactgtttagagaggtggctattttgtacagatcccacaatgcaagcctccaccccacgccagagcaatgtgaagctgtgagcaaattcattggcgaatgcaagatcctttcacctcctgatatcagccgttttgcaacatcgctcgtggacaattctgtgccattgttgagggcggggcctagtgacagcaaccttgatggaacggtgacagaaatggccattcatgctgcagccgtccttctgtgtggacagaatgaactcttggagcccctaaagaatctggccttctccccagccaccatggcgcatgcttttcttccaaccatgcctgaagacttgctggctcaagctcggaggtggaagggtctggagcgagtccactggtacacttgtcccaacggccatccttgctccgtgggagagtgtggcaggccgatggaacagagcatctgcattgactgccatgcgccgattggaggcattgaccacaaacctcgggacggctttcatctggtcaaagacaaggcagacagaacgcagaccggccatgtgctgggcaacccgcagcggagagacgtggtgacatgtgaccgagggctgcccccagtggtcttcctccttatccggctactcactcacttggctctgcttctgggagcgtcccagagttcccaggctctgataaacatcattaagcctccagtgagggatccaaaaggctttctgcagcagcacatcctgaaggacctggagcagttggccaagatgctgggacacagtgccgacgagaccatcggcgtggtccacctcgtcctgcgcaggcttctccaagagcagcaccagctctctagcagaagtgaggaaaggggcaagggctgggcggggatcacacagcacaacggcagcgcaagcaggctcgctgtcttgtgggccaccccacacacagccagtctgagctctgtctgtgctgttgctggaaagaatgagagaacacacagagagaaaaccgtgtctagggaaggcgatgcctggggctggaaaaaggaagcactctgcttgcccagaggctggaaggagctgctctgttccctccattcacccctgcctggctaagacctgcggtattcgggagcgtctgcacgcaagtgttcagtgtgcatatatggggagtcttcagttccgaagtcagccccgtaggtcattcccctaccatgctgggagcacgtgtcgtccacacagagcgtgcgtgtcaaaggatcaatcaccatcacagttgtgtgctgatttattaaatgtttatatgtccacagttatgtt

SEQ ID NO: 716 - DNA, 3503 bp, Homo sapiens
tgccatctcccttcaaggatctcgaatgggagtgaagggtgggtttagctatattgactttaactcatttctcaggttggaggatgtcaggacaagtaaggcctgggaagctgtagagtgaaattctacaatgatggggacagagatgaggatcaccagtgtcccctttagcatgttctgtgccccacaggtgtcggggcatgcaatattatagtccttggacaaaatgagtctcaagtacagccccccaggccacaccaaggccacaagtagccttctgtccctctgggcttggtgggcctgctccaggatccctcagacttctcatcccgcctttcccaacttcaacttcagctctgttccttctgcattccaccccaactctatcccccttccttgtggggggtgggggctgggggaatctctgaagccagggaggacagttcaagttgactgcctgagtgtcccaggcttcacctgctgctcatctgcaaccctttgtcctaccccagctttgagcctcagtttgtcagactgaagacctggactcaaaagttccaatcggtccccctggggggttgcccagttcccgccagccactcgagggttaaatggcactggtgaccccggtgcaacgtgcaggcgcccggctccgctcttctgggctctggaggaggctctccggctcagtaggctcctcggcggctcagtgctgctgcccctggggcgtgagaagcccgcggggggagtttctcagagaaagagggagactaaaaatagccccggggagcgggcccatttcgctctccttcggcccctgccggctccctcactctggcctcggagagggctgtgggccggaagggtccctttcttgggctgtcccagtgtccttcgatcagacccaaccagactccttttctctcccagtggctccgtggaccctgggaccgaaaaaaacggaccagttggtgacttccgagccagcagacacccaggagggagagcagaaaagcctcaggccctcttctgttcctagtttctgacagggcgaagggcaaggagcatgtgcccagaccccagtgtgtccgttactatctcttttaactctcctctaccttctggaaagtggaattataaatgtgggacctggggaggtcgctggtggtccacaaggtgaaggaagggcgcgccccttctgggccccaggcagtttcccggcggaaaccctttctggccgccgggtgtgtgtcgtagaaaggctgggggagagccggcagcacctgcaggctccaggcgtgcccggcctcagcggaatggccagcgggccgggtccccagggggcgtccagctccttgaggcggggattgtttcctcccgtagagcctccggtctagtggcccccccttcattgtcttctgccttatcactgggtacaaatttcctgcccagaccacagagatcctccaggaaatgggaagggggatgctgcgaaggccaagtaacagaggtgggggttctgtacggcgcagccgggaagcggtgggggaggcttgcatcctggccggatcggctcccagcccttagaggccttcagcctggctctcctagggcgagggtggagagcggggcctggctgcggcctcttcccgcggcgttggccgcctgctcgccacgcggaggtggcgtcttccgctccgaggcagagggccgaggcctggagggagtagggcccgggactggagcggcgatcatcctcaggcctggccgtgtgcaagcccaaggttattccccaaagggcttaccagttggctgctctgttgcctccccgaagggcaaaggatgagtatttctggacgccgtggtgcaaacgatggccccctccttgaaaccaacaccccggtccaccccctgagcgccggacacactcaggggaggcttcatacttgtctagagaccgtcgttcgcgctgcccttaattccttgccacccgagagttctctgcccagatcgcccgaaccccagaagggctccgaggagctttctgggtttcaaccctccgttttccgagggaagcccgcctctgagattgcgcgggagggcggggagcatcgcattcactgggtcaggcttgggcgctgggctgctctgctctctccagctcctggcaagctcagaaggagccgcagggttaataggtaaccagacggcctcccaaacccctccgccctttgagaactcgggagtgagggaccctggcggcccggagcagcatccctactctccctcaggaaaactagggaagcaagtgggctacgtggcgcgtacgacagaaacagtcggtccaccctttcttctcatatcttcccctcctcgctggaaatctgccccctctctttgatgctcagaaatctgcgcctctggatacgaataaatgcatataaatgtgtccccatccccgctacaactgcagaggctggcggtggagagaagtcgtgatgaaatgggaagcaggacactgagccagtggtccctgggcaccccttgaggcctccaggggccggaccccgcaaggttcctctttccagttaaagcgactttcctcgctctctggtgaagccgcgtagggcagggtccgcgggcggagctgggagccggtcctgggcactcacgcctcgctcttgtctccagcgcccccctcgcgggcccagctgcaactgcacttgcccgccaaccggttgcaggcggtggagggaggggaagtggtgcttccagcgtggtacaccttgcacggggaggtgtcttcatcccagccatgggaggtgccctttgtgatgtggttcttcaaacagaaagaaaaggaggatcaggtgagggaagaacgcctgtcagccagcggcaagttgcgcccagagggggttgtaagcaaagagctggtagcggtgggaggggtggagagggaatgggggccggggaaggagtttcagggaaaagcagaagtcttcaccagttcagtttttgttctgatattggagacttcccaaacaattatcttttgccggctttccctaaaaatccagcacacaaaatactgtaaaagtgtgagaggcattttacttggttatgagggaggagaggaggaggggaagaatggaagttgaggactgggaaacgcttaggggaagtaacacacacgacttataaaagttagcatatttctggcctgactcagtgactcgtgcctgtaatcccagcactttgggaggccgaggtgggcacatcacttgaggccaggagttcgagagcagcctggccaatatggtgaaacccccgtctctgctgaaaacacaaaggttagtcggacatggtggcacccgcctgtagtcccagctgcttgggaggctgaggcgggagaattgcttgaatccacaaggtgggggttgcagtgagccaaaatccagccactgcacttcagcctgggcgacggagtgagactctgtctc

SEQ ID NO: 717 - DNA, 4657 bp, Homo sapiens
aatttctcgcccctgaagttgtgaactatgattttgtttcatttcccactgacatgtggagtgtgggggtcatcgcctatatgctacttagcggtttgtcgcctttcctgggtgacaatgatgctgagacgctgaacaacatcctggcctgcaggtgggacttagaggatgaagaatttcaggacatctcggaggaggccaaggagttcatctctaagcttctgattaaggagaagagttggcgaataagtgcaagcgaagctctcaagcacccctggttgtcagaccacaagctccactccagactcaatgcccagaagaagaagaatcgtggctctgatgcccaggactttgtgaccaaatagtctacaggaggcagccatttggaaggaaaactgctgtggttgctgctgcttcgagaaaattttttgaaaaatcagcagttctgatgcgttgacccctatgatgacctggtagtcttagcagggggagccctcgaccctgaatgtgaacttgaactgcagtgcctctgctgcgctcagaggaacacccagcgctgcggtctggtctcagggcgcaaacacatccctgcacccggtggtggtgatgttgggaagatgtttccctgccatcttgagattttttacattttttaaaaaattttttgatcttagtcactggggcagggggtgcattatgtctgccatttctcaaatgactacagctgtgacacttaagattgattggagattttaaaactggaggatgcatttagagggagaaagctacttccagccattagactatgcctttggaaggggcaattagatggcccgaaagaattctgactcccatgcacccttggagacttagtttcacagactctgtcattttgatttggtctgtggtcacgtgactacaatggataaataatttgtttgctggaacagaagccgtctttgaattctccaacaagaggcatcagccactgtgtctttcatttattctgaattgtccccagcgcgcattttcttccatgcagctgattctgtttttcacatctatactccctgcacccttctgactgacagttcatccccacaaaacacattggttttgagaggtgatgcaaaaagtatctgtttatggttggtctttgaaattctgacctttggaataatgtcaacagtcacaacaggtttcctcaagccccatttgtcaactaaaagagacggatctgcacctcctggagcaagatagcactgagctttcaacattgaagtgacttgggaaataacatttaagcttctgggtaaacacatacaaacagtggcaaagaccaagtacagtctctcacctgtgctgtctcatgggactcaatggtggtgaagaaatctcaatcggacaccagaggtgggggcaactctgcaagctcacctgctggacgtgagaatgttggaacgttccagttggaaggttcctatgcctagcccgtgtgccatttcatggcagatatgtaagaaaggaaatggccctactgtagacagcttatggggcccagaaaggcactgggctttaaagagcgaaatgagtgtgtcatttccacatgaaggagaggcaaggaaaagccccacaaaattcctgttacctgctgaactccaagctcaccaaccagcttcatgagctttctcacattttccatttccaaataactgttgtgttgaatcagctgtgttaatgcctttattctttgttttttttttttagacggagtctcgctctgtcgcgaggctggagtgcagtggccccatctcggctcactgcaacctccgcctcccaggttcaagcgattctcctgcagcctcccgagtagctgggattacaggcgcacgccaccacgcacggctgatttttgtatttttagtagagatggggtttctccatgttggccagaatggtctcaattactgttgttgcaatagcaatgaaaggcataagaattacttggtggcctcatgagggatggcagtttcactttgcatcagttttcccccattatctctcagatccacttaaggaatccttacagcatgccgtgaatgtgtgcaacatccttattctcatctttaaggtaaggaggaagtagagatagaaggaaatacgtgatttggtgaaggccacatgcgaattttgtggtcgtgttagttataaaactgactcctttccagcctttgctcttacattatgatgcgtttcttttcctcctttggccttgcatttatccgaggttggtttcttatgttcctgtgatgtgactatgcttaagtgtttaatttagtttgcttaaaacacacacacacacacacacacacacaaaaccctgtgactggagtgttatattactatgctatctttagctgatgatattcattgagcctggaaaaatacaagccagtgcatgcattaatacttagttagaccgcagagagctggcattcactcaaatgctaaacaggacacaggggtctgatttgaagcccctcgtggcagggcgttttctgtcctgtggtgtgcattctctaccaaatcaagcaggagatcttttgcacgacgtgcaatttgcatccaccttcccttctgactcaggttggcagataaactgtccccagaccctgccacacatggaagagacagctcaggccaaatacaggcatgatttctttgccaagttaatgcactgatgaccctgcagtgagtgggtgtgatttttgttttgttttgaggtttagaaaggagactgtactttgaaaatggatcttgtttgattctgtagttaaatttccacatttggaatgggaaggcatctccatgccagcagggtgccttttatatgagtgctgagggtagtttgcattgcagagttcatgattacagtctagagttacttgaaatgggagattatcagtctagtgttcatcccgcccctgctccatgtccttgtgtggctgctccagcgagagctggtaactaggtagactgctgctctaatggggaaagggggctttgcaaagccgaggaatcaagccagatgcgagcatggactcagaaaagctgagtctggctagaccagggctatggagatcaatttttccaacaggtcattaggatttgggaggctgtatttctcctccaccctcttaatggatggtatggctttgctcactcactaggcagttcccactttctttagcaaatggaggaaattaagcaccgatgtagcacttcccactgcctggagagaaataaacctcgcaagttattaaggagaaggcatgccacattggtaatttggaagacaccaacacttacccagaatctgttgctatttaaaaatcagggagaggagggcacatgtccccatttgctacattacaaactttggacgagactctcatctgaactaacttggggaaacaatttctaggttgaagctggtaacactcatgtctgttgagtgccataagtttgttttcagttatttcctctaacttgatattaatttgctttctttcctcaaaaatgtaagtaggcatgttgccattgttgtggcttgctttgatgtatgtttggaaagatgtgtgaatacttaatttttatccattttatggaaattagcttagcaatttttttttctcttttaagaatcaaaatatggatttgatactaggaacagaatctgctctttatttcattccttttttgtctcttctgcttcctctgcccctcccccagccacgcagcacgggtgccagtgtgcatgcgtgtgctgggggccaaatgacagaaccccggttgaaagtccgcttgtaaaagcacaagtgagaggcagcatcaggcccctggagggctgtggtcctcggactcggttctttcctgtcccctggccgtcctgtcatccctgtgtgctgcagcatcaccacggcctacttcccaatatccacaaagcttcgcctttgcttttgcactctcttttacatttttttacttctttcctttttcttaagttcggatccaagtttgtcttcttatccatcaccatgctccctgaaagcctttttgagattaagaaattttcttaccaggaggcaactttccgtctgtcctaaagggaagtgggtgctggatttattagatattgggttcctggattaagatgacttcctcacatagcttggagtctgcagtttctcagttagaagtgttctatatttctttttgctccattttagtgcgctgtgctttgtataagtggtctttctatgggcagtttcaccttccatgaaggcttataactcaaccactactacccattcagaagagcagaaagcatctgctgtgtgagcgttcatatgttacctaatgtgtattttgctgtcgtctcagctgatagatgtcagtgagtctttctgactaggtttattggtgttgataagaaattaaaaaaaggattcataacgtggtgattgtgtctatcatgtatattttaaatttctgaacgtactttcatttagctgtttttctttgctttctaaagatgtataacaatcatgtatatgtattatattgaagaataaacatggaccttatttatcttttg

SEQ ID NO: 718 - DNA, 4875 bp, Homo sapiens
ttgatgccctgtggtcgtggtcttcacgtaaacgctatttgtgttccgaatcttagagttgtgtgggaaggggatccgaggagacatgaggatcataaaagctgcccgatgtcaccatggtcgcgtgcctgtggggctgtaaaggcagacttagacaagagcaggggactgcagtgggctctgagccactgtgtgtcagtggaaggatgactaagagtgtgagaaccactgcatcgctagaaccgcaccagccttctcatgtggtccaggaggcccggcaccgccattaccacgaagaccaaaatgactctccccacccacagccaaaccagagtcgtcctgtgcgctctgccctgtcatcagaggggactgtcagctgccgtctgacatcctgcgtgctttggctcttaccccagtctgaccagtgtgactgtacaggatccctcttcttggccggtgaacagcgcacttagtgcccttgcagggagcctgagaacgagcaaggtagtgggtgcggggagtgagcaaaagagagactcagcgagacaggatgtgagatggaggtggagagcaagactgcgagaggaaaatgacaagcagagagaaagggatactaagaggaagatggcaaactgaaagggaaagagactgtgtgacagggtgagacagagtgaaagagattgagccagaatgagatgcagaagggggtagggagggagtgagagggagagagacaggagagagagagagagagagagagaaccccgggaagcaatagggacccccagagtagaccctgccatcacttgtgcctggaagaggctcttgcataggtgacgggcattttcaggatggctgccgggtggagttgagcagtgaggctggcaggagtcacatctgggcctgaggcaagtagcccaaactgaaaaggcaatgctctgatgtcagcctcatccatctaggcttagaacaaggatctgtactttgaagaatcccagcctcccctgcaagaaagagcccaagattgttaccatttcagacctcaagagccaaagcaagacacaccagttcctaaccagagggacttgagttagctctaggaaatgggaagattcaattgatgtaatttcaacttcttttcctcagaggcgtccagcagcacaggctgccaaaaaagtgcccatgcccttgatgtctaagcaaagtgactgtaaaaatagaagtagtgtctcagaagttttttctctgcccctgtctctcctgaatctgaaccaggctgtttaaaacttggcatcactcagcttgcaaagctaccatttgtttctagaaagtgaaagttttttttggtaagccctctgaaactcagtgttgcctaaatatctgaagacatgatttttctcagtccgtcttgggcccccgtgcccagtctctctttgctgcacccgttcttcctctgcactaatatgtcctcatatccagctcctttccatagatgtgattgggtttctgttcatgtctccactgttcaaaagatttgtttcctccaccattagtatttgagggagaactcccaaaacctagggaggggaaagcaagtgggcagagaactagaaatgagatgagaaaaatcgctagctattcctggcaaggaaaaacatctttacagtaacaggagtgtttaacagacagacaaaataccttcaaaatatgcaaatctctgtttatcttacagaattctacagggaacaaatccgtagcattagcaattatgacttagctcagaaatttttttccttcctcgtcataattataaacatcagtatcgcttagagcttcacgttaaaatgtttttctcctacttcttttaagagttatttgtttaacatgcttttattatcctagatgatgtgatttgggaagaaagtattaattctcttatcagctctgtttcctttccagttgttcagagaattgagctacactagtagtttatgaagtaagaggtattaaatagagagctcactgctgatcagattgagccacttctgaactgtggctatccaggcaaaggggattgacagcttagcatttatgccgcaaatgtgttggaataacatggcaacagaatcacaggcatctttacttctctcacactgccgcctcccagctagtgcctttgtatcattgaaatttttgagaaacaagatgccttaactccttatccaatgttgcttgttcagtctggctttgtgaatattgttccttgagtgtggttttgaaggtggctgtgttttattgcaggtattgtataggtcatgtatattctatcattcattcatccacttaggcactcattcactcattcaaaatattgactgtgatgtgccaagtcctggcagatttgggtaccgttgtagctgagtatttctaattctcttaaacacattgcctacattatcatgttagaataatgtcaaatataaccttgtcacaacaaccagtctgtcgggtgtccttggcctacagtgctaatctgtgattattttctaatttgatgctggcaactcacatagaaccactgggtgaggggatggttctgtcccatctggtcattgattcgtttattcaacaaatgtccacctactatgtgtcactgtgctgggtgctgggccctctccctttgacttgctggataattttagaagcttgtccagtctcactggttttttgctgtgtatgttttctgagacacttccagtcctccgtttgatcacagcttcccatctctgcctcttgcccatcacttgtgcggattgtacttaatcactgtcctgtatccacatccctccacacccagcagagagtccataagtagccatttcagtagtaccctctataccatctctccctcccttatcccttcttctgccactgcagtggctctcgcaacccccaactccatctacgatcacatctactcttcttcctaagggaatgagtatggctggtagctctcccaaaaccatgctgagtccctgtatgcagttctgcatcctagacgtaactgagcaatccctcatgggctcatcaatcccagtgtttatggttttagagtcctctcattcactacagtgatgatcctagaacttgaccaccacccttgagcctctgctatatcctcaccagatttcagcagatgatttgattcttcttttactatacagatggtacaactcgttaatcttaattcctctaaattcagaatctccaacttcttcttctttgatcacctccttagtctatgaggaggaagaaattagcaactcactgaccagctgccatactagggagcgtgattatccaagcctagactctccatccttccattgcccatgagctatccacctatccatccatccagcaaacttctgctgagtgactcctaagtatccagtactattaggctttactgaagcagtaatggggtactcctggcctgagcggagagccatctggtcactatcatattgcaatgaacctgacctttggtcagcataaaaataaaatgcatctcgagtactttagaatgaaatattttcttttttttttttttttttgagacggagtctcgctctgtcaccaggccggagtgcggtggtgcaatctctactcactgtaagctccgtctcctgggttcaggccattctcctgcctcagtctcccgagtagctgggactacaggcgtctgccattacactcggctaattttttgtatttttagtagagactgggtttcatcatattagccaggatggtctcgatctcctgaccttgtgatccacccaccttagcctcccaaagtgctgggattacaggcatgagccaccgcacccggctagaatgaaatattttctttttaaaggtaatatttgaactgggtttgaaagcattcataggaattcaggtcaatgtaggaaaaaaggtgcctccaagaggaggagaatagcataatgtaggtatgaaagagtaaggtatgtttggaaaacagcaactaactaggaaaagtgctgggttcgtggaggaggaagcaggaaagaagtctgggaaattatacaggagacctgttattccattcaaaggagttgagactctttttagaatgggggagcttggggagctttcctggcaagggagtgacttgatcagaatggtttttgtttttaatggtgtttgtggttcagctgaaggttctttgaggatttcaggagaaagatgatgacagctggatgatcgtagtggtgatgaaaagaaaggggaaaaatttattcaatatataagattaagaattgccaggtcctgatgaaagactgaacatcaaaggagttgacagtgacctttccctgatcaggcaaagtagcaggttggaggaaagaatgttgagtttgggagcctgatgaacttaagtggtagaaataatcggtaaaggagagaagggcttgttggggatccaatctgtgatcatcaatgagtaggcaaaggtgaagtatatgtggagggcaaggggaccttgaggaacaccaacagcgaatgggttggggaagacagtgaagtatttgaaaaagaccaaggctttgggaggccaaggcaggcagataacctgaggtcaggagttcgagactagcctggccagcatggtgaagccccatctctacgaaacatacaaaaggtagccaggcgtggtggcgggcacctgtagtcccagctgctctggaggctggggcatgagaattgcttgaacctgagaggcagaggttgcagtgggctgagatcgcgccactgcactccagcctgggcgacagagcgagactccatctc

SEQ ID NO: 719 - DNA, 4004 bp, Homo sapiens
atatcccatgtacttatatgctctgtggaacatgttcttgtaaaattaacatatactctattacctccttattaatgggaaattctgagggactgccttcatccatcacaataagctgggcccctcagcgttccccgccccaagctgacaaggcaagttctgaggtccacagggagccaggagggaaggccgtctcttttcatccatgcaatgcctacactatgcagaaaagggaggacctcaagaccaagaagcgattatgttgcagcccttcttctgtgaacacgctcaaaaacacacgaatgttcccgctaaatcagtgactccatcaaccttgatccacaggccttggctgtggcagagggactgcaggaagccacgtggctgagaacccaccttcttattaccatgttgggcagtttctaggagtgcttcctggtttcagattttcttccctttcaaagcagggtgggggtggtgtaaagcccttgctcgggctaggagccagatacgtggcagcttaattttccccattatgcaggacaaataccaagaagaattcccaggtgtgtctgcagccgtgaaaatgtgacatgagtcacagtgtcttcggaggaaatgaaagaccacaggacggggacatggcatcatgaaaaaagatgctttgtgattttcaacatatggtgacacttttcctaatttagagggggaagctgggttttgagttttcttttatcctccctctttgttaaaagcaagagaaagaagatttaaagaacatctgtgtattcaaatgatagaaatagaattatacactttcaaaaacaagttctagtatttttgtctctttcaaagatttccgaagcctatagatttctctcgtgtttgtgagagcatttcctctgagaccttagacatagtgttgaagttgaaatggtttttgtctttttcccctttctgttaacccagcccccacttcattctgttaatctcctttaattggacttaagataagactgagtatgttcaatatttttattgaattgagttttatgtttccagtctggatttatagactgttaaatagaatgttttacgtttctctctctcgcaaagaaaataacaaatacgtgtgggacagagccatcagtcaattatatcagtggattgttggcaactcacagggggaaaaaaaagagcattttcactctactcttaggggaaagcaattatatttaagagcagtagaaagccaaaactagcctggaacttcaaaacgcctttcttgactgaccaagaaaaggtacagtgactacaatgacaaaccagcccccagctcttttagaaatctaccctgcctcatgctaaagagaaagtaagtgatgtttcagcctcggcgaccaggcaggaatagaaaaatacattgacagtagttggatagaccttaaaattaagtaaaaatttcttaatatacaagatctcagttttcccacaaacctcctttctgtccagaaatttccatgccatttactgcctgatcatgtcaggaatgacgttcttccttgttcttgattttccttcctggaatgttttaatcctgcctctccagaacacttttccctacttcttctaggccctactcacagcaatgtagctgacacatagcattagcgtgcaaaacctcaaatcctttctgacttggaacttcacccaggaaagacctctagcaaaagtgctggccattgtgtcacaggacaaacccctttcaaagaacaaagccatcatcatctcaaaagccacagtcaccacctggaccttccgtcctgaggaaaggaatctccaccgaatctagggggaagacccccccaccagtctgtgcaaaagatgaagaattgagtatgcacctacctgtgcccttccatttccacctcttcccaccttccccgtttctttttccgttcatttttttttccactttaaagacatccaactttgccttggggatgagcagaatgaaatgtcacttacctataaaaagagacagaagagaaagccatgcatcacattacacacaagttctttgaaatcaaggccagcttccgactttgaaactgtaacaatgagtgaatattattttttcatcctacctttctatatttaatgaaactcaggagttcgcaagtagcctatccccagggcccagtctcccttcgtgattttccttttgtttctttgcctcctccgtccctcttcaccaccctagccccacaccctctgtccccgcttcatggatgaaaggtcaggaaggaataaggggggaggggtgcacagacccagagatcaaggccagccctcagatgtgggcagcaaggtttcgaggcatgaggagccgcttttcacctcttttctcacaggccacagagatgggacccagggtcagtgccggctggtgcctctcgggaggagggaggaaggtcagctccctgcagggtgattttccacctggtggcttctgggctctttcaaatgactctgctctgagtcttcctcctctctccctccctcaccctcaccccctccgccctcctggtttgggtgtgaatgaattcacccaaggtctccatccccctcttcatcctgcagcatctgtctttcagacctgcttctacagaaaacctcattattgcagcaccctgaggccaacaaccacctgaatgggtcattgtgttcagtcccctgcctcaatacatgatgcaaactggcccacccgagtcctacgggacactttgagaaccctgagatactgagtccccgccttgcccggctcctggccgcagaggctccctgtcttcatgcaacaagctccttgtggccgactgattcggttctgtcggctgtaaggaagccaggctctgagcattctacttgcaagaacagcccctcacccaccacgctatgtagcggatccttcacgtgctcacatattggaaaattggcttcagggtcctgccagtgtcttcttcttcttatgcctgaataactcatttccttttagactcttcttaaaggtttcagttttccatctttcctcctccaagctcctctgagaccctccgtggaggacagctcagagctaagccctggagagaaaagcagccacgtgtcccccgattctgttgctgcatcccccaaagagatttccaaccaagatgctctgccagaaatggaattacggtcaaatattgcatcccgatcacattggtatgttaaagacttggagagggttcgaggtaaagatctatgctgaaacttttcctaacggtatttgactcagaaatgtttcttgctatatataaactaaaacaccgtacttcagaaggatgactactttttctctcattatgaatgtaaaactaaatacaattgagttggtattatcacaagcagtggccagaggaccttgaagtcgatggcccggccaccatgcccagctaattttttgtatttttattagagacagggttttgccatgctgtccaggctgttctctaactcctgacctctggtgatccgcccacctcggcctcccaaagtgctggaattacaggcgtgagccaccgcgtccggccgcttacaccttttaaagcttctgattctgctgtctctgctctgtggctttgcatctgggcaagtttctccgcagaccaggaacctctaagtcgggggaggaaagagaggtcgctgaatcagagcaaggcatgccgtcctcgtctgcatcctctattactcttgaataagagagaatgcgaggacaaacgggcatcagcatagtgacgtgtccatgtaggttcacgaatgtaagagctgcaccacgtgggtgtggaatgttaacagttggggaggctggggcagtgggaaaaggggtctatgggaatgctctgtattttccccttattttactggaacctaaaactgctccaaaaataaagtttatgaatgaaaac

SEQ ID NO: 720 - DNA, 2071 bp, Homo sapiens
ttttccggctcctaactcccgtgctgcttgttagctttctgttacgacgttggctgtgtcgggcctcgggcagcctctgaccttcccgcctgccctttacctgccccaaagcaggactctaatgttccccgcctttctgactgtgggtctcaggaccctctcctgagagggtcccccactccccgggggagaatgctgacgtcatgtttccctgagcactgtgagccacgccagcaaacggggttgtgggaaccccaacttgaagccaattggtcagttccagaggctcagacagtttaccggtatgtgtcagagggcagttttggggacggagccctcaacccgtgcgatcggacgctaccccgggtccatactgttggaactgaattagaaggcagcagcgacccctgcgtggtgcatggggaagacccttcacacccaccttctgtgtggacaactgttgtggtgggaggaggagaaacacggtgtgagagtttttccttaaaacaaaggggcagcaggaaactccaggagttcccaaaaaaagaaacgcagtcggcctccaggcataccaagcactcttgcttcgatgaccgtgaaagaaacgccagtttacctgcgacaccagcatccacacctcaggccgaggagcaggagctgtggagggcacgcggggcaggggaggtctctccacactgcccatggggcgtgtgatctggcaatgccaccaaatctacaagtggacacaccttcccacgaacccacccctgggctctacgccaccctcacgcaccccagtcctctgccccagcattttccacatggctttgctggcagagtgctgggaatcttctggaggcagtgggtgttcgccgtccccatgggtgactgtctcagagggtgcagagtggccacggctgcagctcattagagcgcgccgcaccatggacacgcagggcaggctcacccagaacgctctggacaggtcagtgaaaatgggagcttcgcccaggggacgtgggctcagacacacgggcacatcagtcccagggcccatcaacaccttgaaagccaaggccaagacccactgaccctgagaaccaccacacacctcacgcctgtgcctctgggttggcaaaatgtggaggagccatgccagggcacggagcccccagcacaccctccagctgcccctgcgccccgccacacacggtgtcagtggtcagagcctcgtggagacggcagcgacgcagggacaactggacaaaagatcgagcctgacgtggggctgcgtgaggtcaggggtgtgggcggcaccgacgaggcttgctggctttcaggagaccggggacgacaggctggggtggggcttccggtgagagaggggtgagggcacggccaagggcactgagaaaacagctggcatctgaggaaggaggcctctgaggtttcgggataaggaggggcgcattcttcggatggagactgcctacccctcgactctgggtgcaggctgcccagggtggggcaagcggccagccagcctccaacctgcccttgaaacaggagctgccgaccggggccggccgtgctggggctgccacccacaccatggcacagaagccacctgcacgctccgatgcactgtggccagtgctcctgcaggtggcagagctgtccctggagggtcagcctggcaccacctccacctctcaggcagggccatgggggcggtgcccagagaacctccatgaatgtgcaaagagagagaggagacacagagaacagaaagaggatctggaactcaaggacgccaccgtgtgggagccggccaggcctccatgattcacggtccagctaccaaaacagccacgccaaggcggcctcccttcttcctgtcaggaccgccgcccaaactaccaagaaggaaacccatttctgatcctgcaaggttccataagagaattggggccgggcgcggtggctcaggcctggaatcccagcactttgggaggcaggagggttactcgagcccagaagttccagaccaatttgggctacatacatggcc

SEQ ID NO: 721 - DNA, 3394 bp, Homo sapiens
ttggatgtattaaatgactggccaattaccaacatgttaataaaggaaagtttccagtagtgtggaaagagacctatataatgtcccatgggtgggtgccctttgaccatctacccctaaatcccaatgcagcatctctgtagctccccagaccatggcaggggaattcccttccctcattcaactagtgcctgttctttctctctacttgtccccacccccagtgtttcctgtttgtccaacaatgaggaggccagcgtaaggccacactgctagctcatgcaggatgcatagcccctgagtaaaccataacagagccataagcctggtatttaatcacaggaacatcagcaaaaggaactgcttaattgttttttattttcccttctttcacctgttggaaatgactgcgtgctctgtagatccaaaacaattgcatggatgtccaccgaggggatatgtgtttctttcagggctcaaagtattttcacgtgtttcatcaaactcctctaccagccaaaagcattccacagaacttgagaaattccagagtagtcaggagccagctcctcatcactttggaatagcaacatattttaaagttaacaaggaaaaaatattgagtcaaaacacgttagacctgggcctgccttcttcagaaaatgactcacagaatccaagtagtggcaaagtcattctttgtctttgggtccctggaaatcatgaggattccatccagacttcttatctggcgcacataaaaggaaatgcagtctgttgtagcaagatgaacacgggctttggaatcagatgaagctgggactgagtcccagctccaccagtcactagttatgtgacctctgacaagatatttaatctcaataagtcgtagtttctgcctttgtaaatagtaaacagcaatacttaccttccaggattaagagagaatacatcgattgcattcagtgtaagacccactgtattgtgaatgcccaaatcatggaatccattatgattgatctttctgaagttattaatgttctttctttgcatggaaaccaggaaaccttgtttacttttcaagcaccatcacaataacagatgtgtcatcttatttttctccaggttggtttcatcgactacattgtccatccattgtgggagacatgggcagatttggtacagcctgatgctcaggacattctcgataccttagaagataacaggaactggtatcagagcatgatacctcaaagtccctcaccaccactggacgagcagaacagggactgccagggtctgatggagaagtttcagtttgaactgactctcgatgaggaagattctgaaggacctgagaaggagggagagggacacagctatttcagcagcacaaagacgccttgtgtgattgatccagaaaacagagattccctgggagagactgacatagacattgcaacagaagacaagtcccccgtggatacataatccccctctccctgtggagatgaacattctatccttgatgagcatgccagctatgtggtagggccagcccaccatgggggccaagacctgcacaggacaagggccacctggcctttcagttacttgagtttggagtcagaaagcaagaccaggaagcaaatagcagctcaggaaatcccacggttgacttgccttgatggcaagcttggtggagagggctgaagctgttgctgggggccgattctgatcaagacacatggcttgaaaatggaagacacaaaactgagagatcattctgcactaagtttcgggaacttatccccgacagtgactgaactcactgactaataacttcatttatgaatcttctcccttgtccctttgtctgccaacctgtgtgccttttttgtaaaacattttcatgtctttaaaatgcctgttgaatacctggagtttagtatcaacttctacacagataagctttcaaagttgacaaacttttttgactctttctggaaaagggaaagaaaatagtcttccttctttcttgggcaatatccttcactttactacagttacttttgcaaacagacagaaaggatacacttctaaccacattttacttccttcccctgttgtccagtccaactccacagtcactcttaaaacttctctctgtttgcctgcctccaacagtacttttaactttttgctgtaaacagaataaaattgaacaaattagggggtagaaaggagcagtggtgtcgttcaccgtgagagtctgcatagaactcagcagtgtgccctgctgtgtcttggaccctgccccccacaggagttgtacagtccctggccctgttccctacctcctctcttcaccccgttaggctgttttcaatgtaatgctgccgtccttctcttgcactgccttctgcgctaacacctccattcctgtttataaccgtgtatttattacttaatgtatataatgtaatgttttgtaagttattaatttatatatctaacattgcctgccaatggtggtgttaaatttgtgtagaaaactctgcctaagagttacgactttttcttgtaatgttttgtattgtgtattatataacccaaacgtcacttagtagagacatatggcccccttggcagagaggacaggggtgggcttttgttcaaagggtctgccctttccctgcctgagttgctacttctgcacaacccctttatgaaccagttttggaaacaatattctcacattagatactaaatggtttatactgagcttttacttttgtatagcttgataggggcagggggcaatgggatgtagtttttacccaggttctatccaaatctatgtgggcatgagttgggttataactggatcctactatcattgtggctttggttcaaaaggaaacactacatttgctcacagatgattcttctgaatgctcccgaactactgactttgaagaggtagcctcctgcctgccattaagcaggaatgtcatgttccagttcattacaaaagaaaacaataaaacaatgtgaatttttataataaaatgtgaactgatgtagcaaattacgcaaatgtgaagcctcttctgataacacttgttaggcctcttactgatgtcagtttcagtttgtaaaatatgtttcatgctttcagttcagcattgtgactcagtaattacagaaaatggcacaaatgtgcatgaccaatgggtttgtatgtctatgaacactgcattgtttcaggtggacattttatcattttcaaatgtttctcacaatgtatgttatagtattattattatatattgtgttcaaatgcattctaaagagacttttatatgaggtgaataaagaaaagcatgattag

SEQ ID NO: 722 - DNA, 2066 bp, Homo sapiens
aggcgcagagggcggcgggagcagaaggactggttgaggatggactccacctctgaaaacggccgcaggaacaccaggtcctcattgatggagtagatcttcctccccacctgcaggccagccacctgggtagggacggcagaggacagacgtgcacaccagttactaagctccttccctcctcaccaaggaagctcaaatgtgttcagcagaagggtgctggcccaagggatccagcaggactgggtgactgcgtgctgtctgtgggcctggcgaagaaagatgaagacctgctgacccgaaccaagattcacaactgcctccttccaaccgctcacatcactggcaaggtcaacctagccgctccggccatgggtatgtcgctccttgcagcccaaagcattcctaattgccacaggggcaagctgggctccagccagcacggcaggtgcatctcccccacccacctgcacacgccccaggcaaagccggaaggccccagggctgaatcctcggccagccacaccctcactctcctaacctatcctcctgtaggctttgcatcagacagcaatgagcttatcttattcaagccactgtgactggttgcagaaaactgagacacctgcttttttcctgtacctccccacaatgtccagcagagggcagtggtggaacacaccaggagcacagccccgggactctgcactcactcccagctactgtagccactgcagacagtgggtcctggactcagtttctccacgtgagcaatgagagaagaggagtcagcgatcattccagaatctcctgggctgggctgcctcaaggagggtgaagagagacaccccgctctgccacctgcacacggtccctgccagctcccccgagggcctcacctcagccagcgagcccctctggacggacttcaccaccacagccttgttcttctcctcgatgtcaaagccatagtcctcctcctggggcaggatctgggggcccagggcagaaggaacccggtcagggagcgaggtgggcctacggccagccccaccgtggcccccacaggaccatgacctcgtcccaggtctagtagggaagtggccagatccaggtgggcgagacagagcaaaacgcaaacagcacctggcagagccagtgctcactctgtgcctgccactggcttaacgaatcacacggatccaaaggtgtccagccaccaagaatgtggagtcagggagtttagggaggagcggtcccaccccagggcaggatggcaggcatgctagaaacaggtctgggggttccccagtgcgggggatacagggaaaggcactcattcagtcaacagacattgattgagatgctgcccatcacacgggccaggcagttctcatgggtgctggagacaccatctagaacaagacaaacaagcccagccctgcttagtgcgggaggccaactataaacaaataaacaaaagaaatacaggatgtgatgcagggagtgtacgtagttggaattaaagcacttaatgggatagggcacggcaagggggcagagaaggtgctatcggagctgaggcctgaacgaaatgaaaaacaaaacttcataaagagtggaggaacatgctccaggcagcagacacagcacgtacaaaggtcctgagggaggccccaaggcactggaggataagaaaagagatcaggaggtcaggcgcaatggctcacgcttgtaatcccagcactttgggaggccgagacgggttgatcgcttgatcccaggagttcaagaccagcctgggcaacatagcaaaaccctgtctttataaaaaatacaaaaattagctgggtgtggtggcgcaggtctgttgtcctagccactggggaggcagaggagaggagagaggagagaggggaggggagaaaggggaagggaggggagagaggggaatggaggggaggggagggaagaaagaaaggggaggagagaaagaaaaggaaggaaggaaggaaggaaggaaggacgggcacgagagagagagagaaagaagaaaagaaaacaag

SEQ ID NO: 723 - DNA, 2960 bp, Homo sapiens
gtaccaggccccagaggcagcggaaagggagactgtggggaactaggagcaacagcaggcatggaccaaagcagtgaaggatgtatgaaaaagattagcagtgtgaatcttgacaaacttataaatgacttctcacagatagaaaagaaaatggtagaaaccaatggaaagaacaatatactggatattcagttggaaaaaagtaattgcctattaaaagtaatgcaagcaaaggaggtctccattaaagaagaatgtgctactcttcataatataataaaagggctacaacagaccattgaatatcaacagaatttgaaaggtgaaaatgaacaactaaaaataagtgctgatcttataaaagagaagttaaagtctcatgaacaggaatataagaataatattgccaaacttgtaagtgaaatgaaaatcaaagaggagggatataagaaagaaataagcaaactttatcaggacatgcagagaaaagttgaattaaatgaagaaaagcacaaagaactaatagagaaaaaggagatggaaatttcagagttaaatgcaaagctaagaagtcaagaaaaagaaaaacaaaatgaaataatcaagctacaactagaatttgatgccaaactagcaagagttcagactaaatcaaaatcatatcaggattctactgttttgccacaaagtatctacagaaggaaacttcagcattttcaagaagaaaaaaacaaggagattgcaattcttcgtaataccattcgcgatttagagcaacgcctttctgttggcaaagattctcaccttaagcgtagacggttttgagcttagcagtaaattcattagttggtatttatttaaaagcaatcgaaagtttcacttctgttttcaatatatgcatacagcctacataacaaacgaagtcagctttaaggtttttattgaatttatttggacaaatccgtactgtatccaattctgtactgcattcttgcttaatagtattaaccataaaggaggtcaggtttatagggtttggtttacctattaaaccatcattgactatggaaatacttactaagcaatatagagacagacaatattatctttccccttatatcttttaagacagccactcaagttttagaagagtatgatacaacattagagaaagaaagatacaaaggctttattcatgtgtgatagtaaaaatcaggatgagtcttagatatacagaagataaatggatatttaaaatagttatatatgcttttttagcaaaatattcacgtgttaagtatttctggatcttaaaatacaaaatccacttattttattagttaaaagtagaagattgaaaagacaaagtaatattgttttgagagataagtaaagaaaaaaatggaaagcatgtctttgttgttcttcctccattctaaactgctaattatccaacagaaacccctaggtcatagtttacgtttctattctcattaaagcaaatagaacactggaaaaagaaaaaaaaagacatattaaccaaaagctgcaatcacctttcagttgctccatcataaaaaatatggtttgagtcaatatttctatgacataaaatttaaaatctggaagccaattcagtagatttctccatgtttgcacaaatctaatttctatttttggttcactaatttggtagtttataaaaatgctggaaatgaaattgtgtctagactaaattggggagtatgtcctattttaaatatttagtttgaaggtcattctcacttttttgcctgattctttcagcgtcaactggcactggcttctgtgggtataagctgctgacttatttgtcaggcagctggaggcaaacgtcactgacaagattcagttatgttctcctctgcccgaagtccctgtcagctacataaagatgggaggttttctttacactgtcaggtgattgcagaccctgttttttcaaatatcagatgtcgacaatggcagcatcagctcctaggagccaactctgaatctgtgggcaatttacagagtaattgatttatacatctctttcgacagagcttcttttgtaaatcttgtaaatcttcacttgctggcatatctcggttctctgggtgaccctgcctatgctgacccttgtgcttatggtggtgatgaaggcctggaggagcaggatgagtaggagcatttggtgctcctggttgctgattctctgaaagctcactgctgccaaggtgctgatgtccatgattgtgatgatgctcatgatggtaatgaggcgatggagtttcaactgttttatccacagtagccaaagatacacgtttacaaaagtcttcatctttgagagtctggaacaaatttataaatcactttttaacaagcttatagagataggaataatgcgtgaaaaatgatttgtagagctaacatgtgaaattccaactagttaattagaatcgagctggctttgtattatattaatgagaaagagtctgatgttagtctcaacacctagacattttattaaaggcttaaaaagaaagccaaaccactgtacttatatttgcagaagcaaatgaagtaaactggcaaaaggaacttggattgcaggaaagtcaaagtaatatcaaatcctaaattcagttgatctgggccgagcatggtggctcatgcctgtaatcccaccactttgggtggccgaggggggcagattacttgggctcaggagtcggagaccagcctgggcaacatggcgagatcctgtctctgcaaaatatacaaaaattagctgggtgtggtgtcagatgcctgtagtcccagctacttgtgaggctgaggtgggaggatcgtttgagcctgcaagatggaggttgcagtgagctcagatggtgccactgcactccagcctgggtgacagagtcagaccctatctc

SEQ ID NO: 724 - DNA, 2458 bp, Homo sapiens
taacgaacagcaaatgctattgttaccatgcccattttgcagatggagaaaccaagagcacagaggtgttgtcacttctccaaggtcaaacagtcactaagtgcagaagctcagattcaaacacaggtatctggctctagcacttactgtattgtcttgccagtctcatccaatcgaaatcacttctccagtactagtttttatttgtttgttttttatgagacaggctctcactctgtcagctgggctggagtgaggtggtgcgatcactgctcactgcagtctccacctcccagattcgagcaattctcctgcctcagccttccacatagttggaactacacgtccacaccatcataccaggctaattttctttcatttgttgtagagattgggtctcactatgttgcccaggctggtctcaaactcctgggctcaagcgatcctcccaccttggcctcccaaagtgctgggattacacgtgtaaaccaccgtgcctggccctccaatattagtttactttttaatcaaaagttaacacaataagaaaaataatacaattaaaacatcaaaagttaaaattaaactaatcattacagacctgtaatcactgtacaatttggaagccaaaacatcactgacaatttgaacgaagtccatctattttcttcctatttttattttgtttttgtttttattttttatgttcttgtggagactgggccttgctatgttgccaaggctagtctggaactcctgggctcaagcggtcctctcacctcagcctcccaaagtgctgagattacaggtgtgagccacggtgccaggcctttctccttatttttggtttattagtgaccatcccagttctccagccctgacgctgccagccctgttacttcagatctccatgccccaccttgccttcggttttgtttttcttcatcttggcttccctaatttcacattgcctgctgttccaactccatattcttcaataaaaatatgtctcaccaaggccttcaaagaaaattgaagacaagcatttcctgcactccctcctgcctcctccacccacaatgttgtggtcaaccgcctctaagactgatgttatcttctgcttctcctagtgacctctggagtttcaaataaccttagtctgttgctgtttcttgctagatttgtttgtttgtttgtttgtttgtttgtttgagacggagtctcgctctgttttaacccaggctggagtgcagtggcgcagtctcggctcactgcaacctctgcctcccaggttcgagcgattctcctgcctcagtctcccgagtggcgggcgcctgtggtcccagctgctcgggaggctgaggcaggagaatcgcttgaaaccacaaggcggaggttgcagtgaaccgagattgtgccactgcactacagcctgggcaaaagagcgaaactccgtctcagaaaaaagaaaataggggccggatgtggtggctcatgcctgtaatctcagaactttgggaggccaaggtaggaggatcacttgagtccaggagttcagcctgggcaataagcaagaccccgtctatacaaaattaaaaaaaaaaaaattagctgcggctgggcgcggtggctcatgcctgtaatcccagcacttttgggggcctagacgggcggatcacgaggtcgggagatcgagaccatcctggctaacacggtgaagccccatctctactaaaaaatgcaaaaaaaaaattggccgggcatggtggcgggcgcctgtggtcccagctactcgggaggctgaggtgggcgaattgctcgggccagggaggtggaggttgcagtgggccgagatggcgccactgcactccagcgtgggagagacagagcgagactgcgtctccaaaaaaaaaaaaaaaagcagctgggcatggtggcacgtgcctgtagtcccagctgcttgggaggctgaggcaggaggattgcttgagcctgggaagttgaggccgcagtgagctatgatcatgctgctgcactccagcctagggaacagaactctggcactaaaaaaagaaaagaaaagaaaagaaaataggcttacaataaaaagcaatcttgacctaccccaaaatcccactcccttgaagacaaccacttctgccctgttgcttctctcagtaatactccttttctgcagttatctcttgacttcctgccatgtgtgtttgggggagcttgagggaagagggtgtccctgtctcattgagagaggtgccaccctgccgtgaaaagaggtgccaccctctgtcaattaggagaggagggatgagagaggaaaggggtctccagtgtatttctccagccggggccttaaatccctcttgggagatatgggatggggtggatcggaaaataaatttttttaaatccctaccaaaataaaagctcctaaaaaatc

SEQ ID NO: 725 - DNA, 2367 bp, Homo sapiens
aagatacatatatatctggtcttcatcttgtttcctgccccagaactcctaacacccttggaacctacagaatggtaagagtatcttctgtatgctaatgagataaatgatgactaagggcccctacctagccctaggttgggggctaaaagaccatggcaagattagaggattgggactttccatccaacccactagcctccagagagaggagacacactgaaggttgagttgatcactaatagccaatgatgtaatcagtcatgcctacataacaaagcttccataaaaacccagaaagacaaggttcagagagcttccaggtagctgaacacatggaggttcctagagggtgcccagagagggcatggaagccccatgccacttcccacatgcttactctatgcatctcttcatctggctcttcatctgtatcctttgtaatatccttcataataaatgaaatgggcaaacataagtggagtgtttccctgagttctgtgagccactctggcaaagtaatggaactcgaagaggtggtctcaggaacttccgatttacagcctgtaagaagtacaagtgacatacttgtaactggcatctgaagtagggggcagtctgtggaactgagccctcaacctgtgggacctgacactatcaactaagtgataatcagtttagttgtctgttatgtatgcttgcaattttttttttctctgttattatccttgcaactcaacttatgtatgtgaatgagatgaatggtgactaaggccccctccctacccttaggttgggggctaaaagatagtgtcagatcttagctatgttcagataaaatgaccattgccttgaaactctgcttatctttactaacattaagtgttttgttgttacttacattactgcaactgctaggctcctcagaaatcttttgcaaagctaaatgatacttcagaaccatccatgccttcagcaatgaaaaaaataacgttgtaactcaaaagtctaacaaactacaacagactgggtaatttataaagaacagaaacttatttggctgactgttcatggcagagggcagagagagagagagagaagagggggagagagagaagagggagagagagagagaagagggagagagagagaaagggaaagagggctgacctcatcctgtaaaaaaaacccactcccatgataatggccttaattcactaatgagggcagagccctcctgacctcatccccccttaaatatcacacctcttaacactgttgcactgaggattaactttccaacccatgagctttggaggagacactcaaaccatagccatggttttttaaaaaaacaaaaaacgaaagagcttaccaaaccttcaagctttcatctgtattttaaactagcatgagtgaatagaacttaagaatgaacttttttttttttgagatggagtttcactcttgttgcccagagctggagtgcagtggcgcggtctcagctagcagcaacctctgcctccagggttcaagcgattctcctgcctcggcctcccgagtggctgggattgcaggcgtgcgccaccacgcttggctacgttttttttatttttagtagaggcggggtttctccgtgttggtcaggctggtctcgaactccagacctcaggtgatccgcccgccttggcctcccagagtgctggcattgcaggcatgagccaccgcatccagcaagaatgaacatttaaaaacaactgcaggccaggcacagtggctcacacctgtaatcccagcactctgggaagccaaggcaggagcccagttactacaatacatcacattaacagaatgaagaccacatgatcaactcaaaatggacgcagaaaaagcatttgacaaaaatcacactttcattataaaagcattcaacaaactaggaatagaaggaaactacctcaacataataaaagccatatatgaaaagcccacaactatcatgttaacatcaccacacttaaagactgacagcttttctcctaagatcagatacaagggaaagatgcccactctttccacttctgttcaacacagtactggaagtcctcaccagagaaattacacaagaaaaaataacatatccaaattggaaaggaagaagtataattatctctattcatagatgatatgtcatatatagaaaactctaaagaaaaacaacaacaaaaacctgttacaactcataaatgacttcagcaaaattatgggatacaaaataaacatgcaaaaatcagctgcatttgcatgtactagcaaaggctaagctaaatagaaaattaagaaaagaatccatttataatagcatct

SEQ ID NO: 726 - DNA, 2182 bp, Homo sapiens
gtcgacctcaccaggcccagctcatgcttctttgcagcctctccaggcccagctcctgcatcttggtggcccctccaggcccagcctctgcctcccgtcagcctctacagtcccaacgtctgcctcacagcagattcttcacgcccagcatctacctcactgtggaccccccaagccaagctcccaacctttcagcagcttctacacacccagctcccgcctgccagtggcctcttcaggcccatggggctcattcctgacaacggcctttccaggcccagtttttcccttccggcggcctctccgggcccagaacctcctcaagtcagcctctccagacccacttgcaccctccgggcgttctctccgggcccagctcttcttcctggttgggtctccaggcccgattcctgcctctcaacaacctctttggactcagtgcctacccatctcctggcggccttggtcggcccacagcttcctcaagccaagctccccaggcccaggtcaggcctcacggtggcctctccaggatgagctcctgccctccgatggcatctccaggccccaaatggtctccggtcggtgggctcctccacgccaaggttgggcctcccggcgactgccgcaggcccaagttgtcctgaagtcgggctctcccggccctgcctcccagcaagtaagcaagctcttttggctcaactcctgcccagctcccaaccgcctttgtaggccccgaactttctccagccaagctctgagggcccacctcctgcctcctggtggcctgtacagttctagcactggttggagaacagcctctgcaggccccgcccttgcctcccaggggcctctccaggcccagctcttgcccccacggcggcctcccggggccaggtccctgctgggaggtaggcggggacttgggcctgggaggtcgcggtggggcgagagctgggcctggagactcccctgggaggcaacagcggggtctgcagacgcccttctccagccggagctgggactgttcagtcactgggagaagggatgtgggtctgaagagcttggttgcagaaacttcggggtctacaaacgcaggcgggagctgagccaaaagagcttgtttgctgggaggtgggagatgcagccaggaggaacagctgggcaatgcgggaggcagaggccaggcctcctcaagttggcctctcagacccacttgcagcctcccggcgccccctccgggcccagctcttcctcccggctgcatctccaggccggactctggcccgactccaggtcccaacaacgtctttggactcagctcctgcccagctcccagcggccctggtaggcccacaacttccctaagccaagctccccaggcccagctcaggcctcgcggtggcctctccaggctcagctcctggccctccgatgacatctgcaggccccaaatggcctccggtcggtgggctcctctaggcccagcttgggcctcccggcggcctccgcaggcccaaatcgtcccgaagtcagtctctccaggcttagctccagcctcccggcggcctctgcaggcccaagtcgtcctcaagtcggcctggaagtgggcctggaagagcagcaagtcggcctccctgggcccagctccgtcctctcgacggcctctccaggtgcaaaacttcctcgagtcagcctctccaggcccagctcctcctgcctcccagtggcctctttcagcccagcccagctcatggctctcggcggccttcgcaggccctgcttttgacttttggcagcctcttcaggcgcagaacttgatctccagtcggcctttgcaggcccggcctcctgcctctcgaaggcctgcacgggcccggcctcggcctcggcctcacagcggactctccacgcccagctagctctcgcctcactgcggcctccccagtccaaagctcctgcctttcggccacttcggcaggtccagctcctgcctgccagtggcctctttaggcccagctcattcctcacgtcggccattccaggccccgtttttcccttccggcagcctcttggcctctaatttgtttatcttttgtgtataaatcccaaaatattgaattttggaatctttccaccattatgtaaaaaaaaaaaaaaaaaaaaaaaaaaaaaaaaaaag

SEQ ID NO: 727 - DNA, 3516 bp, Homo sapiens
aatctctactcggcccgcaccagcagcgctggcgtcagggcgcggtgggggcaagacgggtgactggcagcagggcggtgccgggccgagaagggcgcctcacctggcgcctcctgccttcctttccacctcaggttgcagagagccgccagggcaggtggaagggccacgccccgctcccgtgagggtcaccgagagacgttgggggtggggcagggaccccaaccctagaccagtcctgtagggcacaatgtctgaacaagagcgtatacaggaatgtctgcggaaggaaataaggtcacttctcatttccaccaaagatggtttgagcccacaggagttggagaaggagtaccttttgatggttggcaaccatctaccactccgaatccttgggtatcggtccactatggagctggtattggacatgcctgatgttgttcgtgtctgccccggtgcaggtggtactgtaatactgaaagccattccagatgaatctaccaaaggaatagcaagcttagttgcaaaacagaggagcagccataagcttcgaaactcaatgcataagggaagacctagtatttattctggaccgagatctcatcggcgagtaccttaccgaggaagggttgcccctattcttccagctgttgtgaagagtgagttgaaggacctgttggcgttatctcctgttcttctttctgattttgaaaaggcatttgccaaaagatttggacgatcattccaatacatgcaatatggatttctctctatgtttgaagtgcttaatgcggcttcagatgtcatttctgtagagcagaccagagcaggttctttgttgatgctaaagaagagtgtaacagaggaaaagccgagaggatgtccagcaggtaaaatttttacccagccatttagaatgaaacaagggtcatactccacaggctttccggtagcaaagccatgcttttcacaacccacttcaaacatggaaccaccgaagcaaataatgagcatggaaaagacttccaagttaaatgtagtggagacttcaagactgaatcacactgaaaaattaaaccagctggagaacacattcaaatcagttattgcacagattggacctggaggaactatcagttcagaactaaaacataagataaaatttgttgtatctaagttcccagagggtttgtttatttctaaactgcttggagagtatgaggtaatttttaaagagcaactatcaccaaaaaaattaggcttcttaaatgtgacagaacttgttggagctcttagtgacattctccatgttgagttcaggaaaggacaccaagacttactagtgtttgatgcggataagaagcctctaccacctgttcagtcagataagaaaatagaagccaaagcttgtgtctccagtccacctagaaattcattgtctactgctgctgtcaaagagactgtatggaattgcccttcaaaaaaacaaaaagagccacaacagaagatttgcaagaagcctaatctggtggtaaagcctttacagctgcaagtagaaacaaacaaatcagagctcaacttggcaatggcaaatcatgacatcccgccagatgctgtgccgaacaagaaattatgcagactcccaccattagacaccagttccctcataggggtctttgtggagtatatcatctctcctagtcaattctacatccggatctatagcagggattcgtcagagttactcgaagacatgatgattgaaatgcggcgctgttattctaatcagctggtttctgatcgatatgtcatgccagaatgttttattcagccgggacatctctgttgtgtaaggatttctgaggataagtggtggtatcgggtcattatccatcgagtccttgagaaacaggaagttgaagtgttctacccagactttggaaatattggaattgttcagaagtcctccctgaggttcctcaagtgctgctacacaaagcttccagctcaggctatcccttgttctttggcttgggtgagaccagtagaggaacactggacatcgaaagctattttgcagttccagaagttgtgcggtttgaagccattagtgggggtagtggatgaatatgtagatggaatccttaacatttttttgtgtgacacatcctcaaacgaagatgtctatttccatcatgtcttgagaacagagggccatgctattgtatgccgagaaaatatctcttctaagggtttcagtgagctcaaccctttagctttatacacgacatccagtggagggccagaggacattgtcttgacagaactgggttatccttcccagcagcactattttaatgaagaccgaaagataagtccacagtcaaaagagagtgagttacgtatcttggatgagatccccactggaatgccatgcctggagtcagtgaccataggtgatgatatttgggatgagaactggttacctctacaggctaagatgggaaaaggaggtgatgctgcctcccatctatttactgcaagccttggtggaaagaatcagtattcatcatgtaaagaaatgccacagaaggactggtgtttttctacccctaaagatacatgggatgattcttggcagccttcaggccttgtaaatggaacgaaagtagaagtccataagccagaagtactgggtgctcaggaaaaaaatactggcacaaacaggactcaaaagcaactagacataaatggttcttcagattcttccacactgcccaaattggaagaattctgtacctctcttacccagtcagagcagtcagcagacgggagccagtctgaacccaacaacagtcagactcagccaaagcaaattcagctttccacagcagcaccctgttcaacaactgcagtggatgattccgcagaaaagccctctggttctgtggaaagctcaccagagatcctaaagaatgaagatttttctagcagccgtgctattacattgtacaaagacaagcgtcaagaatctgtagaccagctgtctttgattttgtcttatgagtgccagatttctcagaagctctacattcctcgaagtacagccactgctgccttaggtgctgccgcacggttagctacatccaggagcctcctacactggtaccccagtgtgaaaaggatggaagcatgagggagggagggaggagggagaaaaacagaatccagccgcttaggctttgatgaactcccaggccaaaatgaggagttattgaagcaaaatagtatcttgatcattgatacttttgtctttctgtgactatatgttagctttattatgctaacagtctactttgatgtgtaagtaagtattgatatttactgttaatcttgatttttcttgattttattctgtgtcattttgttcacctttgtttttaatgtagtttaaaggaatttgtttttttgtgtttgtttttcttgtacattatcatgactgataaatgaaaattg

SEQ ID NO: 728 - DNA, 2926 bp, Homo sapiens
caacagggcacaagagttccaatttctccacatccttgctagcactttattttctgttttgttttgtttttcctgatagtagctctcttagtggttgtgaggggatagtggggtgatatctcattatggttttgatttgcatttccctgatgattagtgatgttgagcatcttttcatgtgcttgttggccatttgtatatcatctttggacttgaaatgtctatttaagtcttttgtccattatatttatttattttttttgagatggagtcttcctgttacccaggctggagtgcagtggcatgatctctgctcactgcaacctccacctcctgggttcaagcaattctcctgcctcagcctcccaaatagctgggactacaggtgtgtgtcaccacaccaggctaattttttttctatttttagtagacacagagtttcaccattgtggccaggctggtctcgaactcctgacctcaagtgatctgccctcttcagcctcccaaagtgctgggattacaggcatgagccacggtgcccagccagtcttctgtccattttaacgttgagttatttgttttattgttgagatttactgatttttaaaacttggtcaccaattaagatttttttaaaaaaccagtacctggaacaagcagaacaagtctctgctggccttggctcatgttgctgttctcagttcccctgggatgtttgcttccagggaggcctgggcactcctgactttggtgacagccctgcttgctctctctctgttacctgtaggtttccccttccacattcactgcctccgggcaggcactgttgtgttttaggcatttcagtatcccagtggggtactggataagtgcttagttagcacctgccggtgagtaaataatcaggtcctgtggtctctgagggtttgacacatcaggtctttgatcttgaccttgaactctcctagccatgcctgcctgaagcccaaccgtggagcccaggctgaggctgaaatctgcagaactggccccaagtgagtctctccttagggctcctgattatgatagttcattttttttttttttttttttaacaaatttgattagctgtcctcaaattaactcataggagatgctccccagaactaaactagctctgcaacagctcaacagactttccgcaggttctgcagctctttccactcaagcttcagagaaaagtgaaggaatattgtagattgggttcaaaatccccatcgcgtcttgggaaaggcagtagagccagcagccagccaccttttgttctctagggaatggaatagtccaaggctgtgtttgtgttctgcttctctacatctgacccacgggtcttccagaggctgcatttgggtcagggacctgggttctatcttgcctctgatgcagaccacactctctgagtctcattattccccctaaatgatctctaagattatttttagatttaaaaaaaaaaacaaactctttgcatatctttggaaagtcagttgtttgaggtctgttaggctttaatcacttttgttttaaatgtgccgaggtggtttctaggcctgcttttcacaggtattctgtcccttgtcagttcttcccacccagttctttttgtttgtttgtttgtttgttttgagatggagtctcgttctgttgcccaggctggagtgcagtgccgtgatcttggcttactgcaacctccacctcccgggttcaagcgattctcctgcctcagcctcctcggtagctgggattataggcacgtgccaccacgcctaatttttctatttttagtagagatggggtttcaccatgttggccaggctggtcttgaactccttaccttgagtgatccacctgcctcagcctcccgaagtgctaggattacaggcatgagccattacacccagccccaacccagtgttttcaaataaacattctcttcccttcacctgatttgctgtgtctaatctagagtggagctgaagacacatcaccacctctctaaggactgtgtgtaacacaagagtaattgggctgtaagtgaggctgaggagtgctgctttgaggaaagggcacagctctcagctgagctggtgagatttccctgtgactgaagttttattagatcttgttccctgctctgcatttgctgcttcttcccaggctgtgggcagaggagcaggctggtgccccggtgcccctatctgctgcaggctgaggttcaacaagccttgtccaaggcagctgtactgattcattgttaggtggccagttcctgagttttctttgaaattcacttcccagactgttgggttttcctgcgagtcagactctccttcagtagcgtcccctgccccctaccctccactggtctccctggacctctgatcagcccctcattgagtcctttgatgcttctctggtaggactgacccacctgcgtcggctgggatcaagggttctgagttccattcgcaggtgctgtaagcctgtccttcctgttgaatagggtcagagtcctcgtgactctgctgttttcaagctctgtaaccttgggcagtaagctgttaacctctctgagcctcagtttcccacacttaaaatggagataatggccaggcgtggctcgcgcctgtaatcccagcgctttgggaggccgaagtgggtggatcacctgaggctaggagttcgagaccagcctggccggcatggcggaaccccgtctctactaaaaatacaagaattggccgggcctggtggcgtgtgcctgtggtcccagctactcaggaagctgggacagcagagtcgcttgagcccgggaggcggaggttgcagtgagccgagatcgcgccattgcattccagcctgggtgacagaccaaagactctgtctc

SEQ ID NO: 729 - DNA, 2142 bp, Homo sapiens
agatcctggtggaggacttcgacctgcacggggcgctgcaggacgacgcgctggctctgctcaccgacgggctgtggggccgcgccgacctggcgcccgcgctacgcggcctggctcgcgccttcgagcttctggagctcgccgcggtgcacctgtacctgctgccctggaggaaggagttcaccaccatcaagaccttctctgggggctacgtgcacgtgctgaagggtgtgctctcagacgacctcctcctgaagagcttccagaagatgggctacgtacgcagagacagccatcggctcatggtgaccgccctgccccccgcctgccagctggtgcaggtggccctgggctgctttgccctccggctggagtgtgagatcctgggtgaggtgctggcccagctgggcaccagtgtgctgccagctgaggagctgctgcaggcacggcgtgccagcggggacgtggcctcctgtgtggcctggctgcagcagcggctggcccaggatgaggagccgccacccctgcccccccgaggctcccctgctgcttacagggccccactggacttataccgggacttgcaggaagacgaggggtcggaggacgccagcctgtatggggagccgtcaccaggccctgactcgcccccggcggagctggcctacaggccaccactctgggagcagagtgccaaactgtggggcactgggggccgggcctgggagcccccagctgaggagctgccgcaggccagcagcccaccatatggggccttggaggaggggctggaacctgaaccttccgccttctccttcctctctctgcgccgtgagctgagtaggcctggggacctggccacccctgaaagctctgcagcggccagcccgaggcgtattcgggcagagggggtaccagcctcagcctataggtctgtctcggagcccccaggctaccaggcacacagctgcctgtcccctggcgccctgcccaccctctgctgcgacacctgtcgccagctgcatgctgcccactgtgcagccctgcccgcctgccgtccaggccactcgctgcgtgtgctgcttggcgacgcccagcggcgcttgtggctacagcgtgcacagatggacactctgctctacaacagccccggggcccggccctagaccagctgggccccaggtcaagggctcttgggagacagctcccgtggtgcttctctttgctggggaggggtctgggcctctggttgccttgtccctgggggagtcctgggcacagcagggggttggagagtccaggccaacccttgctggaggtgggactctctgtatatggaaggctccaagggcagcaggcctaagccggccagcaggagcctttccacatttccccaccctcggaacccagacgcatgcccacatgtgctgggtagaggggtccagcctgttccagccagtgcctgaacctgtccctgagaaggaccctgtgccccaaggcccgtggctcctggcctgctccctgcagtacggagtacggggctcaggacttgggggtcctccacgtgtcccagggattctccacacgagtgtcctcaagggcctgttggtgacaccgagctccccccaccccaagctctgctggagccaatctgcggggctctgccgggtgcacggctgacctggcttcggggacgccggccctccccttgggtgtcacagcagctgggcccacagacaggaaatgacctgacctcaaaccagatgtggaggtgcacgagaggcgcaggaacgggcagtggctgacagctgggaaggccctgagcgtcactgctgctgggcggaagggcctgtggacagcccacccaggcggcggggtcttggtgggtccagtggtaatggtgcccctcccctccattccctgtgggtgcagcccacaggctggcgaggaggtgcctctgccctaccctcgggtctggcgagggagggggcagggtgcatccactgtgacagcccctctgggcccacaactccctgaccctggaagctgagcctgctttcctgaccctccgccccaccccctcctccccagaacactcagagggacggtcaacatcagagcacattaaacgctggtgaaacc

SEQ ID NO: 730 - DNA, 1515 bp, Homo sapiens
aattgcctcaatcagcagtcattctccccagccgtcactcagagcctggacggtgggtcccgcgatctagcccttggctacgcaggaacggtgcgcccccgggtacggcgcggttcagcaggcaggcgtcaggttctaccaaggcgctgaaatgagcccatcagcgggtaggagcccttcccccgccgtcccctccccaggctcgtgaacggcgcctgatgcccgcccggggcgcgagctctcgaggtcgcagtgacctcagcacctgcttggaggaaaacggcgcgggaaccccgcttccttcccctcagctggagccagacctcaaacaaaaccccaatcgatgcacacagaaaactcctctgggccacgcttcccgcctcgccgaggtctccccagtctgcccctcgctgacgctggcgcgcagcggctgtggcagcacccgggacagcggccgcccgcacttcccgcctctgactcgcccgaggacgcgctggcacgcctcccaccccctcactctgactccagctggcgtgcatggtctgcctcgcatcctcacgactcagctccctccctctctcgtgtttttttcctccgccgccccctcattcatccccactgggctccctttccctcaaatgctctggggctctccgcgctttcctgagtccgggctccaaggacccttaggtagtcccggtctcttttaaagctccccggcttccaaagggttgccacgtccctaaaccctgtctccagctcgcatacacacacgcacagacacgcacgttttctgttcctgcgtgacacccgccctcgccgctcggccccgccggtccccgcgcggtgccctcctcccgccacacgggcacgcacgcgcgcgcagggccaagcccgaggcagctcgcccgcagctcgcactcgcaggcgacctgctccagtctccaaagccgatggcatctccgggctctggcttttggtctttcgggtcggaagatggctctggggattccgagaatcccggcacagcgcgagcctggtgccaagtggctcagaagttcacgggcggcatcggaaacaaactgtgcgccctgctctacggagacgccgagaagccggcggagagcggcgggagccaacccccgcgggccgccgcccggaaggccgcctgcgcctgcgaccagaagccctgcagctgctccaaagtggatgtcaactacgcgtttctccatgcaacagacctgctgccggcgtgtgatggagaaaggcccactttggcgtttctgcaagatgttatgaacattttacttcagtatgtggtgaaaagtttcgatagatcaaccaaagtgattgatttccattatcctaatgagcttctccaagaatataattgggaattggcagaccaaccacaaaatttggaggaaattttgatgcattgccaaacaactctaaaatatgcaattaaaacaggtattgtctcatcgaaaataataaagctcttttttcgtttac

SEQ ID NO: 731 - DNA, 1528 bp, Homo sapiens
gcagcagggccgggcgctgggcgggctgctgcgctgggtgggcgccaggatgggcgagccccgggagtcgctggcccccgccgcccccgcggaccccggcccagcctcgccgcgcgggggcaccgccgtcatcctggacattttccgccgtgcggacaaaaatgatgatgggaagctgtccttggaggaattccagctcttctttgcagatggcgtccttaatgagaaagaactggaggatctctttcacacgattgactctgacaacaccaaccatgtggacaccaaggagctgtgtgattactttgtggaccacatgggtgactatgaggatgtcctggcctccctggagaccttgaatcactctgtcctgaaggccatgggttataccaagaaggtatatgagggtgggagcaacgtggaccagtttgtgacccgcttcctcctgaaggagacggccaatcagatccagtcgctgctgagctcagtggagagtgcggtggaggccatcgaggaacagaccagccagctccgacagaaccacatcaaacccagccacagcgcggcacagacctggtgtggaagccccactcccgcctctgcccccaaccacaagctcatggctatggaacaaggcaagacccttccatctgccacggaggatgcaaaggaagagggtctggaagcccagatcagccgcttggcagagctgattgggaggctggagagcaaagcactgtggttcgacctgcagcagcgcctgtcagatgaagatggcaccaacatgcacctgcagctggtccggcaggagatggccgtgtgccccgagcaactgagcgagtttctggactctctgcgccagtatctgcgggggaccactggcgtgaggaactgcttccacatcactgccgtgaggctctcagatggcttcacctttgtcatctatgagttctgggagacagaggaggcgtggaagaggcacctgcagagccccctgtgtaaggcgttccggcacgtcaaggtggacacactgagccagcctgaggccctctccaggatcttggtgccagctgcttggtgcacggtgggacgggactgacagcctcccagaggcccgtggaggagcccaccagccccttcttcttgtgaaggaaatcccgtttttttctagacagacactttggtgcagaagcttcttttcaatccatcctccacaagaaggtgtttccctgttgttaagtgaaggaggccgcccctgcccccacctgagaaggcagagcagtgtctgtgctgccaggtcctggtgaagcccaaggttgaagggggcggcttcctggagccagcacccctgcctcctggtcctggcctctcccctacccctcacatggccacgcatgacccacactgaccacaccctgccctcttcggtgacattcttctacctagtaggagtcatgcccctgtagtgcccaacctagccaggtagccaccactgtgcccaggcgccaaataaaccctggttgggaag

SEQ ID NO: 732 - DNA, 2638 bp, Homo sapiens
tttgggggagaggacaccacacttctactcaatgaagagaaacattcttgtagtccagaggtcttatttttttaacacctgtgatgccacgagttcatagggaagaggttccagcagctcagctccttcccatcggttctcacaaagcttctctgggtggagcagcctctgctgcttcagttgaacccaggtacctttctcttcggcttctttttctgatcattttccttcacgcgtttcaggaagctctctcggctcttagagtgctccgcgcgtgttcaatacacaagttaattctctcggcaagaatcttgcccttaacttgtttgtttacaacaatgccaacagcgtgctggggaacactgcgacttccagttcagcgatggcaacacttgtggggcttcctttttgaacggcacccattcccttgatgtctgcagtatcacctttcttataggttcgcatatacgtggccagaggaacgactcttttctaaaaggccggagaacgtgtatcggtgcctctcctctttccctttgtgttcatttgggtgcattactggaagatggcggttcccgccgaaaggccacagatggcatttttaaggtgattggttcacatgcagttcagctgcacacaaatgcacgtgctcatcactgactccaggcctagggttaacctcattcaagtcacctaatctctcttttttttttttctgacacagggtctcactgtgtcgcccaggctggagtgcagtggcacaatcacagtagtgagcccctcgctgagccgccctgggagcacccaggtgttggacagatgcaggactgaggctgaagaggctggttctgaaaggcccgtcagctgtgcctttgagtttcgggccagttgggaactgtggaagggctgggcgggggaaccagatcagggcccactctgctattgatggggagcacagggctggagggggctggttggggccagcacagaatggggacgggcagagggttggagagccgccaggaggctgagtccacaggtggggctgggaggggccgaggtgacttggtgtttgcacatgggggaacgacgggtcccggcccagtgggcggtggtgcctgtgggaccctggtcatctgggatggcctggctctcagggcctgaggtagtgaggctgtataggaggggcctctcctgggccagaggcactgtggccccgggactgaaaactcatctttgtttgctcagcactgggcccagtgagcacaggcaggtgagggagtgagggtcccactgttgggaggtgggggaggcgtgtttccagctcctggctgagggctgcacccagcctgctgctaagccaccgaaatgagggtgaagagagcagtcgtggcctgtgagggtcattgcagctgcgcccacgcgccagggtgaggatggaggatggagctaaatgtgggtcaacccctcctttcctggtcattgttacctcgacttctaagtgaggaatcttctggggaaatgacagaggcccccgcagggacactgttcgcggctggccaggtgtgagggggctgctgtgtcagtgggcagcagggacggctctaaagccaggctgggcccagcagtgccccacaggcaggagcccaagaagtccctgcctcgccacgtggtgagacccttgcccacatctgggcggggccagcgctgctgaagactacttttttctgttacaaaaaagtgggatagccgggcgcggtggctcacgcctgtgatcccagcactttgggaggctgaggtgggcagatcacgagtttgggagttcaagaccagcctggccaagatggtgaaaccccgtctctactaaaaatacaaaaatcagcctcctgagtagctgggattacacaggtgtgagccaccgtgcccggctacttttcgtatagtagagacggggtttcgccacgttggccaggctggtctcaaactcctgacctcaagtgatctgccctccttggcctcccacactgctgggatcacaggtgtgagcggcagtgcctggcctggactgttgctggagaggcaggttgtgcaagctcccagttctctgcttcttccttgttttctctccacccttggagacctttttctgctgacaaccctgtgtggatggatgcatccatcaaaccaggctgctattcgctgggtctctcagaacgcccactggagtccccaggccgctcccgttgccttggccaaaagatgagtctcaaactcccatcacctctctctcctcaggatgttcttgagtcgaagaacagcaccatcaaggacctgcagtatgagctggcccaggtctgtaaggcccataacgacctgctgcgcacgtatgaggcaaagctgctggccttcgggatccctctggacaacgtgggcttcaagcccttggaaacagctgtgatcggacagacgctgggccagggccccgcgggactggtgggcaccccgacgtagctgcccccctggggggccacagcccagagaaccagcctaggaacactcgggatgacaccccttatcacaccaaggacagcaagttttttagattttatcatcagcaaatgaaagcttttcacatgtt

SEQ ID NO: 733 - DNA, 1772 bp, Homo sapiens
cagtacgacaaggagttcgagtgtaacaacagcgagagcggctacctgtactgctgcggtacctgctactaccgcttctgctgcaagaagcgccacgagaagctggaccagcgccagtgcaccaactaccagagcccggtgtgggtacagacgcccagcaccaaggtggtgtcgccggggcccgagaacaagtacgacccggagaaggacaagaccaacttcaccgtctacatcacctgcggggtgatcgccttcgtcatcgtggccggcgtcttcgccaaggtctcctacgacaaggcccaccgccctccacgggagatgaacatccacagggctctggctgacatcttaagacaacagggaccaatccccatagcacactgtgaaagagaaactatctcggctatcgatacctctcccaaagagaacacgccggtcagatcgtcctccaaaaaccactacactcctgtgcgtacggccaagcagactccagagaagccacggatgaacaacatcctgacatcagccaccgagccctatgacctctccttctcccgctcgttccagaacttggcccacctgcccccatcctacgagtctgcagtaaagaccaaccccagcaagtattcatctctgaagaggctaaccgacaaggaggctgacgagtattacatgagacggcggcacctgcccgacctggctgcccgcggcaccctccccctcaatgtcatccagatgtcccaacagaagccgttgccaagggaacgaccccgccggcccatccgggccatgtcccaggacagggtcctgtccccggatcggggcctgccagatgagttcagcatgccctacgaccgcatcctgtccgacgagcagctgctctccacggagcgcctgcactcccaggacccgctgctgtccccggagcggacggcctttcccgagcagtcgctgtccagggccatctcgcacacggacgtctttgtgtccacacccgtgctggaccgctaccgcatgagcaagatgcactctcatcccagtgcctccaataactcatacgccaccctgggccagagccagacggcagccaagcgtcatgcctttgcctcacgcagacacaacacggtggagcagctgcactacatcccgggccaccacacctgctacacagccagcaagaccgaagtgaccgtgtgaccggcggggcagggccggggctgctgggcgtggcagagcagagcgggggccgggaggggccaggagcagagcttctagccttgccactctcccttcccttgtcccctctgtaggaagtgggggtgggccacctttgcccaaaaagccatacccccggggacacagccccgatggcctggtccaatacacttagacccaggaccaagagcaatcgctcttgctcctccagaagaatcagtggggagtgaggagggggctaggccccattctcacccccgaccaccttcaccaactccctttccgtcccgcgcctccttctccccatccgggggactcagctgcaggttctgtcagcagagagacccttgcttgactgtggtctgaagctgcctgggtttgaaggggccagcgggtccaatcagtgggctgaccggataggctactcggtctcattcattcatctagaaccgcatcacagaaatctcctagtgcctaaaaactgcctgctcgctctctcagagccagggagctgctgtgtccataagcacaataatgattcttttcttgcctgctgg

SEQ ID NO: 734 - DNA, 2545 bp, Homo sapiens
gtgcgtccggaagtgtctcgcagatagtaaataatctcggaaaggcgagaaagaagctgtctccatcttgtctgtatccgctgctcttgtgacgttgtggagatggggagcgtcctggggctgtgctccatggcgagctggataccatgtttgtgtggaagtgccccgtgtttgctatgccgatgctgtcctagtggaaacaactccactgtaactagattgatctatgcacttttcttgcttgttggagtatgtgtagcttgtgtaatgttgataccaggaatggaagaacaactgaataagattcctggattttgtgagaatgagaaaggtgttgtcccttgtaacattttggttggctataaagctgtatatcgtttgtgctttggtttggctatgttctatcttcttctctctttactaatgatcaaagtgaagagtagcagtgatcctagagctgcagtgcacaatggattttggttctttaaatttgctgcagcaattgcaattattattggggcattcttcattccagaaggaacttttacaactgtgtggttttatgtaggcatggcaggtgccttttgtttcatcctcatacaactagtcttacttattgattttgcacattcatggaatgaatcgtgggttgaaaaaatggaagaagggaactcgagatgttggtatgcagccttgttatcagctacagctctgaattatctgctgtctttagttgctatcgtcctgttctttgtctactacactcatccagccagttgttcagaaaacaaggcgttcatcagtgtcaacatgctcctctgcgttggtgcttctgtaatgtctatactgccaaaaatccaagaatcacaaccaagatctggtttgttacagtcttcagtaattacagtctacacaatgtatttgacatggtcagctatgaccaatgaaccagaaacaaattgcaacccaagtctactaagcataattggctacaatacaacaagcactgtcccaaaggaagggcagtcagtccagtggtggcatgctcaaggaattataggactaattctctttttgttgtgtgtattttattccagcatccgtacttcaaacaatagtcaggttaataaactgactctaacaagtgatgaatctacattaatagaagatggtggagctagaagtgatggatcactggaggatggggacgatgttcaccgagctgtagataatgaaagggatggtgtcacttacagttattccttctttcacttcatgcttttcctggcttcactttatatcatgatgacccttaccaactggtacaggtatgaaccctctcgtgagatgaaaagtcagtggacagctgtctgggtgaaaatctcttccagttggattggcatcgtgctgtatgtttggacactcgtggcaccacttgttcttacaaatcgtgattttgactgagtgagacttctagcatgaaagtcccactttgattattgcttatttgaaaacagtattcccaacttttgtaaagttgtgtatgtttttgcttcccatgtaacttctccagtgttctggcatgaattagattttactgcttgtcattttgttattttcttaccaagtgcattgatatgtgaagtagaatgaattgcagaggaaagttttatgaatatggtgatgagttagtaaaagtggccattattgggcttattctctgctctatagttgtgagatgaagagtaaaaacaaatttgtttgactattttaaaattatattagaccttaagctgttttagcaagcattaaagcaaatgtatggctgccttttgaaatatttgatgtgttgcctggcaggatactgcaaagaacatggtttattttaaaatttataaacaagtcacttaaatgccagttgtctgaaaaatcttataaggttttacccttgatacggaatttacacaggtagggagtgtttagtggacaatagtgtaggttatggatggaggtgtcggtactaaattgaataacgagtaaataatcttacttgggtagagatggcctttgccaacaaagtgaactgttttggttgttttaaactcatgaagtatgggttcagtggaaatgtttggaactctgaaggatttaaacaaggttttgaaaaggataatcatgggttagaaggaagtgtttgaaagtcactttgaaagttagttttgggccagcacggtagctcacccttgtaatctcagcctcccaagtacctgggactacagatctttagataagcactctttcaaccaaatgccaatcagaaaatctttgaatccacctgtgagctggaagccccgctgtgctttgtgttgtcctgccttttcggaccaatgtaaatctcacatgtactgattgatgcctacatctccttaaaacgtataaaatcaagctgtaacccaaccaccttgggcatgtgttctgaggacctcttgaggctgtgtcactggtcatgatccttaaccttggcaacataaacttctaaactgat

SEQ ID NO: 735 - DNA, 822 bp, Homo sapiens
aaggagaccggtggggacggggcggggcgcagccttgcgaagccctaacgcagcgctggggaggggggcggccgaaaggggggcggtggtcgggccgcgcaagcggagatggaatggggcccgggctcagactggtcacggggggaggctgccggcgtggaccgcgggaaggcggggctggggctcggcgggaggccacccccacagccgccccgggaggagcgcgcccagcagctgctggacgcggtggagcagcggcagcggcagctcctggacaccatcgcagcctgcgaggagatgttacggcagctgggccgccggcgcccggagccggctggtggcgggaacgtctcagccaaacctggagcgcccccccagccggctgtctccgccagaggcggctttccaaaggatgctggcgatggagctgcggagccctgaccatccccgagcagaataccctgacttctctccctccccagggccggtggctggactctgaacaactcccttcagtaaaggggccagtcttcactggcagtggctggtacttggctctcagcctggagtggcagctctgctagcagctgggttcactcccacttcatcctggctgaaagcagtgctgtgctttgaaatgcagccaatgaatacccagtctgattacccagatttgggcagaccagcagtgctcgccagagtggtctggcctgctatgggggatccaggtggtgttacatgtccatttcatgttttgggggcttttagccccacaaaacaccttcagtagagccttgattaaaaggaaacctgcagactctc

SEQ ID NO: 736 - DNA, 1809 bp, Homo sapiens
atattttccctttagaaattatcaacaaatttactgattactaagtagaacagaggacttgggagaatacttcataaacaaaagcataggcgttgcctatgttgtaagcacatttagaagtgagatgattttgcttctccatagagtactttttatattttttatatatcaattgaaaaaggcagtgtataggtaataggtaatttctcaagttttaggattttagttattgccaggtctgtttaagatacagatttatagcagtttgcttctagctgcagtttaagatgtttatctttttttttttgagtctgtcgcctaagctggagtgcagtggtgccatcttggctcacttcaacctctgcctcctgggttcaagtgattctccagcctcagcctcccgagtagctgggattacaggcatgcatcaccgcgtccggctgatttttgtatttttagtggacacagtttactatgttggtcaggctgatcttgaattcctgacctcagatgatttgcctgcctcggcctcccagagtgctgggattacaggcgtaagccactgcacctgggcttttttttttttttttttttttttgagacagagtttcattgtcattgaggctggagtgcagtggcgtgatctcagctcactgcagcttccacctcctgggttcaagccattctcttgcctcgggctcccaagtagctgggattaaaggtgtgcaccaccacgccagttaatttttgtatttttagtagagatggggttttaccatgttggccaggctggtctcaaactccagacctcaagtgatcctcctgccttggcctcccaaagtggtgggattataggcatgagccaccacgcccggttaagatgtttatctatagttgtagtaaagatttaaattatttgaagcatagagatttttttttatgttttgttttctaattgtcatggtaggtcatgtcatactaaatacaagataggctatagagttttaatttactgtcattgaacaatttgcattgtttaggaggtactaggatgatcaactgattgaaaaattcatcagtgtgttaatgaattttttcacccctttagatatatgctgaaaacatttagcatgagttgtattttaatacaattttcaatattttttcaaattgagacataaaaactaaggcattttaaatatctgtgctctaataaaaatattttagaaatattcattgatgctgctttttacacaggagaacacaaagttatacctcaatttacttgaaatggaatatagtggtgacctcaaacaaaatgaagaaaatatcctaaattgttttgacaaagctgtacatggttcattacctattaaaatgagaattacattttctcagagaaaagtggaatttcttgaagattttggttccgatgttaataagtaagatattagttatattacctatttgaatgataaatgagcattgatatttttgtatggggatttgatgattagtatagattaatacattgttaaattttaaaatgttcgcttagtttactttttcctcagatatatatgggggtaaattcaattttgtaaatgtatatgtacttaacaggaaggcataaggtttgtctttccttcaaaactgttttcccaattttagaatgacaatttaaaccatgactgaatgagagaaggcaggaaggagcaatcctgtgaaaagggaaatgggataaggattgaaccctgaaacccaaatatttaatatataggtcaataaagatggatgggattaatctcc

SEQ ID NO: 737 - DNA, 2199 bp, Homo sapiens
atatttaaaaagaagatctggaaaatatgtatagcatggtgtatacatataattagcccatataggtacatgaagttcctcaggagactgggaggatgcacagccaggtaaacctgtagagcatggagacattaggtgggaggtgatggaaaagtccctcagttttttttttttttgagacagtctcgctctgttgcccaggctggagtgcagtggcatgatctcagctcactgcaaccttcacttcctgggttcaagcgattctcctacctcaacctaccaagtagctgggattacaggcgcccgccaccacgctcagctaattttggtagttttagtggagatggggtttcaccatgttggccaggctggtcttgaactcctgacctcaagtgatcctccccgccttggcctcccgaagtgctgggattacaggtgtgaaccactgtgcccagaccttcattttgtttgtatacatctgtattcattgaatcttctacaaggtttatttattcatgtatgcctattgttccggttatctattgttgcatgaaaaacaccccaaaacttaatagtgtaaaacagcagcccctttattatgctcacaacttggtggtcagatttcaagcaagacccagaggcacaactcatctcgttccacagtggctggagcttcagctgaggtggctcaaatggctggagaacacttccctgcagcagaacctacaaccatcttcctcccctttctggaaaaggtttgtttctgaggctggagtcagagtcttcaaaccaacagccagagataacattgctaattatgcccctttccttggtctttatttgaaatgaaacggttctgttaccggtagagggtcttgatgcaaattgtccaggttcttggcattttgaacaaagaactggacaaaacgcacagcaaagcgaggtaagaatgaagcagcaaaagcagagatttattgaaagtacatgccacagtgtgggagccggccaagcagcagcttaaacaccccctagaggtttcccattggccacttggtgttcaccccatgtaaatgaaccaacctcagtcagtctgattggttgcaaccaatcagaggctgaagtgaagttacaaagttacactcctgtgcaaacgtctgattgcaaaaagcagccagtcagaggtaccttcaatttcccatctgcccctcagaaaaggtgggcattggcaaagggagtagcctctggtccttttgttacttatgcgtggaaagttggggtttttctttcgatttagttctaggaagtcaaggtgaactggccttcagttccctgcctccagaccctattctgcctcagttcaaatacacaaaacctaacaaatacctatatgaccaccttccacaactaatcaatggcagtgtctattagtttgactttgtttctattttacaagaagcaaaagcacctctggactctccactagagagctatgtgcagccactccagcatggtgctctcagggtaaccagacttcttacactagctccaagtgcaagttctcctagcaaacaagatagaggttgcaaggccttttatgacctcaccctggaggtcacaccacatctgtatttcattgtatttcattggtagcagtcacaagctgcccagatacaaggcagagggacagatgccccacttcttgatgggatgagtggcaaaaaaaaatctgtgaccatgtttaaaacccagaagatttggctgttagagatttgtgaagtttttaaaagttaagaattattaaaacaaaaataaaacccaggagacaaggtagtggaagtgtgtccctcccattcactgaccaaggtgaggggactctagtcctttgctgctgaccttcagcctcccttcctcttaaaaagaggtcctagttggggagcgatggctgaagagttaccataaaataccaagtaggagcgaggtgcggtggctcgcgtctttaatcccagcggtttgggaggacaaggtgggaggatcgcatgagcccaggagttcaagacaaacctgggcaacatggcaaggctctgtctctgcaaaaaaggaaaagagtacaaagtagggccatttagtatggtttcatctttattaaaagtcttaagttttagatttttgaagttatcaccaataaaatatccagttgtg

SEQ ID NO: 738 - DNA, 1823 bp, Homo sapiens
atcacttccaacagtgacgtgttctccaaataccagctcgacaaagatggggttgtcctctttaagaagtttgatgaaggccggaacaactttgaaggggaggtcaccaaggagaacctgctggactttatcaaacacaaccagctgccccttgtcatcgagttcaccgagcagacagccccgaagatttttggaggtgaaatcaagactcacatcctgctgttcttgcccaagagtgtgtctgactatgacggcaaactgagcaacttcaaaacagcagccgagagcttcaagggcaagatcctgttcatcttcatcgacagcgaccacaccgacaaccagcgcatcctcgagttctttggcctgaagaaggaagagtgcccggccgtgcgcctcatcaccctggaggaggagatgaccaagtacaagcccgaatcggaggagctgacggcagagaggatcacagagttctgccaccgcttcctggagggcaaaatcaagccccacctgatgagccaggagctgccggaggactgggacaagcagcctgtcaaggtgcttgttgggaagaactttgaagacgtggcttttgatgagaaaaaaaacgtctttgtggagttctatgccccatggtgtggtcactgcaaacagttggctcccatttgggataaactgggagagacgtacaaggaccatgagaacatcgtcatcgccaagatggactcgactgccaacgaggtggaggccgtcaaagtgcacagcttccccacactcaagttctttcctgccagtgccgacaggacggtcattgattacaacggggaacgcacgctggatggttttaagaaattcctggagagcggtggccaggatggggcaggggatgatgacgatctcgaggacctggaagaagcagaggagccagacatggaggaagacgatgatcagaaagctgtgaaagatgaactgtaatacgcaaagccagacccgggcgctgccgagacccctcgggggctgcacacccagcagcagcgcacgcctccgaagcctgcggcctcgcttgaaggagggcgtcgccggaaacccagggaacctctctgaagtgacacctcacccctacacaccgtccgttcacccccgtctcttccttctgcttttcggtttttggaaagggatccatctccaggcagcccaccctggtggggcttgtttcctgaatccatgatgtactttttcatacatgagtctgtccagagtgcttgctaccgtgttcggagtctcgctgcctccctcccgcgggaggtttctcctctttttgaaaattccgtctgtgggatttttagacatttttcgacatcagggtatttgttccaccttggccaggcctcctcggagaagcttgtcccccgtgtgggagggacggagccggactggacatggtcactcagtaccgcctgcagtgtcgccatgactgatcatggctcttgcatttttgggtaaatggagacttccggatcctgtcagggtgtcccccatgcctggaagaggagctggtggctgccagccctggggcccggcacaggcctgggccttccccttccctcaagccagggctcctcctcctgtcgtgggctcattgtgaccactggcctctctacagcacggcctgtggcctgttcaaggcagaaccacgacccttgactcccgggtggggaggtggccaaggatgctggagctgaatcagacgctgacagttcttcaggcatttctatttcacaatcgaattgaacacattggccaaataaagttgaaattttaccacc

SEQ ID NO: 739 - DNA, 1744 bp, Homo sapiens
ctttttcgcaacgggtttgccgccagaacacaggtgtcgtgaaaactacccctaaaagccaaaatgggaaaggaaaagactcatatcaacattgtcgtcattggacacgtagattcgggcaagtccaccactactggccatctgatctataaatgcggtggcatcgacaaaagaaccattgaaaaatttgagaaggaggctgctgagatgggaaagggctccttcaagtatgcctgggtcttggataaactgaaagctgagcgtgaacgtggtatcaccattgatatctccttgtggaaatttgagaccagcaagtactatgtgactatcattgatgccccaggacacagagactttatcaaaaacatgattacagggacatctcaggctgactgtgctgtcctgattgttgctgctggtgttggtgaatttgaagctggtatctccaagaatgggcagacccgagagcatgcccttctggcttacacactgggtgtgaaacaactaattgtcggtgttaacaaaatggattccactgagccaccctacagccagaagagatatgaggaaattgttaaggaagtcagcacttacattaagaaaattggctacaaccccgacacagtagcatttgtgccaatttctggttggaatggtgacaacatgctggagccaagtgctaacatgccttggttcaagggatggaaagtcacccgtaaggatggcaatgccagtggaaccacgctgcttgaggctctggactgcatcctaccaccaactcgtccaactgacaagcccttgcgcctgcctctccaggatgtctacaaaattggtggtattggtactgttcctgttggccgagtggagactggtgttctcaaacccggtatggtggtcacctttgctccagtcaacgttacaacggaagtaaaatctgtcgaaatgcaccatgaagctttgagtgaagctcttcctggggacaatgtgggcttcaatgtcaagaatgtgtctgtcaaggatgttcgtcgtggcaacgttgctggtgacagcaaaaatgacccaccaatggaagcagctggcttcactgctcaggtgattatcctgaaccatccaggccaaataagcgccggctatgcccctgtattggattgccacacggctcacattgcatgcaagtttgctgagctgaaggaaaagattgatcgccgttctggtaaaaagctggaagatggccctaaattcttgaagtctggtgatgctgccattgttgatatggttcctggcaagcccatgtgtgttgagagcttctcagactatccacctttgggtcgctttgctgttcgtgatatgagacagacagttgcggtgggtgtcatcaaagcagtggacaagaaggctgctggagctggcaaggtcaccaagtctgcccagaaagctcagaaggctaaatgaatattatccctaatacctgccaccccactcttaatcagtggtggaagaacggtctcagaactgtttgtttcaattggccatttaagtttagtagtaaaagactggttaatgataacaatgcatcgtaaaaccttcagaaggaaaggagaatgttttgtggaccactttggttttcttttttgcgtgtggcagttttaagttattagtttttaaaatcagtactttttaatggaaacaacttgaccaaaaatttgtcacagaattttgagacccattaaaaaagttaaatgag

SEQ ID NO: 740 - DNA, 2763 bp, Homo sapiens
atccggtcaaagttgctcgtgtgctgccattcccgcatggcccgccacagtccctcctccagcgccatggtgggcttccgccgggccggggatcggagaactgggctgtaaaccagtgcagtcagtcccagtctgtaagcccaccctccatcccgggcccacctggtcccaacacctggctcctgtcctccccacacctgtcctgccatctgtccctgtcctgtcctcccccatgtgggctcctcagcctccaggacacacccccaagatccaacatcaacagaagccactgagtggcctctccgactgcccctcaagtcctcggtgttatgatgttgacaagtgaactcagtgctatgggtggaacatgtgtgtccccaacattcctgtgttgaagccctcagtgccagtgtgtcagtatttggaggcaatcagggttagagcaggtcatgagcgtgggtcccagtcatggaatccgagctctgataagggcaggaggagacaccagggctcttgctctcagccacaagagcacacagccagaggcagctctctccagccaggaagagggccctgaccagacacccaatccgctgtcaccttgatctgggacttctggcctctggaactgggagacatgaatgtgtcttgataaagcacccagtctatgggattcgttacggcagagcctgagctgactgagacaccatgcacacagaatgacctgggagcgagggttaaagtgcaggttcctgggccacaggactgagcatttgaccagcttcctggggactctggagcaaggcagcccctggggacacagcctcagggtcctggagcttgaggagcaggagcacatgtccagaaccaaagcagagcggtgtccaagccactgcaagcagccaggcacagcttcccacattcccacaggagccaaggcaaaggcctgtgagcccggggcggctacactccaagaatcagggtccccagtgcaccgggactccgctccaaggggggatgcaaccagttccagggtgtgggggcagcgagactgttggggaggaagacgggaccgccttcacctacaccccaggcaggggactcccctaggggaacggccagtgtgttgcacggtggatatgctcaagctcctgtttgctcatcagcgggaaacaaagggtcacagaggtgccgtggggtggagagaggcagggactgggaatgaaaccacaaactctcccagatgctgatgttgctgcctcacagtcaccacagtccacggctctgggctgctgggctcgtggtgcactcagagctatcactggagcccgtggctttggggagcactctcctagatggcctagtcctgataatggtagtaatggggacagtaatcctaattgctgtcatgtaatgtgtcatagtatgtgccaggcactgtgctacgtatgtcatatgtgagttcaagtcatctctttgccatcctctgaatgaagcaccattgtccttttttctaggggggattgacggtgaagatgctaatacctgcccagcatcgaccctagtgcgggtcccaagaccatccccctgtgcaggctccaccaccgctgtgctaactggaccgcggcagatgagtgggtgtgtgccaggtttctgctgggccctgcagctcctccccccagccccatgtgatgtgcccctggccattgacactcagttcgagggaaggcactggggtgtacactcaaagacctaaacccagggtgggtgcggtggctcacgtctgcaatcccagcactttgggaggctgaggcgggtggatcacaaggccaggagttcaagaccagcctgcttaacatagtgaaaccccgtctctactaaaaaatacaaaaaaattagccgggcatggtggcgggcacctgtaatcccaggtacttgggaggctgaggcaggagaattgcttgaacccaggaggcagaggttgcggtgagccaagatcgcaccattgcactccagcctgggtgacagtgcgagactccatctcaaacaaacaaacaaaaaagacctaaacccaaaccgtggctcacgtcacaccaagaaccctctctgacctgggtcttctgtaaacatggttgtgaaaattattgaaagtaaaagccgggcacggtgggtcatgcctgcaatcgcagcactttgggaggccgaggcgggagaatcaccagggcaggagattgagagcatcctggctaacatggtgaaaccccgtctctactaaaaatacaaaaaaattagccgggcatggtggcgggcacctgtagtcccagctactcgggagcctgaggcaggagaatgacgtgaacctgggaggtagagcttgcagtgagccgagatcacgccactgctctccaccctgggcgacagagtgagactccatctcaaaaaaaaaaaaaaaaagaaaagaaaagaaaagaaagtaagtattggggcggggcatgatggctcatgcctgtaatctcagcactttgagaggctgaggcgggcagatcaactgatgtcgggagttcaagaccagcctgaccaacatggagaaaccccatctctacgaatacaaaattagccaggcatggtggcacatgcctgtaatcccaactactcaggaagctgaggcagcagaatcacttgaacccaggaggcggaggttgtgatgagctgagatcgcgccattgcactccagcctgggcaacaagagtgaaagtccatctc

SEQ ID NO: 741 - DNA, 1737 bp, Homo sapiens
taggatcccctctgtccacgagaagaagctgaggctctgagcggatgcacaggtcacccatggcaggtgccgtgcagtggtgtcaggaacccgtccgggtcttcacacaaagttctctccagtccatctcgtgggcggctcatgttagagcgacattcaaatggaaggtttggaaaggaatgcctctgtcttgtgaagtaggacatggcagacttggcgacgacaagggtccaggagaactgagacgcaggatggaagacagagaagaccccccggagctcctcgctctgcttggtggcttcaggagtgtggccctccccaggactccacttcatcctgggcttgcaccctccttgagccaatgcactgaactgcctttgaaaggaaattgcatgttctgaccattttaggatacctttactttaaggaccacacagtcccagaggacacatccctcgggaactctgcccctctgacaatgagggccacagagaaggtggtgtttccatggtagatgctcctgttctggtgataccaaacctgcccacccctctgagtcgtctttgctcatggacttgcagcagagccacgtagtttggcattttgattcagaaagtggggagcagagacccagccaaatccaaacttttttttggttttgttttgttttgttttttacaagatataacataacccaggaaacagacccagctgaggttattctcagtggattacagtatacttttgtgtgtgtaaaagcacaaagtgcatgtgtactcacttctggccatataacatttacacagggaaatggatcattgatttttctttaatcaacgtgaatgaagaatgtttgtttatatatcactataaaatccagttgacctggacagtattatatgtacatatctattctaattaaatttaacaatcaaaggattggattacttttttcccccttgtaaagaggttcgtgaatgtggtcaattgtatagatagcgtgttaaagccaaaacccagctctgagggccttacccattacttggatatttgctacgatccatctccctttgtgagtcaaatgttaagagaagaaacttgtatttgcagctagaggttactgtcacatcatagatttaacatttaccatcttcaaagtacaaatcttacatgtccttcaaaaggaggtcttaatacagttcctagttccttacttctgttttaaactttgggtaccaaaccaaaaagaaaaaaaaagaaaggaaaagatcttctttgaagaaaagtatgtctctggatccctggaaaataatgatgtccaaagcaaattgtgaagatcaaatgtgtgttaagaaaaggtgtcgaggggagggacaaaaccagaaacggtggaaggaccagtgtaatagtcacagacttgcatcctggctctgcttacatttcctggtactctcgaatgtacgggcgttcacatagtcattgtgaagttgttggggtttttttggttttgtttttaatttagctcttctctgaggacgaagctgttggtggtggtggtggtgggggtggtggtgtgggatacatggtggtcaagttgtcagccctgatcagtttggactctgtaactcataggtgcattctttttttctttggtgtctcacaaattacccaattgttgaataaaactataaatatgttaataccagctttttccaataaaataacaaatgttacatc

SEQ ID NO: 742 - DNA, 1443 bp, Homo sapiens
gcgctcacaatggagctctcggagtctgtgcagaaaggcttccagatgctggcggatccccgctccttcgactccaacgccttcacgcttctcctccgggcggcattccagagtctgctggacgcccaggcggacgaggccgtgttagatcatccagacttgaaacatatcgacccagtggttttaaaacattgtcatgcagcagctgcaacttacatactagaggcaggaaagcaccgagctgacaagtcaactctaagcacttatctagaagactgtaaatttgacagagagcgaatagaactgttttgcacggaatatcaggttacttactttaaaatttttaattaacagtactatttttcttttactttgtttgtaaagatgtttttttttctttctttcttgctttcttttttctctccagaataataagaattccctagaaatcctactgggaaggtaggtactgtataaggtgtcaagctgaggcacttttcacttgcaggtatgaatggagagtgttggtgtgaaacaagatcttcgggatcttgacccaaagaaaaggagccaaagggcatgtcaagcaattgaagttaagctcatgtttttaaagatcgtttattgagatgattttgaaatgctcctttaccattcataatttaaaaataaagtttaacaatggtttaaattcagaatggattaaaatggagttgggggtggaaagtagagccattcttagtaaatataaataactgaaaagttcttctgaggagactatgtacgaagttatcattgcatctttcagtataggcagatctctccctcatataacggatgtttcttggcgcttggaatatcagataaaggtaaagtttaagaaacttctctagcgggggatttagggaacttcttaaaacctagagttaaaagctgttgcgtgtttgttgtgttattttagaccaatcaacttcataggatgtacagacctgcatatttggtgaccttaagtgtacagaacactgattccccatcctatccagagattagttttagttgcagcatggaacaattacaggacttggtggggaaacttaaagatgcttcgaaaagcctggaaagagcaactcagttgtaacttggggaagttaacgatccgcccgagtgcagaggaaaaccagaaacgccttgccttcagctgaaccaccgtttgtgcgagctggatgtccttttcagtagaaaagaattttccttttgaatttataccattcatcaattttgacactttaaaaacgtgtgaaagggttaagagggaaagatactgcccaagtatttgaatcgtttagtagtaactgtccatttatcctattttgatctttttcaagtcttctgaaaggaagtagacagtattacaccctgaataaataaggtgttgttttccac

SEQ ID NO: 743 - DNA, 1765 bp, Homo sapiens
agagcaggatggagaggagacgcatcacctccgctgctcgccgctcctacgtctcctcaggggagatgatggtggggggcctggctcctggccgccgtctgggtcctggcacccgcctctccctggctcgaatgccccctccactcccgacccgggtggatttctccctggctggggcactcaatgctggcttcaaggagacccgggccagtgagcgggcagagatgatggagctcaatgaccgctttgccagctacatcgagaaggttcgcttcctggaacagcaaaacaaggcgctggctgctgagctgaaccagctgcgggccaaggagcccaccaagctggcagacgtctaccaggctgagctgcgagagctgcggctgcggctcgatcaactcaccgccaacagcgcccggctggaggttgagagggacaatctggcacaggacctggccactgtgaggcagaagctccaggatgaaaccaacctgaggctggaagccgagaacaacctggctgcctatagacaggaagcagatgaagccaccctggcccgtctggatctggagaggaagattgagtcgctggaggaggagatccggttcttgaggaagatccacgaggaggaggttcgggaactccaggagcagctggcccgacagcaggtccatgtggagcttgacgtggccaagccagacctcaccgcagccctgaaagagatccgcacgcagtatgaggcaatggcgtccagcaacatgcatgaagccgaagagtggtaccgctccaagtttgcagacctgacagacgctgctgcccgcaacgcggagctgctccgccaggccaagcacgaagccaacgactaccggcgccagttgcagtccttgacctgcgacctggagtctctgcgcggcacgaacgagtccctggagaggcagatgcgcgagcaggaggagcggcacgtgcgggaggcggccagttatcaggaggcgctggcgcggctggaggaagaggggcagagcctcaaggacgagatggcccgccacttgcaggagtaccaggacctgctcaatgtcaagctggccctggacatcgagatcgccacctacaggaagctgctagagggcgaggagaaccggatcaccattcccgtgcagaccttctccaacctgcagattcgagggggcaaaagcaccaaagacggggaaaatcacaaggtcacaagatatctcaaaagcctcacaatacgagttataccaatacaggctcaccagattgtaaatggagtgccgccggctcgcggttagctgcctgcctctcagacacggcgctttgcccagcttgacagggagtgagcctcacccaccccatcctcccaatccccctgagttccctcttcccaggcttcccctaaagggcctggactgcgtcattttcccaggaactgcagtgcccagcccaggacgtggtacagagtaactgtacattaaactggcagagcttgttagtggtaaaggtggtgagtccttgggtgcgcagtggagctgctctggggcctctgagcaagcagcagcctctgtctcacctcttcctgtcactgggagggccccttgggtctcgctgtgcctggacgccaggctctctgctttattctttcatccctgaggctccatcgctcagctcagtgctgactcagttcagaggattcttccctcaggaccgcagctcttgcagtgaataaagttttatgttccctgctcttaatgtt

SEQ ID NO: 744 - DNA, 1650 bp, Homo sapiens
cttgctagtctgggacttcccggtggagtgaggaacccagcaacacgctcctgacttcccttcccaaggactcgacctgagaaccgccatgtactcggagatccagagggagcgggcagacattgggggcctggtggcccggccagaatacagagagtggaatccggagctcatcaagcccaagaagctgctgaaccccgtgaaggcctctcggagtcaccaggagctccaccgggagctgctcatgaaccacagaaggggccttggtgtggacagcaagccagagctgcagcgtgtcctagagcaccgccggcggaaccagctcatcaagaagaagaaggaggagctggaagccaagcggctgcagtgcccctttgagcaggagctgctgagacggcagcagaggctgaaccagctggaaaaaccaccagagaaggaggaggatcacgcccccgagtttattaaagtcagggaaaacctgcggagaattgccacactgaccagcgaagagagagagctgtagggccagctgccgggctcaggccactgcccaccctggcctggacagcctccttcagcccttctgtacctggcagccctgggccccaggccctgggacgtctgtgatgttcccacctgcttctgtggaaatgtgtcaccccagagggcctggctctccctgggaggctggggcccctaagctcctaggttttccttccaagcacccagccctcctgctccaagagggataacctgcacccctccctgcaaggggttcagagcccagcacaggagctttctctggcagaattgaggaggaagaggtggccctctgacttgacaagccttctgttctgcccaggccttcccaccaggaatctccgaggctccccagggccccgcttctccgtacaccccagctcctaggtctcagagaactcccccacctgtggttttacctgcagccagcagagcttagcttcaaggacacctgccttcaaagccactgaggggaggaagggcagggcagactgcaggtggccttgttgctggcatcccggccaggtgggcggggactaacaaagacagctgtttagggtcttctcccctcacccatgctttcatcatcccctccgcacagcctccccgtccaggccttctaaccacacctacccagggctgccgcattcctgcactcagaagtctgcagcggtgcctcacaaacttgattgtgcataaaaatcactggggatcttgttaatacagcttctaactcaatagatctgggagatcctgcatttctaacaagctcccaggtaaggcggaggctgctggtgtgaggaccatgctgtgagcagcagggcgagagtgcccagggctgatatatattggaaatatcacccctgaagccatcgctggcccccacctcctgtggactgatgccccagggattcccaccccacttctgcaaccccaggtatccttcattatccaccccatcccagactcccaccccagggattgcccgtgaagactttggcctagcaaattgtgttggttatgtgagtgttgttttaatcagagatgtacatgattgccaatctgcatttcttaccagtgtgaccacactgttacgatgcaattctagcc

SEQ ID NO: 745 - DNA, 1970 bp, Homo sapiens
gtgagggtactctgccggttttgctgcggaagtcacctcgtggcgtaggggagaggtaacaccgagaagaggcagcggcggtggcgccaagacgattggtgccaaacagggcagaacgcaactcagctctggggtgggttcctgtccagaggggtagagaagagtggctgagggcgcgccctgatctcagcgggaagagtgcgaccccgagggcgcgctagtttgtgaatagcacaatggaagaagctggactttgtgggttaagagagaaagcagatatgttgtgtaactctgaatcacatgatattcttcaacatcaagactcaaattgcagtgccacaagtaataaacatttattggaagatgaagaaggccgtgactttataacaaagaacaggagttgggtgagcccagtgcactgcacacaagagtcaagaagggagcttcctgagcaagaagtagcccctccgtctggtcagcaagctttacaatgcaacaggaacaaagaaaaagtcttagagagacaaggtctttccctgtcacccaggctggggcgcggtggtacattcatgggtcatggcagccttaaactccctgagctcgtgatcctgtctcttcagactctagagtagctggggctacaggcgtacaccaccacacatggctaattttttatttttcttttgttgtagagatgggctgtcattctcttgcccaggctggtcttggtatactgtcctgtagcagtatattttggctacctgtactggcattggcttttccaagtgtcaagattacaggtgtgagctagtataccctgcccagtgtttctttcttacttggctttggtgtgaatgagaaaagaatttagtactaaaattttatgtgcatacagaagcattatttgaagtcagcctgttttccctcaacctctagtactctgtaaagtataccaaaagtcaaggttttaaagaactgtgttacatattagagagaacaaatcaaaagttacctatctccatcgttaccagtagaacattagtatgtattttgaagcaccatttgactctttctatttcagctacttgcttgtcccttgcaaagttattatagtactcttttaaaacttttcttcaagggaagagctattttgacttccttttctttgatctaaacctaacacccagaatatgcttagcagatcatcccaaaacaatcataacttgtttaaattgttcatagcaaaagttacatattataaagagttatgagtgtcttaggcagtgaatagtaactgaatatccttttatagttgtccttcactagcaggaagccttattccctgcccttttacatatcttaacttagaatgttactgtctaaatagtggttaggcaagagtagttcttaaacgtgcagtaattatcttgcactacatttaagggctaaatagctagtagtggtgcttgataattgaagaaatttgtacagctggaggaagtacctgctaaattttcaaaagttacctgaatttaataggtaaatctgtttttaattagagctatatcattttactctgaatgtcttaacatagaagtttacataaaatttacagattggattgatttcagccttcttctggtactttttaaaatcttattaatcattaggaaaagaagttttattattgatgcaagccctaaacactctttcgactccagaggagaagctggcagctctctgtaagaaatatgctgatcttggaaattcacctcttctatagaagagtttgttttgaactatacgatttgaaacaaaattctttttttggagactatggaaacattctcaacagggaaaccctactagactttgtaaagcaaataatggaaaagatacagaactttttgaagaatcatgggaaatttttataattaaataaatgccaaaattctgttttgtgaaacatt

SEQ ID NO: 746 - DNA, 1561 bp, Homo sapiens
atagagtttagtggccagagcgactcttcagggaggtggcaggaaaggcttggaacagctgccggaggtgacggagcggcggccccgcccggtgcgctggaggtcgaagcttccagctctggacatcctgagcccaagtcccccacactcagtgcagtgatgagtgcggaagtgaaggtgacagggcagaaccaggagcaatttctgctcctagccaagtcggccatgggggcagcgctggccacactcatccatcaggtgctggaggcccctggtgtctacgtgtttggagaactgctggacatgcccaatgttagagagctgacgtgcttcgtggctccctggaccagcgcaaccagcggctcgaggttgactacagcatcgggcgggacatccagcgccaggacctcagtgccattgcccgaaccctgcaggaatggtgtgtgggctgtgaggtcgtgctgtcaggcattgaggagcaggtgagccgtgccaaccaacacaaggagcagcagctgggcctgaagcagcagattgagagtgaggttgccaaccttaaaaaaaccattaaagttacgacggcagcagcagccgcagccacatctcaggaccctgagcaacacctgactgagctgagggaaccagctcctggcaccaaccagcgccagcccagcaagaaagcctcaaagggcaaggggctccgagggagcgccaagatttggtccaagtcgaattgaaaggactgtcgtttcctccctggggatgtggggtcccagctgcctgcctgcctcttaggagtcctcagagagccttctgtgcccctggccagctgataatcctaggttcatgacccttcacctcccctaaccccaaacatagatcacaccttctctagggaggaggcaaatgtaggtcatgtttttgttggtactttctgttttttgtgacttcatgtgttccattgctccccgctgccatgctctctcccttgtttccttaagagctcagcatctgtccctgttcattacatgtcattgagtaggtgggtagccctgatgggggtcgctctgtctggagcataacccacaggcgttttttctgccaccccatccctgcatgcctgatccccagttcctataccctacccctgacctattgagcagcctctgaagagccatagggcccccacctttactcacaccctgagaattctgggagccagtctgccatgccaggagtcactggacatgttcatcctagaatcctgtcacactacagtcatttcttttcctctctctggcccttgggtcctgggaatgctgctgcttcaaccccagagcctaagaatggcagccgtttcttaacatgttgagagatgattctttcttggccctggccatctcgggaagcttgatggcaatcctggaagggtttaatctccttttgtgagtttggtggggaagggaagggtatatagattgtattaaaaaaaaaaaaggtatatatgcatatatctatatataatatgacgcagaaataaatctatgagaaatctatctac

SEQ ID NO: 747 - DNA, 2144 bp, Homo sapiens
gttgccatggagctgcccgccccaaaccacgccgccggcgccgcggagggcaatcgccaaggaccgccgcctgcctgagcagcccggggtgtctgtgcctccggagcccgagaacctgggacccaggccagccagagctaatttctatctcccagcatggaggatgacggcagcctgctccctgaggacgagcttttggccgatgcctttcttttggaagatgaaagagatgaattagaggatccggagtttgacatcaaatgtcttctacaggaagctgaggatgacgtggacccgggacacagcagctcagtgaaagaactagatactgatgctgataaattgaagaagaaaacagctgaggacagaacgcaggcatttcacctgcggcagaacctgagcgccctggataagatgcatgaggagcaagagcttttcactgagaagatgagaggggagctgcgcgcctgtcggcagaggcgggacctgatcgacaagcagcaggaggctgtggcagccgagatcgccacagaggaagaggcgggcaacatggccgctgtgggccgcctccaggccgtgtccagacgcctatttgcagagctggagaacgagagagacctgcagtcgaggactgaggccgtgctgaaggagagcgagtgagtcggtgtgcagccgggactggcagcaggcaggccccagaacgaacagcgagctgggttttcaaaacccaggagagagacagctgcctcgtcctaaatgctttcctgtggagttgggttggatgcgtcgagttgccttcggcgagtttggcaagaaggggtttgggaaggtgcacgaatttctcagggcgactgaggggaccctgagctgacctcaagtaggactcccgaaccacacagcccccagccccgggagctgcagccaggtccatgacatccacagcactgaccctgcacatgcccgggatgacctaagctttccagcctgggcagggcaggaggcacagagagggctgagtgcaggcctcaggccaccccacccctaagagtgcccatgccgccagccctcatgcaacctaacatctcagcctcactccactgaagacaccactgagctttgacccagtctctgacctgcactcactgtgatgtagtcacgacccagtctctgacccacacttgctgtgacgtagtttctggcccagtctctgacccgcgctcactgtgatatagtcacgacccaagctggtgtccagtgccctgcactgtggccccacctgtgtgggcagtgggaggggtgcaggggaggacaggacgctgaacccagctgtggctgagcgtggagaacactgtcccctgcgacactcctttgacaactggctctgtcatgcccctctcactgctcagcagcacctgcgccagggtgaggggcttcacagggctaatgaaccccagaaggcctcactttactaggttgatgtgattgtccacttctttaaaaaaaaaaaaaaaaaaagtttttgggctgggcccagtggctcatgcctataatcccaacactttgggaggcccaggctggtggatcacctgaggtcaggagttcaagaccagcccaggcaacatagcgaaaccctgtctctactaaaaatacaaaaattaactgggcgtggtggtgcatgcctgtaatcccagctactcgggaggctgaggcaggagaatcgctggagcccagaggtagaggttgcagtgagccaagattgcgccactgccacactccagcctgggcgacagagtgagcaagactctgtcttttaaaaaaaaaaaaaaatggctgggcgcggtggctcacgcctgtcatcagcactttgggaggccgaggcgggtggatcacaaggtcaggagatcgagaccatcctggctaacacggtgaaacccccatctctactaaaaatacaaaaaattagccgggcgtgctggcaggcgcctgtagtcccagctactcggaaggctgaggcaggagaatggcgtgagcccgggaggcggagcttgcagtgagccaagattgcgtcactgcactccagcctgggcgacagagcgagactccgtctcaaaaataaataaataaataaagttttattttgaaac

SEQ ID NO: 748 - DNA, 2802 bp, Homo sapiens
ctccagccctggaaatttcagctgccaggcagcacccacacctgccctgggagggagccatctggcacgtcgaggcacccgagccttcagacgatgcaccccatctgaccaccgcaacctcgtgggagaccccgtgagaacctccagctaaagccagaaaacccctgaaccatatatgagagaataagtgattgtttcaagttaccggttctggggtggtttgttatgcagcgacaattgactggatcattaaggatttgtacagacttcctttctggggcttttaagcttactaagcatcagttctcagtaagtacaacccgtccctcagggcgggtgaggagcctcgggtctgccaaagccgggccctggcgggctggagagcgcgagctggggcgcctgtcactcctgcgcgcacagggcgatcgcgcggagtcgggggcggtttcctgcacacagaaagggagtgcttttaggggcaaaggaagctcgccgcggcgtagggacgtctttctaatgtcagcagagagaggccgatgcgggaagagttatccacagatgcgggaagggagaggacgcgagaaggggaaccgcgttctcctggccttccgcggacggggatcgggtaccgacagggtttacccgcgggaagccgcaacccagcaccccgggcctggccgcgcaggcgctgaacgcgcctttgctgtagtcctttgctgtaagacagcgagagaggaaggatgaagtagggacagacgagaacgccggcaggcactcccacttccctactcaacagcctgccttcctttcttgctgacagaaccatggttaatgggggtgtgtgtgtgtgcgcgcgcgcgcgtgtgcatgtgtgtgtgcgcacgtgagtgtgcgtctgtgcgtgtgtgtgtgtgtccagagggctggtgggatgctaacgggcccaactcaaaagctctgttccctagtcttccttgcagtgagtagcggccatatgacaccgttccggccaaagagacctaagtagacctcactggatgaaacttctagaaagtgtgtaaatgggtgtaaattcacttgacgtgagctccttgccctttgtcctgtgcccatccccctttagcagctctggggctgggcctaagcattttcatttttcccaagttccctgacggatgctgatgctgatgctgatgctcccagggaccacaccctgagcaccactgctccaggactttggggctatgaaaagcagttgtccaaaggaatgagttggcaaatcacatgtgagtggtttgaaattctttctagtccacaaaacaacctaaggatgtccaggagatgggacaagtttgaagcatttgagtaatgactggaagcacaaagggaaccggacgccaccactaattgtcaccaatggagtaaacaacacgtgcctgtgttcttcaggaatggcggggatgcaaccagaaaagagagttctccttgatggcacgtccacacgcggctcccactcatctctctcggccagccgcccgcagcctgttctccatcactgtccagccgttccccacctgcctcgagtctgtggcgtgggccgtgcaagtggttctcgatcgcaggcatgttttatccatcatgacttggttgttacgatacacagtgtttatttttcttcataaaaagatgcaagctgtgcgcctccaaatgctggcagctcagaatattccatttgtttgtgaagagacagactggatggcacaatttcaatcaaactatgaaatgcaggctggcatgcctggagagaaagatcataacagtgtgtactcttctttctgagaagccgcggactgcacacgtggttaactcatcagcccctggaaggcgtcctggtggatgtgttccatcagccatggcaaagcaggaaggggactctgtcaaagctgtctgtcctccccctggggacaggcggggccacatgacacatgctgtgccacattgattcactctgggtggaaggggttgtgtcctttgaattcccaaatggaaatggctagagtttttttttttctaattacaaaagtaataaatggtcatttacattttttccaggaataaaaagactaaagactaaacaacacaccaaacaaaaaagaactccacgaggactataatttcttcttgatttttatccatctgcctgtctataactgacctgccttttgcaaccataggcttctctccaagtacacatatagagatctataccttaatttttatggctgaatgttattccaccgtgtagctatatcagccccctattgagagatggttggttacgggttgtttttttcttttaaaaactatactatgttggatatccttatgcatctcactccctttgttttcctaattgttttgggtaaacttctagcggtggaattgctggagaaatgcatttgatcaacattcctgaactgccctccccaaagtctgcgtgaatgacacccacccccgtcgcttatgaggctgatcccagcttcacacctgcattatcaacgcagggcacaaatctttgtcactttctggagtgattttctcttagatttctgaatgattagcataccttgacatggtaaacctttatataataaagtttttaatttttcttattaacatgaattgtagctatatgaaatattttattggttgtctgctttcttatttcagctttccattatgacaatgattaaacgttgaagaaagttgaaatagtagtacaataaacatccatataccctc

SEQ ID NO: 749 - DNA, 1824 bp, Homo sapiens
acaactgtcctatgcacaactggaaatgcaccaatccccaacctagtaactattacataaatttaacaatacttgaattgcagtcaataaatcttatgtcatattataaaggaaaaaggaaataaagtgaagatatgttcttactacaaatgtatacatgcacaaacacgtttttaacaaaagaaggagggaatacttatgacaattacagtcctcatttctgcagctggtcacatggtcgtagttggtattgatgactatcttcttctactacccattctgtattccctttgccttcagcaagcacctcagcagctcatggttttttttccaagtggagtgaccaaaaccttcattcctgtagggtctgggtcatttgtagtcctgcctggattgggctgttgtagtttcccattgaccttaatcacagggcatggtaatactaagagatgccctaatggatctcctgtactccatgaatactctttcttacctccattatggagtagtagactgatttcatcttgatagtctgggtcagtcaccccagccaacactgtaactcccttcttagcctgttgacttaaagctaggaggaaaccaaagtgtccaggtggcaatcttaacttccagtttaatggaataattgttgtgattcctggtagcagcgttcctccctctggaactaagacctctaggccagcagaatgtaatgtcatgggaacaaaaagcaaaaattttgctagtggatcactagaggtgatggtgagtggtgccacttccacttccatcccttgattcctagaccagtgaatcctggctataggagaaacaatatcatatattggatgttgatccagagcatacacaaccttctagagaactttgccccagccctgcaaagtattgtcacctagttggaattgtaattgtgacttcaaaggccattccaccattctaccaatccagctgctttatgatgatggggaacatggaaagaccagtgaattccatgagcatgagcccactgcctcactactttagctgtaaagtgagtgccttggtcagaggcaacactgtgtggaataccatgatggtggataaggcattccatgagcccacagatggtagtcttggcagaagcattgtgtgcaggataggcaaacccatatccagagtaagcgtctattcaggcgaggacaaacctctgccctttcaatgacggaaggttttggcctccctctccctgtgcaaactggtaaaaggccttgggatttttgagctatccttacccgcctccctacttgtttgattttgatacatgttttctaataacctggtttttctcttttcaccttcaggccagcaaactccacacagtcatgcaaccagagcctcagacaatggccccttctgctgaggacccttaaataagcttctgagggagactgctgttttcccaaaacagcgccccctgtcagcaggaagcagttaagatcagtcttcgtccttatccttatccttattctaatggcagttagatgtacttcttcagagtggcagaattaggtagccaagtaagaagcgccccctggcagaacctctgaccagcttgcccactgggaggagtgcgcactggggtggaacgttggaaagttcacaccatttgcatgggggaggagcctggcctctcctgatgtggggcggtaacctgggattcaatctgtgaggtgggaagccagctagcgagactctcacttcgccgagtgtctctgtttcccttttttccttttcacccaataaattccatttttctcacccttc

SEQ ID NO: 750 - DNA, 2646 bp, Homo sapiens
gagcgacttccggcagctggacttggaaaagcaaggagtgtcgggaatggcgaccaagcggctcgcgcggcagcttggattaattaggagaaagtcaattgcgccagcaaatggaaatctcggaagaagcaaatccaagcagttgtttgactacttaattgtcattgattttgaatcgacatgctggaatgatgggaagcaccaccatagccaggaaataattgagtttccagcagtgttgctgaacacatcaactggacagattgactctgagttccaggcttatgttcaacctcaggaacatccaattctttcagaattttgcatggaattgacaggcataaagcaggctcaagttgatgaaggagtccctctgaagatttgcttatctcagttctgtaaatggattcataagattcagcaacagaagaacattatttttgctactgggatttcagagccttctgcttctgaagtaaaattatgtgcatttgttacttggtcagactgggacttgggggtttgcctggagtatgagtgtaaaagaaagcagctgttaaaacctgtgtttttaaattcttggattgatctcagagcaacttacaagcttttctataggagaaaaccaaaaggactaagtggtgccttgcaggaagtaggaatagaattctcaggacgagaacattctgggttggacgattctcggaatactgcccttcttgcttggaaaatgatcagagatggttgtgtaatgaaaattacaaggtcgttgaacaaggtggtaccaaaaggaatccatgcagtccccaagctttcccaccagcaaaaaaacaacccttcactattcatgaagaaaagcctacatcatctgattgctccccagtaagaagttcttcctggaggcgtctcccatctatattaacttctacagttaacctacaagagccatggaagagtgggaaaatgacacctccattatgcaagtgtggtcggagatctaagagacttgttgtttctaataatggaccgaaccatggaaaagtcttctattgttgccctatcgggaaataccaagaaaacagaaaatgttgtggttatttcaaatgggaacaaacacttcaaaaggaaagagccaacagcatggttccatctcattccacagggggactcacttttagttctccagaaacaagccatatttgtgacagaaatttaagtatttccaccaaaaattctttgagactcaggccttcaatgaggaattgataacctttcatgtatgaatcctaattgttccttgaatttccagacatgagtattctgataacatcttacactattttatttttattttatatattaatgtttactgcatttaccatactttcttcaggaaccacaagtgtaatcttttgtaaacagtatttattagattacatataataagcaacaatagtatatgatccttcttttatagttagaccttgaaacaagtctaaactatttttaaattatttgcaaaaaatgtgactaataaaaatccctagtctattttcaggtagattcttgtactttgagattatcataatcttctaactgatattttatatttttctaaaaacttttataagttctttagttttatttcaggcttgaacattggttctgatttgtatatcaacatatcagaagaattagtcaactaaagtttgaaaacctatgtagcagagatctggttcagaaactgcttctatactatacatttaaaaattaatcagcaattgatggtattatttttatattaagaaatgataggaacattgacactaatgtggaggaatttgccaaatattttatttcaaaatttagcctctgatatcataaccacaagatattttaaatcaacagtttctaagcatactaccacagtttttatgacctctccatcatcttgtggtttctagagattgacagatactatgtttgttttatagatatggtaattaatgaaacaactttaaattgtcttccattctttcttcctcagttcatttctttttgtcttcccactgatagtctttggcagctcttgaataaattctacctgttggcatcaaggggaagaaaattagcctggaaatttttatctttacataaagccaattatatagcagtttgattatgaattctaggtggaagaattagaatagtctttggaatgggttttgggtaacagccaaaatagggaaaagggtattgttatgaaagttgtcttgatattaagtatttactgtgagtccagtaagccaaaggaccaaacaaaataggttcagggtttcattttaatctcaaagattctgattcttacccatatgtcatcagttcagtttgggacatgtggtgcagcatgtgtgaagaaaatattcattaaaatgtaaaaataaacacttgaaattgtccacaacactgagcaaatattcgttataattaggatgcctacctttctgggatatttgtaaggtgctgtagtttttttaacatgctcctgaatctcctttattagttgttcttgatcatgtgacttgtaatcaggatttagaacgacaaaagcctttactacctaaaataaatatttgaaacaccagg

SEQ ID NO: 751 - DNA, 2314 bp, Homo sapiens
attatcaagctcagatggaatcaaaattaaatatttgacaacagattctacagtttgagagaaatagaaaagtgtttttttcttttctccaggtccacaagtctagtttcttggactctctcactataatggaggttgtcatcagctccccaaaataagggaagcacagagcagatggtggctgaaggtggggaatcctgtgaaatcatatttaagatcatagcccgtggtccattgtattgtaatcagctggctcaggaaagaagatctggatctcctgagctctacacctactgcaatggatatgtcaggagtcccgagaacctctggggcccaaacccctcccaccaaaatatatcatccagtattgaggactctgacaccaaattctcacagagcatatgcttatgcaattttacatttaatttctcattacattacaattgggaaaatgaggccccaaaagaggcagggactgatccagatctcaggaggtgggcaggctccagagcattagagagagctccagcttcctaggccttggctccatcccacctatcaggtttgctttggaagttagagcctgtagcttcacattcaggggcacagagaatgagcagatccagggttctgttcacatggggacctctccatgtcaatttcaagatgacaggactggggttttgcatccagctctgagggcacctggaagtaaaatgagctatgctccacctcagcctaatgtagagaatgcctgcaggaaagcctgttttcttcctcataaatagggctgtttgaactgggtgacctcgacgatttcacatactcataagtgtcttccagccctgattcttgctctgagactgtgcagaaatgcatccactctctgtaggtccttcaaatcagagggaggcatggccacttcagaggcatcttgggtagatgaagatgagacggagctaaatgttccagagcattggactctgaggctgaagtccacggaaaatcccagctcctgttgggttcttaaggtcctcatttgaaagtggtagaaactaatttcactggataaggggaggatatctcatggataaatagcacaacccaaaaggtagaggcaaatagaaggcaaagggggattccaaggtcactcattgtacttggggccttcagattctgctactttatcccctaggaccttgaagaaccagtgtcttgaggacagaaaaatcaagatacctgatttgttccatagtgctcctgcattgggccatagagttagtgatggcctggaggtggttacagccagctctgtttctggtgcccactgagctttgctggagcagctggaacaagtaagagtcacacatctcatgttgttatcaatgatctccacattatcaggtggtcaaaagaggaagggatattagagatcctccatataatcacttagccagtcttttttcccttgcgctcaccctttgccagctaaccaggtgggtgcaacgtggtacagaaaattattacatgatgcctgcaccccccaacccaggaccaaacattctgaggacagctggataaaagcactaaagcaagtatatgtgaaagaaaagaggaaggactataatataaagtggaatgttgagaagaaaagctggaaaattattgcatgggaggaactaaggcctcattgtggtgatgtttaatccatgataaggatgacaacagggagacatctctgcacaagtatgtgtcagggagaagccacccttagtgaagagactcataggtgtgagttcggcagaggttagaaagtttggctgcagacagcctgaggaagatataagtagagggatggagaatcctagggcctgggagatgaggctagatatctgctcctttctgacaacattgccctaaaagtcagcacttttcaacaacatataatatctcataatttatgtggaccagaatctggacacagttcagttgggtacctctgcctttaggtcttttatgacattgggactgtggtcttaactgaagctggactgggaaagcatgagcctttaagctgactcatgtgaaaattggcagggtttagtgtggctggagagcctgactttccttctctctactggtctgagcaccccctcaggctctgttatgttggtctttacatggagcatctcatagcattgaagcttgcttcctgtgtttgaggtatacaatagagagagagaattagacaaaaaggtgtacacaaaaagagacagagaaagattgagggcgcaaacaggaaaaacccagtagg

SEQ ID NO: 752 - DNA, 2064 bp, Homo sapiens
gcagccacgggtcacgccagggccctgcacaccatgcagaggaaaggaagagctcagtgcgccagggtttcatacagccgctctctcaggccccaaggaaacgtctagagcgcacaggcggactcaccccagactgttcgaaccgtccctgagcgcccgccctcgtctcccggcaccactggccccgcagcagccagttgagaagggcggaggctgattccaatgaagtggcagaccgttaggcggcctctccaaaaagccagctatgtcgccgttagccaaggtttgagggtcttctccttctcttcgagggcccaacctcccctccagatttagtacaccagaggcgtcgcagcaacggctgctgcctgcgcgcctcagctaggcgggctcggatatttttaaggccacattggaaatcccgggcatgctcccgccggcggagaaggcccagacaaaatgtgcgccaatcaggatacagacttggaggacgtttaccctcaggaccaataagagggagggcggaccgggccaagggtgccggttcgctctccggatttaaacctcagcggtcggcggttaaccgcaggctcggcgcgtgggccggcagtgcgcctgcgcaagttacgcgaaagctaacagaatctgcggtgctctgctggcgactggcaggacgcggtgcagagagcggacttccgcgacgcgggtttttttttttttacttgaatgtaaataccaatcaagatacattgaaataagaaggtcctacagtgtaggggaagcaatggaagaacttctacctgatggacaaatatgggctaatatggatccagaagaacgaatgttggcagctgctacagcttttacccacatccgtgcagggcagggtgaaggagatgtcaggagagaagcccaatctatccaatatgatccctacagtaaagcttcagtagccccagggaagcgacctgctcttcctgtgcaactacagtacccacatgtagaaagtaatgtcccttcagaaacagtctctgaggcctcccaaagactccgaaagccagtgatgaagagaaaggtgctgcgcagaaagccagatggggaagtattagtaacagatgagtcgattatcagtgaatcagaatctggtacagaaaatgatcaggatctctgggacttaagacaaaggctgatgaatgtacagttccaggaagacaaggaatcttcatttgatgtttcacaaaaatttaacctaccacatgaataccaaggaatttctcaagatcagctcatttgctctctacaaagagaaggaatgggctctccagcttacgaacaagacctgattgttgccagcagacccaagtcctttattctcccaaagctggaccagttaagccgaaaccggggcaagacagaccgggtagcccggtattttgagtacaaacgggactgggactcaatacgtttacctggtgaagatcatagaaaggaattacgctggggtgtccgagagcagatgctttgtcgagcagaaccccaatccaaacctcagcatatatatgtcccaaacaattatctagtaccaacagagaagaaaaggtctgcactccgttggggtgttcgttgtgaccttgcaaatggtgtcatacccaggaagcttcccttccctctttctccttcttaaatctttttaaacttctttcacaggattgtttgagataacctagctctttatatcttcccttttaaatagaaacaactgtcttgagaagctcttcgaaacattttatggtaaggacttcacctatcattggtctttcctagctatatatcacattggtatcagatgatacttccaaattgccactcaaatccagcaattgcaagataaatcatatcagagaaagaacaacagacctggtctttctattttgtcaaattagtaagggccctttgtgtcctgtaactttttttacctatcaatatgagttgctgtgcttcagtgtgtgttttttaagttgctgggcattacacttaccaattaaagaattttggaaattcatg

SEQ ID NO: 753 - DNA, 2187 bp, Homo sapiens
taaaatatctaattttattcaatctttttattgccttgtcctccaaaaccaagtgtatttaaatattccagaatatttctttcattgactatggaaaactttgatataaagctatataattttggtttttgtttagtattattcttctagatatgttctagttgttaactagcctgttttgtgacatgagtaagtaggattattaagcatgcttgagaagttatatgtatatatttatatgtttatgtatatatttatatttatatatatatttatatatatttatatttatgtatatgtttatatatatttatatatatatttttatatatttacatatatatacttatatatatttatatatatttatatatgtttatatatatatttatatatatatttatatatatttacatatatttatatatatttacatatatttatatatttacatatatttatatatatttgtatatgtttatatatatttatatatgtatttatatatataaatatatatatgagggggcttcaaaatattcatggaaacattgagttaaaagctacaaataaaaaatataaattttatttctcagagtaagctccatcagggtcaagacacttttgtaagcaatgataccagacatttattccatccctaaagaacagggtcttgggaatttcaccacatcagtgccatctttttaacattattaactgaagaaaaatgggtgctctgacagatttttttaagattaggaaacaaaagtccaaatgagccaaatcaggacagtaaggtggatgcctagtgacattccactgaaactctggcaaaattgcccttgtttgatgagaagaatgagcagaagcattgtcatggtggagagggagtctggtatagctttcctggacatttttctgctaaacctttggctagctttccccaaacactctcataataagtagatgttatcattctttggcctttcagaaagttaacaagcaaaaagacttaagcatcccaaaaaactgttgccatgaccttagctcttgactgcttggcttttctttgactgcaccacatccccttcttggtagccattactttgattgtgctttgtcttcaggatcataccagtaaagctatgtttcatctcctatcacaatccttcaaagaaaagctttaagaccttgatctcacttgtgtaaaatttccactgaaagctctgctcttgtctgcagctcatctgagtgcaatgattttggcacctatagagtggaaagtttgctcaactttaattttgcagtcagaattgtgtaagctgaaccagttggaatgtctgtggcgttggctatggtttgtactgttaatcatcagtactcttcaattagggcacaaacaagattttttttttccttgcaaattgatgtagtttgtcttctatagtgggcttcatcttcaacatcatctcatcttttcttaaaataaattattcatttgtaaactgccaatttctttggggcattgcccccactaacattttgtaaagcagcaatgatttcctgattttcccacccaaacttccccataaatttgatgttcttgctttaattttagcagaattgacattgctctgataagggctcttttcaaactgatttcttatctttttttgtgcctcaaaatagatcctgttcagacatgttacaaattagtacaagtttattttgatataagaaaaaattgaaatccatgtatagtttttccataatatgtattttccatgaactttttgaaattcttcatatttgctgagatgatattgctaaggagttatataatataaaaagttacatgtttgtgtgtttatatatgttgcatatgttatatatattcaaattatcattgtatctgatacaagtaaacatattaatttgaacctaactctattcaagtttgtaactctctaaatactggtaaggatgatttatctttatgttatgtttatatattggttgctaagcaaacgccataaagactttaaaagaacagattacttttaaatgtaaacatccatttatatttgaaaaaagacataagctttaattgacaagctttgtaagcctaattgtgtcattaaaaactcagtagaaataaaggtatcatatgtactttattcatttatg

SEQ ID NO: 754 - DNA, 2762 bp, Homo sapiens
actgacctccttcttggtgctctgacagcggcagccggtcctccctcagctctgcccgccttctctcctgctgctggccaagcccattaagctgctaccttggccacaactgaaggccccacgccctgggaagaaagctactgaagaggcgtccctgctccccagcaccccaaaccatcaattaatattaacgagggaaggctcctcattgcctaaagaccccactggggctccaatggaagagaggccccgcccccgtgactcaggaggttaaagggcctggtgccggcttgtgaggccagtgtccagatggcatccagcagtgggagggtcaccatccagctcgtggatgaggaggctggggtcggagccgggcgcctgcagctttttcggggccagagctatgaggcaattcgggcagcctgcctggattcggggatcctgttccgcgacccttacttccctgctggccctgatgcccttggctatgaccagctggggccggactcggagaaggccaaaggcgtgaaatggatgaggccccatgagttctgtgctgagccgaagttcatctgtgaagacatgagccgcacagacgtgtgtcaggggagcctgggtaactgctggttccttgcagccgccgcctcccttactctgtatccccggctcctgcgccgggtggtccctcctggacaggatttccagcatggctacgcaggcgtcttccacttccagctctggcagtttggccgctggatggacgtcgtggtggatgacaggctgcccgtgcgtgaggggaagctgatgttcgtgcgctcggaacagcggaatgagttctgggccccactcctggagaaggcctacgccaagctccacggctcctatgaggtgatgcggggcggccacatgaatgaggcttttgtggatttcacaggcggcgtgggcgaggtgctctatctgagacaaaacagcatggggctgttctctgccctgcgccatgccctggccaaggagtccctcgtgggcgccactgccctgagtgatcggggtgagtaccgcacagaagagggcctggtaaagggacacgcgtattccatcacgggcacacacaaggtgttcctgggcttcaccaaggtgcggctgctgcggctgcggaacccatggggctgcgtggagtggacgggggcctggagcgacagctgcccacgctgggacacactccccaccgagtgccgcgatgccctgctggtgaaaaaggaggatggcgagttctggatggagctgcgggacttcctcctccatttcgacaccgtgcagatctgctcgctgagcccggaggtgctgggccccagcccggaggggggcggctggcacgtccacaccttccaaggccgctgggtgcgtggcttcaactccggcgggagccagcctaatgctgaaaccttctggaccaatcctcagttccgtttaacgctgctggagcctgatgaggaggatgacgaggatgaggaagggccctgggggggctggggggctgcaggggcacggggcccagcgcgggggggccgcacgcccaagtgcacggtccttctgtccctcatccagcgcaaccggcggcgcctgagagccaagggcctcacttacctcaccgttggcttccacgtgttccagattccagaggagctgctgggcctctgggattccccgcgcagccatgcgctcctgccccggctgctgcgcgccgaccgctcgcccctcagcgcccgccgcgacgtgacccgccgctgctgcctgcgtccaggccactacctggtggtgccgagcaccgcccacgccggcgacgaggctgacttcactctgcgtgtcttctccgagcgccgccacacggccgtggagatcgacgacgtgatcagcgcagacctgcagtctctccagggcccctacctgcccctggagctggggttggagcagctgtttcaggagctggctggagaggaggaagaactcaatgcctctcagctccaggccttactaagcattgccctggagcctgccagggcccatacctccacccccagagagatcgggctcaggacctgtgagcagctgctgcagtgtttcgggcatgggcaaagcctggccttacaccacttccagcagctctggggctacctcctggagtggcaggccatattcaacaagttcgatgaggacacctctggaaccatgaactcctacgagctgaggctggcactgaatgcagcaggcttccacctgaacaaccagctgacccagaccctcaccagccgctaccgggatagccgtctgcgtgtggacttcgagcggttcgtgtcctgtgtggcccacctcacctgcatcttctgccactgcagccagcacctggatgggggtgagggggtcatctgcctgacccacagacagtggatggaggtggccaccttctcctaggatctccggatgggcgcacctgctgctcagggcagggttgctgagcaagaccacctccctaggccttgcctggcatgggtgccactctctctggcatccacctgtctggggctagtctctggccctcactgctcacggccgggtgaccactctggcctgcgtactcctcactcagaaacaagaacagcgacagcccctctcgagcagatgacacgagctagtccacgttgacagcttaagacagtgctagctctgccctggctctcctagaaggtggaggacagacacaggag

SEQ ID NO: 755 - DNA, 2190 bp, Homo sapiens
attcattccagggctgctctgcagctgcccaggcagctccgtgggtggccactctgctaacgtgggagcacacgtggcttccatctgatgagcagtctcagggaagctgggggcttcagacaccaaatgtctacttccctccttgatttgagactcttttggagctcttggagacttccagcagaaacctgagctgccggctgccaagaatcagcggtggatttcttgacctgctcttaataccaattgaataacccctttgaaaacgttcacatacatggggtacaaggtggtacctttgtgcatgagactgttctggagacggcttatcacccagcaaatcagtgttggccatctgggactcagcgaccctttctacgaggctatggtgaagtctcactctgttgcccaggctggagtgcagtggcacgatctcggctcgctgcaacctccacctcccaggttcaagcgatccttctgtttcagcctctccagtggctggtattacaggaacacaccaccatgcctggctaatgcttctctttctataaatgaagacgtgaggccgtgtaagctccaagagagcagggatcttgtttgtcttggtcaccgtgatatttcagctgctgacccagtgcttgaagcatacaatctggagtctccacaactttcttcatggaaccaccaccaggccccttctgtaggcttcttatggaggctgaaggtgtctacatggcagcataaagtagtaattaaggactctggagtcactgcccaggctcaaatccctgctgcaaattgcgaggtctttgaagagaaactgaggcccataaaattgaatggctcatctcagatcaagtggccagatcaatgaagagaagtgtccttaggtccggctgctggtgtgaagtatgctctggaggtctgacatccactctccctcagactttctaatacggcaggaattccgtccatgtatactcaagctagagttgccagatgaaatggaggacatggctgggtgcggtggctcagctcggagcagtggctcacgcctgtaatcccagcactttgggaggccgaggtgggctgatggcctgaggtcaggagttcaaaaccagcgtggccaacaagatgtgccagttctggtaaatttcctagcaagcttgaaggaagtgaaggacaactgcaaggaagggcaggatggagcatgcagcccacgtattccccagcttggtggggcagaatgcgttcttggctcctgaggaatgggcaggcaacgcacaggggtcctgggaagaaagggagagaatatcctgggagagccatagaccctggcaccctcctgtggtccttcatcaggataaatttctaaaagaagaattactggccaaaggattcctcttcagttggaaacagcagcaaagttcacaggtcgtgagtggatgtaaagtggacggaacaggttgttgccagtctattggagtaggatggtagatgagcagtcccgttggctaacaggtgtgggtatgcctgttttaaaaattagcatgttgtaggggaatatttctcaaacttttgtcacgtatctacctcttaggcattttttactttattcacctgtactactatttaatatttttaaaattcaactgatttttttttttgcttaaatacatgtctttaaaactggaactttattcgccactgtaaatggaaaaccagtgtcatttgccatatatagaagtgaactatatagtaaatacggtgaaagtgaaatggtatcatcacacttgtgctagattccatttcctatagaaggttctgggtttcttaaaaggcttgttaaaaagagagatgagtaaatgtgagaggaatttaagacatactagcaccattaagactttctccttaaagtaatctggaggatttaaattgagaattgaaaaaagtaactttattttacataagaaattatgtaaaagaattatgttatttaatgccacatccatacgtcatcaagagtcaacttggtgaccactagtggcccatgtcccacactttgagaaacgtgtgttggggtgggaatctgaagtcagaaaaactggagtatgataaccacctcagcacttattagaggccttcacttgggaatgatgacccttccttgtagggttgtagtgatagatg

SEQ ID NO: 756 - DNA, 3625 bp, Homo sapiens
cactaccatctttaggttggatttagaggttgtggaagggggaggtactgttgaaatatagtgaaaacctgcttagatgaaataccaaggaaagagcacagtatatcaaaagtgaatgatccctaagtactgtagaaacttagagaagaaatttgatataacctagtatggcagagaattgggccctttctagggacctttttactcatattgccagaactttttgcagctgctttaggcagaatgcagcctcacagtcctatcttaaggggaagcattgaaaccagagtccattgtctattgccttggaaatgctaaaaaagctcctcgtaaacctgtctgctgatttggctgtttgtccagatacttagtattagaatcactgaaccttaatgttggtgttgaatgtaccatttctgctacttctctagttggtatgggtccttgctgtcccatctgcataactgcctaggacagcactccatgtgttataaacattgcttgcatccaaggatagtggacagtatattggctcccccttcccctgccctccatattgccataaaattcccaaactattcagtacactttaatttccaagattattaatttgtacagatgctggggggagaggtagacaattaccatcattaaaatgctgcattactttatatcattgaataatgtcaaacattttttaaaatttttttatcatttaaaaacatctctttaagctggaagctctttgacatcctttggaacagaaacatcaaacagtggtaccttaccccaaagtagtgcggttggttctgcctttacacaggatacaagatctctaaaaacacagttatctcaaggtcgctcaagccctcagttagaccctttgagaaaaagcccaaccatggaacaagcagtgcagaccgcctcagcccacttacctgctccagcagctgttgggagaaggagtcctgtatcaaccaggcctttgccatctgccagccaaaaggcaggagagaatcaggagcacaggcgagctgaagtacacaaagtttcaaggccagaaaatgagcaactcagaaatgataacaagagacaagtagctccaggtgctccttcagctccaaggagagggcgtgggggtcatcggggtggcaggggaagatttggtattcggcgggatgggccaatgaaatttgagaaagactttgactttgaaagtgcaaatgcacaattcaacaaggaagagattgacagagagtttcataataaacttaaattaaaagaagataaacttgagaaacaggagaagcctgtaaatggtgaagataaaggagactcaggagttgatacccaaaacagtgaaggaaatgccgatgaagaagatccacttggacctaattgctattatgacaaaactaaatccttctttgataatatttcttgtgatgacaatagagaacggagaccaacctgggctgaagaaagaagattaaatgctgaaacatttggaatcccacttcgtccaaaccgtggccgtgggggatacagaggcagaggaggtcttggtttccgtggtggcagagggcgtggtggtggcagaggtggtaccttcactgcccctcgaggatttcgcggtggattcagaggaggtcgtgggggccgggagtttgcggattttgaatataggaaagacaacaaagttgctgcatagtctacaaacaagtctctgaaaataggtgaatttctagctcttcatggtcctgaacattgatttcagtctttgcaaagaatgaagaagtgaattcgctgtacatttgtcaccagcactgggtttttgttttttgtttgtttttccgcttaatttcaaagataaaatgcagttacttttgggggtggaaggctcatcttaaaacatgagcattaaatatatttggaatagcagaaggttaagtaatttcttatgtatagttaaactaaagcagtacttcagtgggacttaacaagtattttttcatcactgaaaggtttttttttttttatcactaaattgtatttggcaattgcaagttgcctgcagatagggccgtgatactgtgttttgagccacagaaggttgtgtgtgtgtgtgtgtgtgtgtgtgtgtgtgtgtgtgtgtgtgtgtgtgtgtatgtgtgtgtctttttcctcctttcttctggggaatcctgtaatatgaggtagcttatttcgtcaattaattagggtgctggatggtagagaattttgtcagtcaactatgtacacacagtaaatactgtttcttaggcaaaggtaacttttttatatagttgtaaaattccattatattccattgccaaagaaacattaagaactttgtatagctgtataaaaagcaactaattttttaaagagtaaacattttaaagtcagcaaacatactgtgtccttgcagaagttgatgtgctgagcagcagccttatgggtgggtctttttttcttagttttccaggcttaacatttttgattttgttttttaatgtttggaacataaatgaagatttgatacattatttcattatctaaaaaggattaattattcatgctcattgtaagaacttcattttgtagcaaatggcatatcacaggatctgtccagataatcgatattttcagtatacaaatgtaaataatcacagatgagaatgtacttagctgtattttcaaataagtaatcttccccccttttgtaggactttaaaactaggcatcaatgaacctgtttttcctattatgcctggaatttagtcatgatatcatgataccttgactcattccatcatatttcaagaggattcagagtgctagaaattattttggtagcctgtaacacacggcaacactggtccttgggcctatgatgacccacagatgactcagtatagagttcattgctaattataaattactagtgaatctttttgatattttaagctctagtgggaaaaatctggccacttttgtgtttttatgaaggccatggaataaaaggatccaaagatttaaatatttttatctaatattttgattgttttcttaactttctccttaaaacattcagtagtgataaagatatagaaactgcactgtaggagaattggaatatttaaggctggttgacattttttattttcattttatatcttttgtatagctctacaaggcagtgttttgtaatttggtttcattatgaagatccagtacttggcagccatagtttagacaatattgttcagtgctgtttgcttgcatgttaacaacaaaaccttttagaggacccacaaatcatgatattgaacacagttccgaggcattcagagcatcagagcaagtaccatggcaatacatgtgtagactgttggagatgtcccgggccaatttcaagaaagaaaactgtaaatactagttctacttgctctgaaattatgagtttatgcgttttcccagccctccgaatcactgactggggcgttttgtgccccagcaataactggcagcatggcatacctgcagtaccccttacaatattaaagcaaagtttttattctaaaacagaataaaactgttc

SEQ ID NO: 757 - DNA, 1923 bp, Homo sapiens
caggaaagaaacaatcagaagggtttaggaacatccaaatctcctcagcggttaaaccgaccccaaaccacttctgggaaaccaccggtatccactgctttggggaactctggatgctcgttatgccaaacgctctcaaagtaagcaaatccccaactgccgttcccctccatgggtaattcttagggtctgggaggtgagctcgcccgccgaggcagaactaagcgagtcgcctggagaggcgtgaagggagcctgcacgtgtcccccgcggcttccccaccgccccaagagcggggcatgtacgagaccgcgctgtggggttcagatttaggaaggacgaccgcgtcgcctgcctccctccctcgcccagagccgggagcaatgctggggcacgaaagaggacttgggaaggatccggtccttactttccccgcgggtcccggacccgcagcccccgggttgtgaggcggaagccaaaggggcgaacccagcggagccggcgtgcacagaccctgccccgcggtccaagaggggtgcctccggcccgggacagcggggctcccggagcccgaaagccccacgagcggcgacagcggggcccggcgctgacgaacagaggaagcgagtacaacggcgccgccgtcgggaacatgcccccgagggccccggagcgcgcggccgcggggggcggcaagcggcgagggaggccccaagccggggcgaggtggctgtccccccagcctggccccgcacggccccccgaggagggtgggagtgggaggctgtccgggagggggagtgtggaaggagaaaagggccaagggaaggacttactttccccgcgggacccggcgccaggacagctcctcccgggaggtgtgagtttgaaggaccagaggcgactggagcggaggcggcggtggcggcggcagcagcggcgtcctgctctgcctacctccccgccgccatcttgacgcccctcccccagcccccccgccccgccgggaggggcgggggaggggcaacggatgaggcgccgcgcgcacgcagcgccctcacgtgacttcctccctcctcccccacccgcctctctgcgcccctctccgccccgcctccctcctaggtgaaggaagatgatttcccccccatcttgaccaccccccagtcttcgccgccaaaaacggactccgccggctatcctcggcccggtaccagttgttggatccaagagaattccggaacccaaacggtccattaccgcggctctggggtgggcgaggggtgagggggccgggtttccgcgaagggggagggggaaggcgaaggccacctaggagagtcacgtgactactgtttccgcaggcgctcacggagagctcgcggtaattccgtttccccgcccttttttccccgcggcctgtcgggaagaaggtccgcgtgccagggctatcgggaggtcggccggagggccgcgcgcatgcgccccgcgcctgctttcaaactccggctaggaagggcctggagctattttcagaacctgttagggtggggagctacggcccaggaagttacctagcagcgtttctgtcacttggaagatctcttcattacctagttagtcctagaaacaaaatgtttacatattcattgcttgttaggctcgctcaaagcactttattggcagtgaaaccgcaagtaacccggagccctcggcgcgaccacggctagaatcagagcctaaggcgtgtgagctcggccatcccacgtctgtcttcacgctcatccgcaagcccgacacaccggggctcccacttaatgaatactgaagagtagggctgtccctaccgcttctcacttccttgttttcatcttttcgttattattaagcgacctaacacaataaacatattaccttgttggt

SEQ ID NO: 758 - DNA, 2838 bp, Homo sapiens
gacgcctttttcagactcagtccgcctgcacccaggtgattaaaaagctttattgctcacacaaagcctgttaggtggtctcttcacacagaggcgcttgacatttggtgccatgacttggttcgggggacctccctccagagatcaatcgcctgtcctcctgctctttgctccatgagaaaatccacttacaacctcaggtcctcagaccagcccaaacaaaacacctcaccaattttaaattgggtaagtggcctctttttattctcttctctaacctctgtcgctatccctcaacctctttctcctttcaatttccacgtcacccttcaatctctcccttcccttcatttccttttgctttctggtagagacagagaagacacgttttatctgtggactccaaactctggagctggtcacagactcgggaagacagtctttccttggtgtctaatcactgcggggacgcctgcctgattattcacccgcattccagaagtgtttaatcactgcggggacacctgctttgatcctccaccttggtggcaagtacaacctcccctgggtggcaagtaccacccccctctcttcgagtctctaccccctcttttcttggaacttacctttttcctatgggcaaccttccaccctccattcctccttcttccgccttagcctgtgttcttaaaaacttaaaacctcttaaactctcacctgacctaaaacctaagagtcttattttcttctgcaactccgcttggccccaatacaagctcgacaatggttccaagtggccagaaaacggcactttcgatttctccatcccacaagacctagataaattttgtcgaaaaatgggcaaatggtctgaggtgccttacgtccaggcattttttatacttcgttccctccctagcctctgctcccaatgcagctcatcccaaatccttcttctttctctcctgtccgcttcttcagtctctaccccaacctcagagtcttctgaatcctccttttctgcagacccctctgacctctctccccctccccaggccactccttgacaggctgaatcaagtcccaattcctcctcagcctctgctcccccaccttataattcttctatcacctcccctcctcacactcagtctggcttacagtttcattccatgactagctctcctcccacctgcccaacagtttcctcttagagaggtggctggagctgagggcacagtaagggttcatgtacctttttctctatcagaccttttccaaatcagtcagcatctgggctctttctcatcagaccccactaaatatatacaagaattccaatatttgactcagtcctacaatttaacctggagtgatttaaatgtcatcctgacctctcccgtctccccagatgagcgggaaagagtttataccctagcccattctcacactgacacctgcttgcatcgtgagccagacctccaagaaggcatcagggcagttccccgagatgatccccaaagggaataccagacaggcttcccaggtatagctaggtgagattacatggtctcttgcctagttgaagggctaaaaaaggcagcatacaaagctgttagttatgacaagcttaaagaagccactcaaggtaaagatgaaaacccagcccagttcttggcccgcttggtggctacccttagacgctttacagccctagaccctcgagggccagaaggccatcttattctcaatatgtgttttatcacccagtcagctcctgacattagaaaaaagcttcaaaaattggaatctggccctcaaaccccacaacaggaattaatcaacctcgccttcaaggtgttcaacaataaagaggcagccaagcggcaacgcatttcagagctgcaactgcttgcgcctgctgtaagacaaaccccagccatgccttcagcacacaaaaacttcagaacaaccaaaccacagcctccagctactcctttaaatcctcctcatggaccttgattcaagtgccgcaaaactggccactagaccaagaaatgcccacagcccaggattcttcctaagccgtgtcccacctgtgcgggaccccactggaaatcggactgtccaactaatatcacagccacttctagggcccctggagctctggatcaaagctctctggctgactgcttctcagatctcggctttgcggctgaagactgatgctgcccgatcacctgggaaagccccctggaccatcatggacgccgagcttcgggtaacttttacagtggagggtaagtccgtcccctttttaattgatatggaggctacccactccacattaccttcttttcaagggcctgtttcccttgcccccatagctgttgtgggtattgacggccaagcttctgaacctcttaaaattcccccactctggtgccaacttagacaacatgcttttatgcacttttttagttatccccacctgcccagttcccttattaggctgagacattttaacaaattatctgcttccctggttattcctgggctacagccacacctcactgctgtccttttgcccaattcaaggcctctttcacatcctccctttgtgtctccccaccttaatccacaagtatgggatacctctacttgttctctggcaaccgaccatgcaccccttaccattccattaaaacctaatcacccttaccctgctcaatgccagtatcccatcccacaccaggatttaaagggatgaagcctattatcacttgcctgttacagcatggccttttaaagcctacaaattctccttactgctcacac

SEQ ID NO: 759 - DNA, 2019 bp, Homo sapiens
gataataagaatgcctccagaattacaccccttgggacccagatgacccaaaagctgagtagtactttaatctcacttcatctctcagccccagatattcagagaaaactctaaaaagtggcaataaatccacatactccccctttccaactggtagacatctcctttaaggtctatagtaaagagatgtggcatctgatgaaaaggaagacaagaagatgcggcagccctacagactacttcaggaagcccaggaagaagatggcatgggtgagtgaccagggcccccaccatggaactcagggcctgcctacactggggcccaaacaatatgcttactggaagcagaaaggatgctaggaaagggaatgtccaaatcatccccagagagggaaggaggaggacaagcccaaggtacctgttccctgtaactggacaagaaactgatggatggggacatggggctccctgcctggctcctcaaaacaagatccacatctcccccaaggagccccaggttacacagaagaaggggggcaaccagttggattttttttcgtttgtttgagacagggtctgtgttacccaggctggagtgcagcaccgtgatcatggcgcactgcggcctccaactcccaggctcaagcggtcctcccaccttagcctctcaagtagctgggactaaggcacacctggctgatttttttgtttgtttgtggagacggggtctcgttatgctgtcagggctggtcttgaactcctgggctcaagtgatcctccagccttggcctcccaaagtgttggcattacaggcgtgagccactgctcccggccaccagctgagtttttgatcaacactgtagccatgttttctgtgttgatcactaaaagtggaccctatccaggaagaaatgtatataaggggtgtgtctcataaaggaaataaaagattcttggagcctctggtccatgaaatagtatctaaaactttcactcattctttcttctgttccccaaacatcccattctccttttgggaagggaccttctgactaagtttggagccacaatttctctaaatcaggacagaatagaggtgttctgagcccatggcactgccatgctggccctagttcctggggaagttccagacttggggcctcatatgactccttggctaatgcggtactagataattgtatagcattagactgcctcttagcagaacagggaggaggagagtgtgcagttattaattcctcttgctgtacctgaataaatacctcaggggaaataggaagttaacattaggaaggtccatgcccaagcctcttggttccacacttttaatcagcagccatattttttttttttttttgagacagtctcgctctgttgcccaggttggagtgcagtggggcacgatctgggctcgctgcaacctctacctcctgggttctagcgatttttctgcctcaccttcctgagtagctgggactgcaggtgcgcgccaccacgcctgcctaatttttgtatttttagtagagacggggtttcgccatgttgcccaggctgatcttgaattcagggtgatccgcgcgccttggcctcgcagggtgctgggattacaggggtgagccaccacatcaggcctaatagccatacttctaactctgtttgagaagttctcaaattagcaataccaagtgttacttggtttcttcccctaatgaggccactaattttattgctcttactactgttgtttggtccctgcatctttaacctcttcgtaaaatttgtatcttccagattagaaaaatttcaactgtaggtgcctttgcaacctatcctgggagaccctaaaacatatttagttttagtgcctagagattttcactcctctaacatctctggatacagtgtccctggtcaacatgaagaagttacagaagaacgctttctgatcctggcccctaaagaatttacttgtgctaagtaataaaattcctattgatc

SEQ ID NO: 760 - DNA, 2701 bp, Homo sapiens
tttgattcgattcaggtgcgctttggcaggagcacggcacagtgattctgtcctctcagtatcctccgtgggaggcacatgctgtcactttgtcccatcatcatgttgttctgggttatggtggagataactgatctcttggaagtgccacctcctctccatgagtaatgactcacctgtggggaggtgctttgagactatcttgtcagtccacaggcagactcagtggtcttggcatcttcgggggcagacccagtggacttggcatcttcgggggcagacccagtggacttggcatctttggggaattcttgcctgcattagtgttggctgtgatgattgtaaaatggaggcttctcaactcatcatttcttcagcatttgccactcggccttctctttatttcatgtcagtgtggcttctaggggttagagttcatgactgttatcatttattttgatgttcacttggcccagatatggccagaaagactccctccaggctggcttctgggtcctcttgccattcgttcatgtctgtgccactctcgggcactgcacactgtctgtggctcatgtgttcacttcctgccccacttctggaatcagccatttctccgaggagccctgcttccggctgatggggaacagcacatagaaaccacgacctgggcaccaagaatacacctctgctgctgggtgttgtcctttctaggccctttcagcagacagagctaggagttgaattttaaaaccaagagttcatcatggtgcccgtcacattgcagcaccacgggggtctttgcccaccatcagcccacagttgctccttcctcccacagtgccaagtagctggggacttgggaacgtcagcagtgctgttcttatcaaagtttcctgtaaccctgtctctcagcagtgatttaagaaattaaggcttttcactggttgtcaattttctttgcctccctggggctgaatacagcctgttgtttcaagtatctaaagtggcttaaaagaaacttctccataaaccgaatagcacatcgctagagactctgagaaaagtactacttagtgataattgctatagaatatgtgacaaaatgtgctttcgtttcaaataaagtggagatttattcagaaaagtggagtgtagaactacactgttaaatagaaggatcacaacaatgtactcgatgtattatttgtcccttttggtaaacgtaatgagtgaaattgtaagtcaaagctgaagctcttttccctccatttcatcatgaagctcttcacatggacagcaaagctgcaggattttgtggtgcgcgcttgtatacccgccacttcagccgtgtcgccatgctttgctgtgttgcatttgtccaggtgtcccccacagccttccacgcctgcgtgaatgtcagtcacagacgtgagcgtcagtcacagacatgagcgtgctctcctgccttcaccatgcctgtcagggaccagagttcagcagttgtcttgttttttcttttgagatacatttttcatacgggaatatgtgggaaacttaattgtgctgttcagtgagttacacccacatagccgcgaccgagacagaccctcgatctggaagattcagcctcccccacgcatggccgtcccccaggcagccattgcccccctccctccatacgtgagtctcaccttttctagagcggcatagccacgaaattacacggtagggtcttttgtggaaggcgtctttcgctcacatgatgtgcttcagactcatccatgttttacatagagcagttcgtttctttttatcgctgaacagtgttagtgattgcacagccgcctagctcacctccaaaggagagacacgtaaaacagccttttgtgtttggaatgccttttccagaagatcccttgatacgagagccgcatgtttgctattcttgatgccctgctggtatcgtgtgagtgttccagtctgtctgtccaccctcctacagagtgacatctgggctgtgttcagcttggggctgtcacggagccttcctgcgcaggtccatctgtggatgcaggcgccttttctcctggatgaaatactaagagtggaattgctgagtcataggtggtcgcatgtttgtttaggagcagctgccagaccttctttgcaaatggttgagccatttgcacttccaccaacactgtgtgagagttctgttgctgtacatccttgccaacatttggtattgtcattctctttaattttagccattctggtaggtgtgtagtcatctgtcatttggagttttaatttgcctttgtctggtgactggtgatgagcacagagctcttttcagcgtgcactgtgtttgtgtgtgtgtgtgtgtgtgtgtgtgttatgggattggagtaggcagtctgtgtgtgtgtgtgtgtgtgtgttacgggattgggggagtaggcagtctgtgtgtgtgtatgtgtgttatgggattgggggagtaggcagtctgtgtgtgtgttacgggattgggggagtaggcagtctgcgtgtgtgttacgggattgggggagtaggcagtctgcgtgtgtgtgtgtgtgtgttatgggattgggggagtaggcagtctgtgtgtgtgtgtgtgtgtgtgtgtgtgtgtgtgtgtgtgtgtgtgtgtaacaataaattactaccagtc

SEQ ID NO: 761 - DNA, 1932 bp, Homo sapiens
aaacttgcttctttcttaagcaatatgttgggcataaggaaagttcatgttatcttagaatattaggacagtggcttctccattctggctgtgcatcagaatcacttgtagtctgttaagtaaaaaataaatgcctgccatgtcagaaactcctacattttctaatttgctatctctgatttgctgtgccctgagaaattagatggccaaatatgttagaattcagtctaaaatgaaagtgactaggttctgagtgagaaccatgggaatatgtataaaggatgtgtgttttcttgccctgacactagtgctgtttcagttccttggtggcttttgttgtttgcttcttggtgctaatcgttttcaacagatacaatcacttctgaggagctgctgtatcatagaaatgaaatgttctttactctctaacagaaagtcctctttccaactcaaactggtctttactggtgtttatccttcgaaagggcaacagaacaagttcttgcagaggtatttagcaatgtttaaggccttaaaatggaactatttgtcagttatgattggtggcacctctgcactgcaaacagtacaaaaaccaagattctctttattctcctttgtaagtaagaattctaaagatctataagtgagaacacataaaagtgttaggttaaatttatagtgtagccattggttcaactttctctttctacatttggttcagtggctttttttcctagcattttttttttatcattttttaaaaagttttgaatataacttttctgtaatgtatccccaccacccgtctgtcaaaccacgaagattgctacatgtatttttctttattccttgttctaaataagatttagcacagtggtgtttcatttttttctttatgctttttttttcttctttctttctttccttccttccttccttccttctttctttctttcttttctttctttttttttttttttgagatggagtcttcctctgtctcccaagctggagtgcaatggcttgatctcagctcactgcaacctccaccttctgggttcaagcgattctcctgtcttagcctccagagtagctgggattacagacatgcaccaccatgcccagcaggtttttgtctttgtgtagaaacagggtttcaccatgttggccaggctagtctcaaactgctgacctcaagtgatcctcctgccttggcctcccaaattgctgggattacaggcatgatccaccacgcccagcctcttttgtttttaagacagggtgtcactctgttgcccaggctggagtgcagtagcgcaatcttggctcactgcatcctctgcctcccaggctcaagtgattctcctgcctcagcctcccaagtagctgggactacaggcgtgtgcccgctaatttttgtatttgtagtagagatggggtttcaccatgtggccaggctggtctttaactcctcacctcaagtgatccacccaccttggcctcccaaagtgctgagattataggcatgagccaccacacctggccttttttttttattttttacttttttgctaattaggtcaagggttaattttataaacaagactgaaatattttgttgatttaaatgttctggttgactctctttttaacaagaagtgaaacttttactatatattttatataactccttattaaaatgaaatacatttattgcaatttatacttgagatacaatactatacatttaagttgtatattacttttgtaaaccataaaaaaatttattgggaaaatgtcaaaagatggtttgtagattctagttacgtgcctggaaagaaagaaaaatacttttttattatttgggtgtaattcttttgaaacttcaaaggaaataatcaataaaatgtaacatgcttttcaaaccat

SEQ ID NO: 762 - DNA, 1645 bp, Homo sapiens
agctctgggagaggagctccagccttgggattcccagctgtctccactcggtgatcggcactgaatacaggagactcaccatggagtttgggctgagctgggttttccttgttgctattttaaaaggtgtccagtgtgaggtgcagttggcggagtctgggggaggcttggtccagccgggggggtccctgaaactcccctgtgcagcctctgggttcaccttcagtggctctgctatgcactgggtccgccagacttccgggaaaggactggagtgggttggccatattagaagcaaagctaatagatacgcgacagcatatgctgcgtcggtgaaaggcaggttcaccatctccagagatgattcaaagaacacggcgtatctgcaaatgaacagcctgaaaaccgaggacacggccgtatattactgtactagacatggaaatgacttacctggaactactgcccttttgggtatggacgtctggggccaagggaccacggtcaccgtctcctcagcctccaccaagggcccatcggtcttccccctggcaccctcctccaagagcacctctgggggcacagcggccctgggctgcctggtcaaggactacttccccgaaccggtgacggtgtcgtggaactcaggcgccctgaccagcggcgtgcacaccttcccggctgtcctacagtcctcaggactctactccctcagcagcgtggtgaccgtgccctccagcagcttgggcacccagacctacatctgcaacgtgaatcacaagcccagcaacaccaaggtggacaagaaagttgagcccaaatcttgtgacaaaactcacacatgcccaccgtgcccagcacctgaactcctggggggaccgtcagtcttcctcttccccccaaaacccaaggacaccctcatgatctcccggacccctgaggtcacatgcgtggtggtggacgtgagccacgaagaccctgaggtcaagttcaactggtacgtggacggcgtggaggtgcataatgccaagacaaagccgcgggaggagcagtacaacagcacgtaccgtgtggtcagcgtcctcaccgtcctgcaccaggactggctgagtggcaaggagtacaagtgcaaggtctccaacaaagccctcccagcccccatcgagaaaaccatctccaaagccaaagggcagccccgagaaccacaggtgtacaccctgcccccatcccgggatgagctgaccaagaaccaggtcagcctgacctgcctggtcaaaggcttctatcccagcgacatcgccgtggagtgggagagcaatgggcagccggagaacaactacaagaccacgcctcccgtgctggactccgacggctccttcttcctctacagcaagctcaccgtggacaagagcaggtggcagcaggggaacgtcttctcatgctccgtgatgcatgaggctctgcacaaccactacacgcagaagagcctctccctgtctccgggtaaatgagtgcgacggccggcaagcccccgctccccgggctctcgcggtcgcacgaggatgcttggcacgtaccccgtgtacatacttcccgggcgcccagcatggaaataaagcacccagcgctgccctgggcccctgcc

SEQ ID NO: 763 - DNA, 2222 bp, Homo sapiens
ctttcgcaccatcaagggacttctgtagactctgtacatgagttcagggatcaccagagaccccctttttatgagttcccgtgcagtggagctgctgaggtaggattaatttctctgccttcttcccctgccatagacaatgtttaacctgattatgctctgcaggcaagtagccacccttggatattaatctccttatcgaataagataaactgtgaagaaggcatgccgtaaaggagggaatgcaaagctagaaaatatgttcgaatctgtcatgggaagcatggagggagaaatgaagatgtgtggacatctagtattttctctgctttcccttctctctggtcctttaaaattttcaattctcctgaaaagaaaaattgtatcttgtttttgtgaagccatttccagcatgaaaacaattccatttgacagtgtaaactgtcctatgcttagctgtgtgcttgccctgcactccctccctgcccccaactgtgtgaaacagatgcctgcagtgacactgcccatcaatcaccccacaggaagcagggcacaattcaaaaccccaaaatgcagaaacgtgttcacctgtgccttccacacagtggtggggtaggtaggaagcctagggtattacttggaaaacaagcaacattttaagacagattaagtgtaaacttctttgctcttttctctggcatagttttgagaaatcaccactaattggatacattgtaatgtacagataaattttcttcttttttactatctcatttacaatttaatatctaacatacaaaagttgatcaaaggcacaaaaacactagataaaaggttgaatatttaataccaacccttctgagttaattaccagatccttgtttttcagtaggaggccagcaagttaggagttaagatgaaaggagtcctagatttaaccccaaaagaccccccttcaattttagccaggtcaggcccacaaagagatgtagatgtaaactgattatgatgctaagtgtttgacagggatcctctttgtgtccagggccagtcaaaacttgaataatagtatttccgacaaaaagcttgccccctttgctttttaatggttcattttaattatttctataaatctgcttgagaaatattaagattctgattgttgtggactggtttattatttgctaccatacccgaagtatttgccttctcattatagaagcttagtggaaagaactgtccagagctagttcactaaactaagcacacactcgatttccaaggggagcagaaagggctttaccaattgctaagtcaccaacatgtccctttgcccatctttctatgtcctacaaagacttatgtggggtgtgcacatagtatttccccagggaaacacacacacacacacacacacacacacacacacacactctttctctctctctctctctctctctctaatattgttgattgattaggtttgtttggagactgcttaaactgtgtgtgttatggtttcaaattactgtttgctcttctaacttcttagaagggtaaacaatttgaaaacagtttaaacccatagcaaaagaaactggcatctgacaaactctttaacttaattcctcttattaagactcatatactgttttctggtggtaaataatggaaagaaatgataggttttgatgttatattttacagctatttttctcctcaaggtttgaatgttataacagccagaccctacacaaacaccaaccagttttctaagcactgagtcaattgtaaactaaaaagagctctagctggaggttttctgggtgaaagctcagtgatatctacagttttttttttcttagtctcctcttccatctccagcctctaaaacacacacacacacacacacacacacacacacacacacacacactcacgaaaaacaaatggatggacaatttgctctaaggaaatacagtatagataggcaggcatgagagtcatcacattatcttactacctcattcctgtatgttgggtaaaggttgtcttttaatctctcctaccttcaaacaaatcaggcactattgttgacaaaatacccctatttacttctggcaaggcaaatgtcattgatgctaccttagatactaacatcacatgtggaagcattttctattttaaactttcaaccctgtctaaaaaaaaaaaaaaaaaac

SEQ ID NO: 764 - DNA, 2245 bp, Homo sapiens
ctgggcctcaggaagcagcatcggaggtgcctcagccatggcatggatccctctcttcctcggcgtccttgcttactgcacaggatctgtggcctcctatgagctgactcaacccccctcagtgtccgtgtccccaggacagacagccatcatcacctgctctggagataaattgggggataagtattctttctggtatcagcagaagccaggccagtcccctctacttctcgtctatcaagataacaagcgaccctcagggatccctgatcgcttctctggctccaactctgggagcacagccgctctgaccattagcgtagcccagactatggatgaggctgactattattgtcagacgtgggacagaagcactgcggtgttcggcggagggaccaaactgaccgtcctacgtgagtctcttctcccctctccttctccactcttgggacaatgtctgctgattttgtttgtttctgtttgtttctctgtcttgcctcacaaattccccctgcatccccggcctgaacaaggacctccgccctccctgttcagaccctagcttggatttgtttgcttctgtatcttgtctcaacttctggtcatgccttccccctgcatcccaggcctgagcaaggtcctccgccctccctgttcagaccctcccttgcctcaaaaggtcaatagactcacgcagggacagcggactacatagaatgacctactgagcctcgcctgtctgtctttctgtctctctgtttgtctgtctgtctctctgtttgtctctctgtctgtctgacaggcgcaggctgggtctctaagtcttttcctgttatggcattttcagtctgggttcttgtcggaacacctttgaccttgggttatctgacttccatctcctggggaattgggaacatggggtctgagggaggcacctcctgggaggccttagaaggacccagtgccctcggggctgatactcgggaatcacagagctgcggcccagagccaggatccagacccagagtgaggtaggaggtggaggggctgccctgggcgtctgggggctgccagggactgagccctgagccagcctgagactcaggaaaccccgtcaggagggagaaggggaagggtcacaaaaggagagtatgtgacggaggggcgggctcctgggtctcttcagaacatatcccctgtgcccagggagatcagaggggcagagtccactgcgtggaagccccactgctatgaccaggtagccgggacgtggggtggatgccagaaaagactccacggaataagagagagcccaggacagcaggcaggctctccgatccccccaggcccttgccccatacacgggctccagaacacacatttggctggaacaccctgagggaccaaaaggccccagtatcccacagagctgaggagccaggccagaacagtaacctcagagttcgctgtgcaggggagacacagagctctcttaatctgtcaggatggcaagaggggacagggtcagggcgctgagggtcagatgtcggtgttgggggccaaggccccgagagatctcaggacaggtggtcaggtgtctaaggtaaaacagctccccgtgcagatcaggacatagtggaaaacaccctgacccctctgcctggcatagaccttcagacacagagcccctgaacaagggcaccccaacaccacatcatatattgaggtcaggggctccccaggtggacaccaggactctgaccccctgcccctcatccaccccgcaggtcagcccaaggctgccccctcggtcactctgttcccgccctcctctgaggagcttcaagccaacaaggccacactggtgtgtctcataagtgacttctacccgggagccgtgacagtggcctggaaggcagatagcagccccgtcaaggcgggagtggagaccaccacaccctccaaacaaagcaacaacaagtacgcggccagcagctatctgagcctgacgcctgagcagtggaagtcccacagaagctacagctgccaggtcacgcatgaagggagcaccgtggagaagacagtggcccctacagaatgttcataggttctaaaccctcaccccccccacgggagactagagctgcaggatcccaggggaggggtctctcctcccaccccaaggcatcaagcccttctccctgcactcaataaaccctcaataaatattctcattgtcaatcag

SEQ ID NO: 765 - DNA, 2128 bp, Homo sapiens
aggggtgaataaggcggaagctgaggggacagtcacagccaggacaggaatgtcacccccagctggcagacagcactctgagcagccaggcctgggatcctctgacctgcccacttcaggaggccagtgtggtcactgccaccccacggtctggggaccctggactccaaacttgtaagtgctagagtgggcagctggaggccatctgggcactttaaaacacaggtactcgggaacaaacctctgatggggtgggtggggtgagggatgggggaccttgggtcccaggccctctgtgattttctgatgaacttccttctgtgggagcgctggctcagggagctcctggcctctcctcctctaccacttcctccgccacccgcctccacctgctcccggcctgatgtccgcagggtcatgtgtgcagtagtcccacgtccaggctcactgcagaggcagccctcttcagacaggaggcagaagagagggcccccgcaagttagcttttactttaatattattatgtcattatgtgtattattattgtcatcaacatctttttattctgcaaatactaatttcatatcccatatgggcaggctctgtgcaaggtaaattactaagttttgttaatgaagtcaaacaaagtcatgggttctataagaagacaactattttaaaatatggcataaatgacattatatagttaagatagtataaagacacgacttggaacaagcaaacgtgggaacaaggcaaggagaacgtgtagcttccttttggagtgctcatactaattgctgatgaaacatttctgcactcggcagggaatcagtccacagcccccctctgattaaaatgcgacccagcttggactctgagagcaaatgtcccagcgcccctgggaagaagtgatgcaatcctctctttgagctgtttatcatttctgagaagcaatgacatagctgcctcttgcagtttggtctaattacttgtctgatctcccccagggagaagcagctctgttctcccttggcctccagacagtggggcccacagtctctactggaggagtggggccggccatcgtgggcaggggaggtggagaccccttgaagctgatctgtattgcagggtgtggagtagggctgggggttcctgggcctctaatctttaaaatccagcaagaaggtagtgtactgtgagccaggcccatcattctctttcctccctgaaaccatcgatgagtcttcccctaagggctggaggggagggtcccctttctttgacttcccttgcagttcctctgatgctgaagagtagggcttgcagggactctgcctcctgcagggagcagccactgtttccagggaccctcacagaagaggagctaatttcacactttgggactccatagaagccagcttcctggcagtttgaagtgtgcttctcacacatcttccaccagcttgtttgtctgcctatatctgaggatcctttaaagcgattgaaacaaaattaagggcagaatgaatctttggtgatgaaagtgagaatctgggagagatgtgaaaactggaagagaaacaggaagtacctccaggattcacctaaatagatgctgcagtttctatcaaaccacaggccaccccagcatctcagtggcttctataggttgtcctgaaagagccatgaggccagggcccttgatggattcccagataccagctgctcctccagacaccaattccaccctccacctttctgtgtccgtcccagaccaaggcagcccaggtaaggagccatgggtaggaggtttcccagtgggtagaggtgccagactcagcagctagaaatatagaatgctgggttaaatgtaaatttcagatcaatgataattttttgggtaagtgtatcccatgcagcatttgaaatacaatttaatcaaatttaactagatgtcctgcatgttgtaggaaactctctaggaggtgtgtctccaggatagggccagtggagaatggcagcccacactgttatgggatgaagtgtgtcccccaaaatcaacatgttgaagctctaacccccagaacccctgaataaaactgtatttggagttaagatcttt

SEQ ID NO: 766 - DNA, 3785 bp, Homo sapiens
acagaaggaagagcgcgaaattgcccaggatggacactttcaaaggggccccagcggctaagtgactctcagggaaggtggccttgccatcccaacttctatttaggggcaaccactagcaagttcttctcttcgggcaattggaaagagttcctataagcaaagtggaggtgatgtggacccctggaaaatttccttgccccgtttgaactttgcaatgattcactgcaagtcatgtccacgtggaaagcaagactcaccaaaagactgaagtctccctctagaagcatgcatccatttccgtgctcagctctgctcgcctgttttgggaatacgagggagagtgcttccttcaatcagtccggcgtggctgatactcattccaccgtccgtgtgcagcctgtggccaaagcaggcagacagccaagacacccaagcgcagaaggagctccagagaaaaggcaagattcgagcacccatgcagagagaaatggcagtgcgaatcggaattcaagtcaccgcactgcggcccagcccgcggagacgcctgaagatgtgcccgggtccctggatgatggggcggactgtgaagcagtggtgtttcacgcttccatccccagaccatcaattattgacacgcccaaggaagaagaatttcgagaagaacctaaatgcctcgagctggagcagaaaatgacatcagacagcccacctgaggatattgaccataaggactcatatctcattacaagaagcatcatggccgagccagactacatagaagatgacaatcctgaactcattaggcctcagaaactgatcaatcctgtaaaaacctcccggaaccatcaagatcttcacagagaacttcttatgaatcaaaaaaggggtcttgctcctcagaacaaaccagaattgcagaaggtgatggaaaaaagaaaacgagaccaagtaataaagcagaaggaagaagaagcacagaagaagaaatctgacttggaaatagagctattaaaacggcagcagaagttggagcagcttgaacttgagaagcagaaattgcaagaagagcaagaaaatgcccccgagtttgtgaaggtgaaaggcaatctcaggagaacaggccaagaagtcgcccaagcccaggagtcctaggctgaggctgcaccaagacctcgtgtgtcaccccacagagctgtctgtgggtgccttctcaatctcagggcaatagcccctggagaatatttcagccagcagagaattttgacttgcagtaggatttggtttgattttcctacgatctgggtggatgccttgcctgtgacagttgcagttcctattcgccaaatgaagggcagtgccccgcacgtaagttggaatgatggacctgtgttcagagacttaacagaaccaacaagcaaaacaagtgagaacaggaaaaaggaagaggacactggaatcaattcttgagagttgcactacttggtttttcttccattccaagtttcgtgggacccagagccttttttcttttaaaagctaaaaaacaagtgtttaattcctctttttgttatctgttagataattgagatcacctagaaatgcgtttaatctgttcactcactgtaaattttgaggacccagaattgtcttgtttaatttatactttcacccctgttgcagttaacaccagagaaggaacgtgaatgtcgagcacagccactacccttgttggcacttaatttagaaatagggtgagaagtttaaaagcccatcttgattttattttcattccttttggttctctgtgtaataatagcaggctacatagtgacattccagttccaagaaggtacatcctgtccattcattaattgctttgattactaggagggtttctgttcagttttgtttttaaatgtcttgctgatctagttctttcagatggaataaccttccagtcccttagagagtggaactagtccatataacccagcttcagtagcaaaagtagaagccgccacatcttttcatttctccaagaggagagtggggaaggttcccatgaccagctgggcagtcaggatttctctaggcattctaatgtgaaataagtgtagactgctgtcaaggaggcttcatcagaagatgtatagcatttgaatgtctaatgataatgcatatcattagaatccaagctttgaaaatttctgattaatgctcatgtatttctttatctttgtttttccttgtgaagaaagactttcaccactgtctgagtgatgatgctgttgataaggatgatgtcgatgactactatattgcatctctcaggaacagctgatgggaagggaggggctgctgagttcccttgttctagctagcagcacgctcctcagagagggggccgagttacagacagcagccgcattctcatgcaaaattagttttaaactgctagtgtgggcatcggtaccttttgcctgggtgataccgaagaattgttgaggatttagtatgctccgtagagacagttcagccagtcatttctgcattggagagacttctcatactttctttgaagactcatagaaagctggatctagagctcttgaatccttaattagcacagtagaaattagctttctatgggaatgctttagtgttagcagttgacaattaggcccatattcaatctgaatgggaacaaaagtaaatgcaatgataatatactgctagttagagaaacatgttagttgattatacctgaaatggattatttatctcatcagcaagtattatttgaataaaatgagaaatgcttaagaaaaattgttgctctacagtaatttggtttcgaagaatggaatggtaactattttttcccatcgttcttttgagagaaggaagtgtgatgactgatgatcttgaaaagcccatttctgattgcacgttgactggaattctttctttgtgtctgtggactagcgatgctgtttgtaaaatgaagattcgggactggctcatatctttttatctaactagatgtcagatcttgaaatctgtattctcgaagcaattctgccacttgatcgtattcacaggggccctggtaggctcctttagaaggaccatttctgttcctagagcttaactagaattcattcttcactgaaaaaaaaaaaagttacttaagaaagcatttctttcctaatctcactcaaatctgcagaattatttgtaattagtaatacaaaatctggccaaaaggagacttgtaaatagcgtaaagtggtgtcttatgctaaacggtggaatgtataggcagagaagctctttgaagttgtcagatgagctgggctcacaagcctgattcaaacaggctgtcggtctcctctcaccccttaatactgtgcagcccaaactcctaggactcttgaacatctgagcagttttgtgctttgagccactttttgacaaaaatggctccatttttccacagcgtggttttcttaaaatagtttaatgttttatagtctcatagtagtagtgttgctttctaagctataacagtcgaccttattcttctactctgaaaaatcttgacttgtttgagtgtatataatatatataaagggagccttaatggattggttttcataatttaatattttttgtatttgctcttgtataattgtttttaacggaaagtattaaagaattgagggtggaattcttagaaccaaagttattcttaataaaaatcaccacatgcttggaccatg

SEQ ID NO: 767 - DNA, 1960 bp, Homo sapiens
gactgtgtctccaaaaaaaaaaaaaaaaagaaaatggagctgcctaaattctgtccctggctacttgttaattgttgataggatggaatgcttatggatacagttctgggtatgtccctcagatgtctttcctgttttgagggaaacaaactccttgagagaaagaaaaaatttggtgaggccatccttttgggagatcaagatgaacaacaaaacttgtataaagagagtgattccctacctcagcaaaagtaatattagcatatttaggagtggcagggtcaacataagtggacaaagaaaaagcaagaacaatatcaaggcagccatgtcaatcattctacagtgctttgccagcctccacagaattttaagcaaaattttatgcaaaaataatgtgtacctagcagagctttcagtgtattttcaccaaccttacctttttttctgtggagaaagaagatgatctagcttgttcagtaaatattattttcacaaaatagaaaataaatattaaaacacttagaagatttataaaaattctatcaggcatgcagggcatgtgattatctttttattcatgcgattgcttagtggattaagaaaagaaagttgaagccaaattccttttacagggccagcgtgggggtgagtggtgagtggtgggatgggaactggtagaaagtgttttaaaatagaaggaatctgactatctgtttagacagcataatgctactgattcagctaaaatataatgattgtttatagaaattataaaaatccttgataagatcacattgacagatgaagataactacttttgaagattagttttgtactcagctccactgttttttctcactgttaggagcctaagtaccctatcagtctgtgattagattttgatgccagattaggagaacgtgtataatcttgcataaaactcaattattgctgttaaataactactgtcaaatcttaataaagccctctcactacagggagataagatattttattctttcccttgtcctactgggaggtgtaaatatgtaattaaatttgatgtcattaatcactttcaagttgtttgcttcagactttcaaatataaaccattctaaatcccaatttgattaaagatcatggacaactcaagttcactaggattctgggggtaggttaggttatgatttgtataattgacaaaatatgtattttaaggacatttattgtagttatctaaaatctttgtctgctggttcttaacatctgggttgtctatggatgtgtttctgtttctatcacctgctccttctttggaccatgggtatgacttccctttactttacacatgtatggtagttttacattacttactggacattgtgggtgatagattttaaagtttatctcccactaaagaatgttgaattttgtcaagattggcagatcatcttgatcctatggatgctaggttttaggacacgttagggtgggcctacttctgttctgcccttagtccgatgacacaaatcttagtcatgggatagggctcttattcccaagatgtgacccttctaggggttcagtggaaagtgtgaggggcctaccaagccctgaggtgttcattaagcccctctaaggcagaacttgtcctcccagccccaggagccttctgctcagtcttttcagccgtccagctcttactttctcttgggtttctgaatcttatcttgctcatgcatagtcaggaattatttaaggatttgagcagagttgtatgcatactttgaagctacccactctgtggttctgtcttttccaggaatttttctcctcatattctagctgctgtgacagctccagatacctctgactcctcagtatcgcaggacttccgttttctgcttgcacactcttcctcttctgctgcatgaactggggtgtaccttcacgat

SEQ ID NO: 768 - DNA, 1628 bp, Homo sapiens
agctctgagagaggagccttagccctggattccaaggcctatccacttggtgatcagcactgagcaccgaggattcaccatggaactggggctccgctgggttttccttgttgctcttttagaaggtgtccactgtgaggtgcagttggtggagtctgggggaggcctggtcaagccgggggggtccctgagactctcctgtgcagcctctggattcagcttcagttattataccatgaactgggtccgccaggctccagggaaggggctggagtgggtctcatccatcactattagtagtacttacctatcttacgcagactcagtgaagggccggttcaccatctccagagacaacgccaagaatgtgctgtatctgcacatgaacagcctgagagtcgaggacacggctgtctattattgtacgagggatagggtagtggctggttcggatccaaactttgactattggggcccgggaaccctagtcaccgtctcctcagcctccaccaagggcccatcggtcttccccctggcaccctcctccaagagcacctctgggggcacagcggccctgggctgcctggtcaaggactacttccccgaaccggtgacggtgtcgtggaactcaggcgccctgaccagcggcgtgcacaccttcccggctgtcctacagtcctcaggactctactccctcagcagcgtggtgaccgtgccctccagcagcttgggcacccagacctacatctgcaacgtgaatcacaagcccagcaacaccaaggtggacaagaaagttgagcccaaatcttgtgacaaaactcacacatgcccaccgtgcccagcacctgaactcctggggggaccgtcagtcttcctcttccccccaaaacccaaggacaccctcatgatctcccggacccctgaggtcacatgcgtggtggtggacgtgagccacgaagaccctgaggtcaagttcaactggtacgtggacggcgtggaggtgcataatgccaagacaaagccgcgggaggagcagtacaacagcacgtaccgtgtggtcagcgtcctcaccgtcctgcaccaggactggctgaatggcaaggagtacaagtgcaaggtctccaacaaagccctcccagcccccatcgagaaaaccatctccaaagccaaagggcagccccgagaaccacaggtgtacaccctgcccccatcccgggatgagctgaccaagaaccaggtcagcctgacctgcctggtcaaaggcttctatcccagcgacatcgccgtggagtgggagagcaatgggcagccggagaacaactacaagaccacgcctcccgtgctggactccgacggctccttcttcctctacagcaagctcaccgtggacaagagcaggtggcagcaggggaacgtcttctcatgctccgtgatgcatgaggctctgcacaaccactacacgcagaagagcctctccctgtctccgggtaaatgagtgcgacggccggcaagcccccgctccccgggctctcgcggtcgcacgaggatgcttggcacgtaccccgtgtacatacttcccgggcgcccagcatggaaataaagcacccagcgctgccctgggcccctgc

SEQ ID NO: 769 - DNA, 1840 bp, Homo sapiens
agttcatctctccttttggtttcttaatttcattcactcttttcagagacctttttctgtcatcttctcttttatcctcccatattttcaacctgtttcctattgattccttctccacaggctagaaaatgtgctcagatactttttacctttaaaggaaaatgaaagtttttcctggtctttgtgtccctttctagctgccactgtattcctcttcctttcactacgaagctcctcagagcaatcatcttgtcgtctccatttctactttgttaccttccgcttgctccctaaccctcggaactggcctcttacctacctcctcattctcctgaaacagctccagaagaggtcaccaaagacatcctatgtgtttgtttcattcaagaaatactttttttttttattgagatggagtctcgcactgtcatccaggctagagtgcaatagcacgatctcggctcactgcagcctccacctcccagttcaagtgattctcctgcctcagcctcccgagtagctgggactacaggcacacaccaccacactcagctaattttttgtatttttacaaaaacaaaaaatacaatatgttgtccagactagtctcgaactcttcacctcatgatctgcccaccttggcctcccaaagtgctgggagtcataagccaccgtgcccagcccttaaaaaatactttttgagcactaacagtatgccaggaactattccaggcacatgggatagtgcagggaggaaaaccagcagtccctgtctttgtgggaatcacaccccagtgcaggaagacaagaagtaaaaaagcaaaacccatgtatagtcgaacttgccaaatcagacagactctttgatcggaatcttcttgcagactgggactttgtttctttttcaccttgtaccccctagtctctggcatagtacctggcacatagtgggtattcagtaaatagttatgtgaatgaatgaatttcatatgacccttctatagcatttgacaccactgacctctcccttcccttgatgttgtgacactgctctcgcctggccctccctatcagtctaatcactcactcttagcctcccatcctgcctggccttgtgatgacttcaccctggccaagatgactcttgaacctcatctggacaagctccccagttctcagcactccagtcaccctgtttttgctgatgactcccatatagacatctgcccagtgtcagcttcatatcagcacttggacagctttacagtggtcccaaacaggctcctcctcctggatccctgtcttggtaaatggcatcagctgccagcagccagccagtcaccagcacaacctgactcctttcctttacctgccacacacaccaatcctgtcgttcctgtcatcttagcagctctcttctctccctcctcctgcttcatgctacagtgtctgcactgtggccctctgctctgcctggagttcttgttaactgtccatctgcctccaggctggtaccactcagggtctctctgcatcactgctagggtgattttttctttttgagacggagtctcgctctattgcccaggctggagtgcagtggcacgatcttggctcactgcaacctccacctcctggattcaagcgattctcttgccttgacctcccaaagtgctgggattacaggcatgagccaccgtgcccggctgggtgattttctaaactactctggccatgttactctcttggataaatagagtgaaacttgagtaagttaagtaaaagtgtgaacgacagtggtgcctgtgggaaaggtgtccttagcacacctccctggcct

SEQ ID NO: 770 - DNA, 3102 bp, Homo sapiens
cgatatgttgcccaggctggtctcgaactcctggactcaagcgatccacctgccttggcctcccaaagtgttgggagtgcagacacgagcccctgcatctggtggacgtctgactgaatcctgcctgtcctgctccgtcctgtcctgctccgtccttaaacacagtgaggcttaagggtgaagaaagttgctgaagcttgcctttggtccaggactctgacttcagagtacaggctcttaggatgtgagcaggaggatggcaggcgggcacagaattcagaaagaatgagggagaggctctggccctctgtgacccgaatcaccgagcccctctctcccctcagctcacaagtacgtgcctcgagccattctggtggacctggaacccggaaccatggacagtgtccgctcaggggcctttggacatctcttcaggcctgacaatttcatctttggtaagttccccctgctccaagctctgatggcagaccccatcacaggcaagcccaggtcggtggacggggacggctgtgagaaacaaggaatggtcagctcctcacatgatcctgaatggtgggaactcatctctccattttacagctgggcattggaggcccagagaaagggttctgtggggagaacagaaaccactcatgcatttcaagtggaatgaagtgtaaagcagacagaagcttacagaattgctagagagctggtgagacagaacggggcctccagaggactccggggtccaggagcacgaggccttgctgcggtcaagagatcaggacgttcccatgcctgtgtcctggggttgggccgtggatgccacgttcccatgtctgtgtcctggggcggggccgtggatgccacgttcccacgtctgtgtcctggggcggggccgtggatgccacgttcccacgtctgtgtcctggggcggggccgtggatgccacgttcccacgcctgtgtcctggggcggggccgtggatgccacgttcccacgcctgtgtcctggggcggggccgtggatgccacgttcccacgtctgtgtcctggggcggggccgtggatgccacgttcccacgtctgtgtcctggggcggggccgtggatgccacgttcccacgtctgtgtcctggggcggggccgtggatgccacgttcccacgtctgtgtcctggggcggggccgtggatgccacgttcccacgtctgtgtcctggggcggggccgtggatgccacgttcccacgcctgtgtcctggggcggggccgtggatgccacgttcccaagcctgtgtcctggggcggggccgtggatgccacgttcccacgcctgtgtcctggggcggggccgtggatgccacgttcccatgcctgtgtcctggggcggggccgtggatgccacgttcccatgtctgtgtcctggggcggggccgtggacgcgccacagaaacaggagggcctcgcttcacttctgccttcccgaccgcagcacatccagctggtagatgccaactcgcatccagcccccagctgccagggattctggggtggctgtttgggctcctggcactgccagtcggaaggaaggtatgctggagcaggagggctgatccattcacccaggatcccctcaggaggcagagcctcgctctgctgtgaccccaagttctcaagaccctgtccagagccctcgtcctgagcactcagcagcatcggctcagggaagccacggcgggtcagagtggggccggcaacaactgggccaagggtcactacacggagggggcggagctggtggattcggtcctggatgtggtgcggaaggagtgtgaaaactgcgactgcctgcagggcttccagctgacccactcgctggggggcggcacgggctccggcatgggcacgttgctcatcagcaaggtgcgtgaggagtatcccgaccgcatcatgaacaccttcagcgtcgtgccctcacccaaggtgtcagacacggtggtggagccctacaacgccacgctgtccatccaccagctggtggagaacacggatgagacctactgcatcgacaacgaggcgctctacgacatctgcttccgcaccctcaagctggccacgcccacctacggggacctcaaccacctggtatcggccaccatgagcggagtcaccacctccttgcgcttcccgggccagctcaacgctgacctgcgcaagctggccgtcaacatggtgcccttcccgcgcctgcacttcttcatgcccggcttcgcccccctcacagcccggggcagccagcagtaccgggccctgaccgtgcccgagctcacccagcagatgttcgatgccaagaacatgatggccgcctgcgacccgcgccacggccgctacctgacggtggccaccgtgttccggggccgcatgtccatgaaggaggtggacgagcagatgctggccatccagagcaagaacagcagctacttcgtggagtggatccccaacaacgtgaaggtggccgtgtgtgacatcccgccccgcggcctcaagatgtcctccaccttcatcgggaacagcacggccatccaggagctgttcaagcgcatctccgagcagttcacggccatgttccggcgcaaggccttcctgcactggtacacgggcgagggcatggacgagatggagttcaccgaggccgagagcaacatgaacgacctggtgtccgagtaccagcagtaccaggacgccacggccgaggaagagggcgagatgtacgaagacgacgaggaggagtcggaggcccagggccccaagtgaagctgctcgcagctggagtgagaggcaggtggcggccggggccgaagccagcagtgtctaaacccccggagccatctcgctgccgacaccctgctttcccctcgccctagggctcccttgccgccctcctgcagtatttatggcctcgtcctccccacctaggccacgtgtgagctgctcctgtctctgtcttattgcagctccaggcctgacgttttacggttttgttttttactggtttgtgtttatattttcggggatacttaacaaatctattgctgtcagat

SEQ ID NO: 771 - DNA, 1819 bp, Homo sapiens
ttttttaaaaatcacaatgttattcaaacatagctccataacatattagtaaaggtcatgaagtatttttaagtgatccattatgtcacagtcgagcttatccaggaatacaaggttgatgtaacattggaaaagcaataaatacaaataccacatttatttaatttaatttatttatttttgacagagtcgcaccctgtcacccagcatggagtgcagtggtgcaatcttggctcaatgcaacctccacctcccaggttcaagtgattctcctgcttcagcctcccaagtagctgggattacaggtgcacatcaccacacccagctaatttttgtattgttagtagagatggggtttcaccatgttggctgggctggtctcgaactcttgacctcaaatgatctgcccacccccacctcccaaattgctgggattacaggcataagcccccacacccagcctgaccacatttgttttagaaaagcgtctttccatgcattcacttcttcaagttttttttttgttttgtttttgtttttttttttgagatggggtcttgctatgttgcctaagctggtctagaacccctgggctcaggccaccctcccaagtagctaaaactataggcatgcatcaccacatcatttcattgaagtatttattaggtaccatcatgagctaggtgcagttctaggtattgagttttatcagtaaataaacatgatcatcacagaggatgtgatggaagcatttaataaattcaagaggaattcagcctcataaactatgaaatattgggaaataattcatcatgtaaaaactggatataaagaaaaaacttttcctgcaggacattgttgcaggaagtcagggaccccaaacggggggactggctgaagccatggcagaaaaacatggattgtgaaggtttcatggacatttattagttccccaaattaatacttttataatttcttatgcctgtctttactgcaatctctaaacataaattgtaaagatttcatggacacttatcacttccccagtcaatacccttgtgatttcctatgcctgtctttactttaatctctcaatcctgtcagctgaggaggatgtatattacctcaggaccctgtaataattgcattaactgcacaaattatacagcatgtgtgtttgagcaatatgaaatctgggcaccttgaaaaaagaacaggataacagcaatgtttaggaaacaagagagataaccttaaattctgaccgccggtgagccaggtggaacaaagccacatttctcttctttcacaagcaaatgggagaaatatcactgaattctttttctcagcaaggaacatccttgagaaagagaatgcacacctgggagtgggtctctgaactggcccccctgggtgtagccatctcttatggtcgagactgcaggggtgaaatagaccccagtctcccatagcactcccaggcttattaggaagaggaaattcccacctaataaattttagtcagaccagttgatctcaaaaccgtctcctgataagatgttatcaatgacaatggtgcccaaaacttcattagcaattttaatttcaccttggtcctgtgatctcgccctgcctccacttgccttgtgatattctattaccttgtaaagtacttgatgtctgtgacccacacctatttgcacactccctccccttttgaaaatccctaataaaaacttgctggtttttgcggcttgtggggcatcacggaacctaccgacatgtgatgtctgccccggacacccagctttaaaatttc

SEQ ID NO: 772 - DNA, 1932 bp, Homo sapiens
ctcctatcggtggcgtcggtcgcaaagggagcagcccccgaggccgccgcgcagctccccgccgaggcctcggtgccccttcccattttccatccgcgctcccacgaaggttgaggcggcggggagaggcgaagccgcgagcgctcggccgggcggtcccgccgggtggtcgcagccatgacagcggctccccttccgcgcccctcccgccggagatgagggaagatgtccctgtcagggttaaggccaagctgaagttgctggcgtctaccttccacaagaaccaggagccgcagccgcggctcacgctccaccgcaacagacggtggggcgcgcggcggcggcctcgcagggcagggcgggggcgcagatgggggagtctcgggaccgacggcggcctaacgggtagaggccccgggtccccgccccttcctccctcagctggccccgccccgcccccgggactgcgcgaggcttgggtgggaggaggcggagggcgcgtctctccggctcctggcgcggggctgactcgggggccgctggcccctcttggccgccgtcgccacgcaccgaggtgggagcccgcggcggccggagccctcttgggacccatggtcgccctcggtcagcgggactgctcccgggacctcgacggggcggggcggggcgctccagcgttgtttgagcccaggcgcggaagggaaaaggcctctgagatgctcgcgtgttttgcctgggcgcggtggcgcacgcctgtaatcccaaagtgctgggattccaggcgtgagccaccgcgccgggacccaaggcccttaagttttaaggcctcattcttcagtcaggttttccctgttcccgcgtgttcggccaattttttgttgttgttgttttgtttttgtttttgtttttgagtcaattttccagacatctttaattagcaatatgtttaagtagttacaagcctttccttcttttcttgtgacagtttgggttgaatttctatcgtttgcagcctgtcactgtaaggcacaaacatgatcacgcaagatgcgatagtagatttaagccagttgtttttaagtttgtgtttaaggagaaactaacaatgaaaacggcctcgttgacggaggaaaagttggaatgcagcctctggtgctgtttgagcgatccctctccccggggcctggccgcgcgctgctgtgttctggaagggctcattgtacagtcaaggcggcagggccttcttctgtcacccatgctggagtgcagtagcatgatcacagctcacggtagcctccaccttctgggctcaatcctcctacctcagccttccaagtagctgggactacaggtatgcaaccaccatgtccagctaaattttgtactttttgtagagatggagtttcaccatgttggccagactggtctcaaactcctgacctcaagtgatccacctgcctcggcttcccaaagtgctggggtcacaggcgtgagacaccatgcccagcctgcccttcctttttaaacctttcctgtgcatagtgaagaataccatgactagtttggtgttactgcctttgtttgtgctgaagtaccagcatttttacccactattgtatttgcaccgttacagcaaatgtcaccatgttagtattcacgttaaaatagtttggacctgggcgtctgagggccccactttgggaaccgttgaaataggtacttaaacctactatatatcatatcttgtcatctacaagatttttaaaaaacatgatttcagttaattttttttgtaatttttacaatatggttttgaggggtttcagtccagagcaacaacatgtattttatttagcttatgctgaagtttactagataaatactaacctaatagaatgaggtcctaaatctttttttgcagtttctttagcc

SEQ ID NO: 773 - DNA, 2096 bp, Homo sapiens
cttgagctggagtcacccagcctggccaagaactggaaaagtctctttggggatttggacccatttctgaaaagctcatgaaaaccactttgccttggactcctgcccccagccggagccctccatatccatttaacccaaatccccaactccagggatgactacaggttgggggagccccgagagcaagggaggtgaggaaactgatgtccagaaagaagcaggcatcagtggagacactcctagccctgctgccctctcctcactgcacacacttccaggttcagacaaaccggaaaggaaacccaccatgcaggactgtccatgtgatggctcttcccgtggctccatttctaagcgcctccgaggacctcatcgtggcccaggaccgcaagccaaggccaccccagtgtccttaccatcctgggaatgggaggagtcaggcccagccttgtcctgtctgcccccctggaagccttccctgagcactggcctcttatttacccgtctttgtctctggcttgttggtatctgtcccttgtctgattagggaacgcctgaggtcaggatctttgcctccccaatcagattgtcaggcaggagtgggggtagtgcagatgctgggtcatttctacatgtgagaccaaatagtggtcctgtttaagttgatccccttgaaagaaaattctggaaaagctcctcagatgcacagatacacagaatcagaccttgggcaaagtgtgtagttgtgcttttgaagctgtgcaaccttggacaaactacttgacttctctgtgcctcagtttccttatttgtgaaatgaggggtagtcatgataccttccccatgaggttgatgggaggattgagttaatatttataaagcatttcagacagtgccagagatataccgtgtgttaaataagtatttcttacacacacacacacacacacagacacacacacacacacacacacacacacacttcggaggtctgccaggccagggctcatagccttgaatctacccatggtagagagtcagacaacttgccttgcagactgcctgctctcccagcagccatgcaggggatcttctgcctctgcactgccgattatcccctgccctcgtcagagcctctccccaaaagtacctccaaggccacaattacccaggtctctgcttcagtgctgagtgtctgttcctctccaccatctcctgccacagtgcacacggacagctccatcaggagaagcagggcgaggcaaggcagcatggtgagcctgcactgtcctggaatctctgggagcccctctcagcttgaagatgcctcctgcaggctttggtttgctctttggctccttgagtgtagataggggaaactccccctgtcttctggtccttccagctgttcctgattccttccttcagcttaactgatccccaggccagtttctgtgactcccctccctccctggctggacaggccaatgatattaggagctgctcaggaggagggatcagacctcttccactgctgccccctaacatttgatcccagggcttaacactctgatgcaacacctgcctcacctttggctgtttccctggtggcaggtgcacagtggggcagtgtgtgggacctggagcttgcagcttccaggctggaaaacctgaagggaccttctcatcttagaaataagggagggggccatatgccttctccctacctggtgctctgctcccctgtacagagaggcctctccctggaaattagcagtatcccctttctgtctcctcttcctgtctttgagccccctcctctccagcattctcctccatcaatagtccctgtgtgtgcaaaagaacacgtcttcctttaagagaaataacacattgcttaaagaaatgaggctcctcacgagtgggaattgggatttgccagaaaaatggctgcaggtttcaagcgtcattggctctaagtgatctttcccctgttgtcaaagtgatgtttctaagtccctaaactgacttgtctctcctgcttacaacctttcagtgtcttcccactgcccttgagtgaattcaagctccct

SEQ ID NO: 774 - DNA, 2315 bp, Homo sapiens
taaaaaaatacttctacctttattggcattgtgtgtggaaaaagtggtctatttaagggaaatacaggctagtaaaatatttgttatttgcactaggagataatttaaggaacaccttctcaaatgtcatcagacttactttaaaggcaaaccaagtccaaaagttctaaattgagaaagctggaagggaaacttaaatatgatccaaccccctgttttatgaccagaggggaatggattggccaagatgtcggggatggttaataggacctcaggctcctggtcagtgtggggcactcagacccatgagtctagaaagcaaagaacaactggatccatgtttcctatgtcagagtccacccagttgcagttccacctgagtccttcacagacattaaaggtaggattcacatcatggaataagcatttttctactagcgatttttttaataaagctttattggaatataatttgcatgccataacatttccccttttagatggaaataatagacactgggaactccaaaagagcagggaggagagggagggttgaaaaattacctgttgggtataacattcgattgtaatcagtttccagtgttttgcattcctaccagccgtgtaatgcactatgaacattcatttgggggatgaataccctaggagcccaatccccaccattacatgtgtaatacccatgtaataaacaagcacatgtaccccaaataaaaaaaaatccccttttaaagtgtgtcattcactggttttcagtgtattcacagagttatgcaaccatcaccacaaaccaaatgtttaacatttccatcacccacttagccccctcaaagaaatcctagacctactagcagccactccccattacccacttccaggctctggcaaccacccttcagcttccagtctttatagatttgcatgtgctgggtgttttcatagaaaaggagtgtgtgcccttttgaatctgatttctttcactcagcagattcatccatgcttcagttcatccacgttgtaacatggattagtacttcattccttttcatagccaagtaatattccactttatggctatactacattttattgatgtacatttgagttgtttaccctttttggctgttaggaataatgctctgtgaacatttgtttacagagtttttgtgtatacgtatgttttcagtttccttaggtgtacacccagtagtagaattgctaggtcatatgggaattctgtgtttaaccttttgaggagctgccagacggttttccaaagtggctgcaccgtttgacattccctccagccgtgtatgagggttcgctttctccacgccctcgctaacacctgcgattttcttgttatgtgagccttctcgtgaatgttattccactgacattaatctcatggcaccgtcagtgattgaaatgatcttcttgttctctgtcttcgcctctggatcatgaccttcccgaggactgaatgtgtcataaaatccccagtctctagcagtacatgtgtattgagttggatcacatgctgctggacccatggcttgtcatcatgtgtacatgtagccgactttgactctcaactgtgtcagttctgggctagagactgttactttatacaaagagagataaactgtgtcccttgtcctcaaataaataggttggactactagggtatttacaaaacagagtgtaggtgaagaaaaggaaatttcagtgacaaattaggaggcacttaagaaatactggacgttttcaattaatttggcaaaatgaaaagtaatagatacatttccttggttgtggctgtgatgggtagagacagtggtgctgaacctcgctcacacatgtgaaagcttgtctgctccagaagtagaagagagccttccagttgctaaggctctgtccagggccgggctcctgccaggtggcaggcagaggcttcctcaagccctgcgtccctcttctgggttcagagaccactcccaggcttggttctatcagcacactccatgcatacaggtgcagaatgctctccccggccacccgagaccacacctcagccaggaccttgtgcagagcttgcttgggccaaggtacacgatccaggaaagctgagctcaagaaaaatgaatccaatgctggatgtggtgactcgtgcctataatcccagctaattaggaggctgaggtgggaggattgcctgagcccaagagttcgaggctgtgttgagccatgattgcaccaccgcactccagcttgggtgacaaagggccatgtttctt

SEQ ID NO: 775 - DNA, 2946 bp, Homo sapiens
ttttttttttattttttatttttatttttttttgagagaaggtttccctctgttgcccaggctggaatgcagtggtatgatctgggctcactgcaacctccgcctcccaggttcaagcagttctcctgcctcagcctcccaagtagctgggactgcaggcatctgccaccacacccagctaatttttgtatttttattagagacagggtttcaccatagtgaccaggctggtctccaactcctgaccttgatccgcccgcctcggcctccccaagtgtggggattacaggcgtgagcagcgttgggattacaccatgcccagcgacagattatacttttgcagggagcctgggtgtgcagcggctgaggccagaaaggcgaagcctgagggacctggggctcggagcagagctcagagactcctctctggtgagggcctctgcaggggctcaggcatcctggattcccttaaatgcctaatctttatattgtgtctcattgtctgcctggcaaactcttatgtatttttgaaatcatggctcagacatccctactcaggggatgtggtcaccccgtcctcaggcctgcctcttgccctcttgccattgatggctgcctgtgacccgcatgctggctgtagtggctgtctgtttctctatctcagagggaggggccatcctggggccaggcctggggactgctgaccaaatgttgcttggatagaacaaggtgaccgtgggagaccagagcttgtctccaccacgcatctgcccactcaggcttgtaagtctgagctgggtgctcacatggggcctcatttttgaggagggcttggtgagaggtctgggtgcacccagagctcagtgtttcttatgcatcctgtctgcccatttgagtcatctcagtagcttctaaaaatccaaatgctcaggcccaccccagaatctgtgtgtatgcagaggacagcatcagtattttactaaaatccctaagagcttcccaagaagaaccatggttgagaaccactagtctggtgccccctggcccagggtgcatgaataccactcagtctaagacacttgaaagctccatgtcttagataatcaggatggagattatgggccactctaatctggttgtgtttctgagcccctgaattggacatttatccagaacctgttagaagtggtcactgaactccagtgtgcagagatgcagataaactgcaaagtccctgccagcctgaggtcctgtgggtcccttgatccttgtgacctctcttcaatccctagttagtgatggagcacaccctctgtgtgtcaggcttggatctcggggatgggcagcaaagcagacccagccgatgttctcatggagcacatgctttggcaagggggacagatgcagtctcacatgcacacaagcggcatgagtgccctgagaagggttttgagctgggtttagagtgggaactgcatggcgggctggcatagaggctgcagagtgggggctgggccttcccagcaagtgccccacatacagtatgtcaggggagccagtttgttcgagatgtgatgctgccctcagcttgacccagtggctaggaggtgaccaccaacactcagaccccctttgctgtgttgttcacctcagaagctcaaccctttgctctggcacgcacagtggctgcctctggtgcccacctcatagtcccagttaacacagcccagggaatagagagagtggatttctctgtagctccagtaccatttctgggatttagggatgggggactggagttggggacaccttgcagattgactttaaccagtgagaacccttttctgttgccagggcaggatctgtcccttttgagactgactggaagtgggtgaggggagaattcttccaaggagaaccagggcatccttgcaggagaaagcaggagtgggggatagaagtaaccggggcatgtcccctgacagaggcaagtgggaagggatagtagctggggagtgagatattgtgcaggggagatgatgcatggtcagggctgcagggaaagcgaggctccagtcttgttatccaggcacagctgggctgctgagcatgggcagtgaggaaggcatgttgactcccccaggctccacagggggccagaatcagcctggcacttggccccaggtctcccgtgtcctctgtgttgtgtcaccgcagtcctgaagtcacaccacagctcttcggcttgcagtcagctctctccctgatttgtcatttccaccatgccacttacgtccagctgggacagagagctgaggacccacaaggtgtcctgttgcagggggttagagtgagggcttgtctctacagtgtgattccagcagggggcagatttttgtttactgatagccccttccccatgtcgagcagaggtggacctggcaagggcagcttcagtcctgggggaggacgatctgcacgagacactggaagacgaggagtgaagtgtcagaaggagcttctggatggaaacagttatttctggagcctctagaaggttgtgggttctggggcagtagcaggagaagccctgagtccaaacaggagtggacaggccatgagaaaacgaaaggcacaagtatccatgggatgttgggaacaaagcttgcagattgacatctgctttggcctggccaggcccccatcgccggggcaagcttgggaaggagtgaaggcagcactctcctcctctccctcctagtgctgctacagctagccagtagctgatcccggccaaaagtgaaaaaggccaccaagatagtggctggtgggccaggtgcagtgtctccttgcgcctggccaataatatatttttacgtaagaatctgtgggacaactgaaacctgtgagaccagcctgggcaacatagggagaccccatctttac

SEQ ID NO: 776 - DNA, 2962 bp, Homo sapiens
aagttaacgggaccaaagtaggaaagcagatagtggaaaacttctctcccaatcagaccaagttcacggtgcaaagaacggaccccgtgtcacgctaccgctttaccctcagcgccaggacgcaggtgggctctggggaagccgtcacagaggagtcaccagcacccccgaatgaagctactccaaccgcagctcctcccacattgcccccgactaccgtgggtgcgacgggcgctgtgagcagtaccgatgctactgccattgctgccaccaccgaagccacaacagtccccatcatcccaactgtcgcacctaccaccatcgccaccaccaccaccgtcgccacaactactacaaccactgctgccgccaccaccaccacggagagtcctcccaccaccacctccgggactaagatacacgaatccgcccctgatgagcagtccatatggaacgtcacggtgctccccaacagtaaatgggccaacatcacctggaagcacaatttcgggcccggaactgactttgtggttgagtacatcgacagcaaccatacgaaaaaaactgtcccagttaaggcccaggctcagcctatacagctgacagacctctatcccgggatgacatacacgttgcgggtttattcccgggacaacgagggcatcagcagtaccgtcatcacctttatgaccagtacagcttacaccaacaaccaagcggacatcgccacccagggctggttcattgggcttatgtgcgccatcgccctcctggtgctgatcctgctcatcgtctgtttcatcaagaggagtcgcggcggcaagtacccagtacgagaaaagaaggatgttccccttggccctgaagaccccaaggaagaggatggctcatttgactatagtgatgaggacaacaagcccctgcagggcagtcagacatctctggacggcaccatcaagcagcaggagagtgacgacagcctggtggactatggcgagggtggcgagggtcagttcaatgaagacggctccttcatcggccagtacacggtcaaaaaggacaaggaggaaacagagggcaacgaaagctcagaggccacgtcacctgtcaatgctatctactctctggcctaacggagcccacccaggcacagccaccactttgcaagtgggaggaggggagaaggggagacaaaaccactgcagacctaccacgaagccaccaccaccttcagtaacaagggtacgatatgggggtctgccaagctgtgaggaccagtagccaccaagccacccacaagccccctcccaatgaccccccttcagccccgggtgccaccagtgtgggagagctggagccgtggctgagctcagctggagggagcctggccccttgcccggtctcgcagccaccccgagcgttccaccacactgtccgcccttggcctcggcacacgctcaccttttctgttggttacgggacttctcattgtcttaatttcgctttgtgcatcttcccctccagacccaatgtctctgttttcttttccttttgaaaaagagtccctggaaaagaaagaataagtggattctcccccaggagaatcctttttgcaaagataggcaaaaaggattgaatccataccagaacacgtagacaggctgtaatattcaaaccacctctgggccaatgcatttccaaaggatgcctttctcgccatatgcctcccctggcccccagcccctctgcctcggccttgtcagttgctgagctgggcttggctcctttctggaaaatgacagtatttttggcagggagaaggtgcgcaggcctccttgctgctctctggtttggttgggaggtgtgtttacctcttgctcctcattcctcccctgcccttttctctggaatatctaagatgtgagctgcattgactctgaagacgtttgaggaacaggagtgggcactgatagaaaggacttcaacgccagtgactgtgtacctccagcagaagaaaatcaggtgtctggtcttgggggcactgtgctcacctctagagagaagaaaaaggctgggtttggacttcatgcctcctcactggtgaaacccaggatgtagatagagggccacacccaccctgtccagagtagagggcacctgtccacgtggccagggcccatgctgccaccctcgaggagatggaaccctgtgatgcaaaagctttgctggtgtgtttggggcataaggcactgctccccttccatctctagcagatatcatcttctcagccaattctgtaggacactgaggctcttgtttgacatggtgtgtggatggggacttgccccaagactgagcaggtctgccctttcattggggtgtatacatatcaggggaccctgaggtggcaccgtactcagtgttgtgatgcccccacctagggaggactcaatgctctttgtatgccttatgcagcgctgatctgtccctggagttcccaggttcccagctccccccctgcaagccttgaagcctccagcaacgtctatctccaggagagcagggcagcctatgcaagtgttccggcaggaccagaagtggccactcaacacacgtcctcaccagtcaccccaaatggagacactcgcagacctgcagttctcagaccgaaggtgctgccttcatcctccccacctaatgcatttttgaaaccaaaggtacctagcctcagagacagagaaggagagggggagatcttgagtctaagaggaaccctttagctgtttctgcagctgaggtcagtttcaggagggtgaagctgatccccaggaatggatcagctgccatgggcacagcctccgatttgagcctctccggctgccagccagggggcctgggccagaccagggctctgtccttccgtgactttattaaagcaacatttgccacatgtttaagccgc

SEQ ID NO: 777 - DNA, 3039 bp, Homo sapiens
acatcctggaagagtggcctaggacagctcctctcctgccagagctaggcaggcgccgaagtagccgcatggccccgtcagaagaccccagggactggagagccaacctcaaaggcaccatccgtgagacaggcctggagaccagctccggtgggaagctggctggccatcagaagaccgtccccacggctcacctgacttttgttattgactgcacccacgggaagcagctctccctggcagcaaccgcatcaccaccccaagcccccagtcccaatcgagggcttgtcaccccaccaatgaagacctacatcgtgttctgtggggaaaactggccccatctgactcgggtgacccccatgggtgggggatgccttgcccaggccagggccaccctgccgctctgcagagggtctgtggcctcagcttccttcccagtcagcccgctctgcccccaggaggttcccgaggctaaggggaaacccgtgaaggctgcgcctgtgaggtcttcaacttggggaacagtcaaggactcactgaaagccctctcctcttgtgtctgtgggcaggccgattagctggaagggccgggctctgatgcccagaggctgcaattcccagggcctggccctgcttccccagctaagcaggagtcttttgtgcttgagccaaggaaacatcattagatccgctaaggggcatctgaaacatccgtcgagtggcagaggcaggataagtcacctgcacatgaagagactcattcattcatacagcaaatattactggtacatcttccacatgccaggccctgcaaagtgctggggagataccatggttttcctggagctggtatttttggggtggagggaacccaccctgaataaataaagtaacccaataaataaagaagatgattttgaacagcgatgaatgctctgcaggaactgaaacaggatgctagagggagagtgattggggtgaagacctttcctgatgcagtgcttggtaagggcctctctgcgcaggcaacaaagtgtgatctaaaagatgagaaggggccagccctgagaaaatccaccctccccagggccacctgctgtcatcttaccccagggcaggccagagcagtggtcagaatgccccagcatgacggggaggggcaacgggtttcttgctgccatcttggctcagaggcgagtgtgtaggtcactgcaaaggcaggggataccacgtggggagactcgagggccatgccagttggggctgggaggctcagggaagttggctccaggagactccatcccagaaggcagcccaggtgggacctggggatctgagatgggaaataaggggatctggcttctcaaaagggagggaggtactcaaaaatagagtatcatgtttgaacgaatgaaaacaagacatgttatttattgagcatctactgcataccaggctcatgctgccctctagggatagcaaaaaaaaaaaaaaaaggtggggggaggaggttcacccctcagggcaatcgtgttccctgagcaggaggtggagttactggtgtgggtgtgaaggtgtctgtgagtctaaggcatgcacagcactgtgagaaaccctaaagcaacctatttaaggaagtcagtctcaaagctcccagataaaaatcactgggtttttctgtatttattttggagacagagtctcactctgtcacccaggctggagtgcagtggaacaatcacggctcactgcagcctcaaactcctgggctcaagtgatcctcctgcctcggcctcccgagtagctgggactgtaggtgcaccactacgcccagcttgacttcttttggtagagaagaggtctcgctgtgctgcccaggctggtcttgaactcctggcctcaagctatcctcccgcttcagcttccctaagtgcttggattataggtgtgagccaccgtatctggtcattaatttattcaatgactattttactaggttcctacaaatactagctgctaacatttaacatgtaattgaccatttactctgtgtcagagaaacaacatgggcactgtatttgtgaccattttatagattagagagctgaggcacagagaggttgaagaatggactcaaagttccatagactggtaccattgagattagaactcaggcaagtctggtgcccatattcttgcttgtaactgtaaggtatataccctctcatcctggtagcgtctcttctaggcagaggggacacacagaggataaatgtaaccctgtcctcaaggagctcacagccaggtgggggaggccagaaagaaagcacacaattgccatagcttctgagaagtgcaacagtaagggcaacacagaatgatgctggaggacaaccagcccactctagagagaggagatcagggaggacttcctgcaggaagtgatgccgaaaatgagatctgaccggtgactaagctatacaaaagggtggggtgggggagcaagtggggagtgctctgggcagaaggaccagtcgttcagtctggctagggtaattgtcattcattcatttattcaccaagtatttattgggcatccactgaatgccaggctttgggctaaaccatgagatggagcaatgaataagacaatgaggcccagccacaaaatagtttatcctctagttgggggagacaggcaatgcacacacacaaaacaaacagatcagaaaggtggcaggaggccaggcgcggtggctcatgcctgtagtcccagcactttgggaggccaaggagggggaggcggggggagatcacctgaggtcaggggttcgagaccagcctggccagcttggcggaggcccgtctctactagaaatacaaaaattagctgggcgtggtggtgggcacctgtggtcccagctgcttgggaggctgaggtgagagaattgcttgggcctaggaggcagaggttgcagtgagccgagatctcgccactgcactccggcctgggtgacagagcaagagcaagactgtctc

SEQ ID NO: 778 - DNA, 3593 bp, Homo sapiens
cttggacgtctagatcagggcttaggttcagaattgtgtaggcagggtcctgggagggcagcattagggtagaggaggtggggtcaggaacaaaggatcttcctgatggagatgtccctagggagcccatggggtcaagaacagaactttgaagtgtcagggactaagggatgtttccatataacacatgggtctggaaatgtttctgtccagaccagtgtttcacagccttggcactgtgacatttggggccagatagttttttgttgggaggtgggaggggctgctattctatgtattataggatgttgtgcagcaaccctgggctctatttaccaggccagtagcacaccgcgcctccctctgggttgtgacaagcgaaaaaaaaatgtctccagacactgtcagatgtcccctgcaggggcaaaatcactctgattgagaggaccgtgatgcaagcgcatggacagaccgaaggcatgatgacagggagaagagtaagggagctggggaaggcggggcacggagagatgataaaaggatagtgttctgagatgagaagaaacggcctgcagcccgggtaagctccgagatgcattcattcattcagccagtgagtgcctaccatggattgggcactgtgctagtctctcaacaaaacaggcaaggtttttactcagctggaacttgcatttagtaggagagacaaaaataaagtctataataggtgctgataggtactttgaaaagtaaagcagggtaaagggattacagggtgtttggcaggtgttctttttggagtcaacatccaggtctcccatgggcattttggtcaactccagagccaggaaggaccaccagcagtgaccctttggtatcacttgattggggaatctaagagtttgactttgatcttaaccaaagacttttctcttcactgaggtctggacttcaacagaaagaggtcagatctctagccctgtccttgagactctgagactcgaacgttattctaaacgatgccttcaatgttactctcaccttggaatgctttatttaaaaaaagaaaaaaaagggcgggtcagactcaatccccagagattctgatttaattggtctggcatagtgaactgccatcagctgtgactatttattagaaagctcccaagagactaatgtacgcacagggttaagagctacagctctgagtgcctgcagctcaggctcctttggggcctctgggaatgagataaattgatttggaggagtcagggggaggatgcaagtgacctctgcttggctatcttatcaaaaacagtcctcacagctgcacttccctgcagtaggggtattcctagccccatcctgcaagtgaggtaacctaatgtgttcccgggcaaagtggggaaatggcaggctagacatgcatatgcatagcctgtgttcttcctgtgacagctgtgctgacgtctttggagaaattgcctacgtatgtccctggcctctggggctggcaggttcaggccaggagtgatttttgaatatttgacagctggtacagcaaaagctgactggcccaaaggaggcaatgaggctgtggcagtgcatttaatggctggttttcagtatatcaggaccctcccccaattcaatacccagcacagcccccaaggctcaaaggggtgccagggcaggaggggaaggcccctcagttatttgcctcagaagggaggcacaaccacggttcagtaactctttgaagcatgttcccatccaggttccagccgtcctcacctcaggaggacatagctttgtgcctttcaaagccctttctcatctatcatcagggactcggaagacgagccaggtttacagccctgccttgatgtgtgccgagttccttgaagaaaattattttatggacaatgtatgagtctgttttcgtgctgctgataaagacatacccagactcacagttctacgtggctggggaggcctcacaatcgtgatggaaggtgaaagacacgtcttacatggccacagggagaatgagagtccctgtacagaaccatcagatcacatgagacttactcactgccatgagaacagcatgggggaaaccgcccccatgattcagttatctcccaccgggtccctcccacaacacgtggaaattatgggagctataattcaagatgagatttgagtggggacacagccagaccatatcagacaagaatcatcttctcaaatttggggtgcgtggctgagtgcacacacctgtgaaaactgcgggatgaatgcattacaacttcctggaacaagtcattttacctaagtaattggaaggggaaagccaactgatctgcttatctgtcctgaaaggcagagctacgaagccatggcagcaggtgctccttcatcttcaaggccagcagcatagcttccatcttgcaatttctttttctgtctgactctgatcctcctgcctccgttttataaagaggacctttgtaattatgttgagcccacttgggcaatccaggattgtgctattgagaaataactatttagcctttagcctgtttcctggcataaaactcctgaaatcttacaatttctaaagtgatgtctgtgaacccaaaatatcggagacaagtctcagtcaatttagaaagtttattttgccaaggctaaggacacacctgtgacacagcctcaggaggtcctgacatgtgcccaaggtggtcggggcacagctaggttttatatgtttttgggagacatgagacatcagccagtatgtgtgagatgtacgttggtttggtccagaaaggtgggacaactcgaagcaagggccctgcctttcaggtcataggtagataagagacaaacagttgcattccttcaagtctctgatgagcctttcactgaacacacagtttacatgtgacaggagggtagaggagtagtcacttatgccttggtctggcttagtgaaatagggcaaagggagcaatcaggtatgcatttatctcatgagttctgtgtgtcctctgtccaaaaagaattttcttttgggcatattgtgagggaggtacgtggttagtaataaaatgggaaacaggtttgcctgaagcagttcccgaagtgctgggattacaggtgtgaggcaccatgcccttttcttttacatgtcttttgtatgctaatgagatggctggtggctggcagcccctgggtagcttcaggatagggttggtcaccaggaagaccaaggcaggactagacagttgggacattgagctccacccttcaacctctggggaggggagaaagactaaaggttaagttgatcaccaagggccagtagtttaatcttgcctgtgtaatgaagccaccataaaaactcagaaggacagggtttgaagagcttctggatagctgaacacatggaggttcctggagggttcccaaggaaggcatggaagctccacaccacctcacacataccttgtatttctacacatttctttctctgtattcttcggaatagccttcataatcaaccagtaaatgtcagtatttgcctg

SEQ ID NO: 779 - DNA, 2898 bp, Homo sapiens
aaaaaaaaaaacgtttactgagcgccttcaacttgccaggcactaattagactagcgcagagaaacggggataagtactgatgagggtcccagccctcagcgatcggatttcagagggggagataaaggactgcccagaagggtggtgagtggagtagttgatataaacaacgaggtgcgatgaaatacacaggagggctgctaatcacatatggggtgggtgccgagggcccttaattaagggaggcttcctggacgggtgacacccaagcggagtcctgacgacccgcgtcagaagtagtcaggcgaggaggagggtaaaggaatccacgtcccaagcagagaagcagctttccctacacagcacaggacacggtccgcgcacagaagccgcaggagacgcaggcacaggggctggggagaatccttgctgggccctcgccgtccatgcgccgcctccctctgcccggtgtctggtgtcagcctcctgcctggcagaggaactccagcccctgctccccgaagctcctccaggccttctgcttccctgactcggaatgggcccgctgtccagtgggtacaaggctggtctccccgcccactggtgacgacgtaaagatccagctcagcctggtttcccctggtgatgatatcttgcgactcgtctttctccaggaaaacagggaccgctctccgcctacagatggagtctcgctctgtcgcccaggctggagtgtagtggcgcaatcttggctcactgcaacctcggactcccgggttcaagagattctcctgcatcagcctcccaagtagctgggactacaggcacgtgccaccacgcccggctaatttttgtgtttttaatagagacggggtttctccgtgttatccagaatggtctcgatctcctgacctcgtgatccacctgcctcggcctcctaaagtgctgggattgcaggcgtgagtcaccgcgcccggcacgcccggctaatttttttgtatttttagtagagatggggtttcaccgtgttccccaggctggtctcgagctcctgagtcgagacgggatttctccgtgtttgccagaatggtcttgatctcctgaccttgtgatccacccgcctcggcctcccaaagtgttgggattgctggcgtgagccactgcgcccggcagatttttcttttaaaacgtggagaataagaaatcagcccgagtgtgtaatggcgtcaatattggtgtggacaagacaaagtgaatgaggcaaggagcgaggctggggctctcaccgcgtcttgaatgtagatgagagtgggacggtgatggcagggaggaaggcgacgacatctcttctcgtccttttggctaagatcaagtgtagtatctgttcttatcagtttaatatctgatacgtcctctatcagagaacaattatattagatagatttttggagcagggagatgaaataggagcttgctctgtccactccacgcgtcgacctggtattgcagtacctccaggaatggggctccctctcctgggatacaacctgtttgcaaggttagaaagaaaagactgcgccgggtagtttaggatagttggtaggttttcttactcctttaagtatcataaggttcatgatttatggagagtatcctaggacccaaaacaagaatattcatttccaagtagggaacatgttcgactttacttggagggctttaaatctcagcttggctgtggaggggtgatgacctttcaaagggatggattccagtggtgtgttgcccaggctggacttcaacttactctgtttgtttgtttgttttttgtttttgagatggagtttagctcttggtacccaggctggagtgcaacggcgccatctcggctcactgcaacctctgcctcccgagttcaggcaatgctcctgcctcagcctcccgagtatctgggattacaggcacccgccaccatgcccagctaatttttgtatttttagtagaaacggggtttcaccatgttggccaggctggtctcgaactcctgacctcaggtgatccacctgcctgggcctcccagattgctgggattacaggtgtgagccactacgcccagctgaacttcctcttcagcccatggagtagttctactttaaggcaggcaccaatgtactggctacaaacttccttttttccccaggaaaaatcgaggcacaggtagtttaagttaccgaggaatgcacaggagcagaactcgagtccaagcatcgtggctccacccttcatgcttgatgcttttttaggctctgttctaggtatgtgtatcctttacgggatcagccaccggcagttgccttgcaaccatgatgacaaatctctcccagcttttttgggtctcatccctgtatctataaattgcatcccagcataaagatcagaatgtgtcttttgctgacccaatctctcaccctttccaaactccagaaatcttgtctggccttggcaaaactacccgctgcttctttctctaaaggatatcttcagtccgggcactgtggctcatgcctgtggtcccagcactttgggaggcccaggtggggggatggcttgagcccgggaggccacagtgaggtgagatcacgccattacactccagcctaggcggcaaagccagagccccatctcgaaacaaacgaacgaacaaacaaagcacaaaagaaacagcctaggcaaggtagtgaagccctgttcagggtgacgaatatctgtacaacagctatttcagaggctgaggcaggaggatcagttgagtctgggaggtggatgctccagtgagccgtgattgcaccactgcactccagccttggtgacagagccagaccctgtctcaaataaat

SEQ ID NO: 780 - DNA, 3856 bp, Homo sapiens
gttactgtactctcagcaggatgttcttttgccttgcccatcgttcagtttaatcctctagaaagaaaatttttagaggtacatcggactaaatcattttcttctgagtacaccatttccaaatggccgcccagggtcctaaatccggcggctgcggagagggactagagggtgtcctcctctgcagagccgtaggactcgagcgccttcatcactggacgctggagccaggaaggaaacccacacactcagggacaggtataaccccacaggggtgcaccagtgaggccccgatcgcagcggaggactccatccctgagcttggtgagggcgtcctggggaggaagcgaacactttccccgttcaagtcagagagcaggactcactgggtggcaggtcagaagttgaattttaacccgacctgcgctttgtccccgcgccttccgcagcctgggcgccgcggtggcaccgagctgggagaggacacgagaggctggcgcgggagaagccgagagttgctatcgaccgggagctgccggcggcgggagcagacgcgaccctcgccgctttcgatctcgaagccgcggagagccgatctcggctgctggggctcggctccccgcgctctgccttgccctttcggcagagggcagctccctgcctgctgcagccccgccactgtgcgcccggcagcccaggggtgcgcccagcccgccccccgagtggccgccgggactccagcagttggaccgaccctcgccctccggcgcctggacaaacttccttcctcccgggcccctgcgccaagcaagctgacaggcggctccctcgccggtctcctctgggctctggccgggcgagcttgctctctgcccctctccaaccccgagcccctggcgcctatagccgtccccgcgcagcggctccaacaaagccagaggaccggagacgacccggcgaggggctgggagtggcagcggggaccccagagccagaaggaggcgtcccctcggcggggcgagtacagtgggaaggggcagcgggaacgtagcggggagagaaaggggaagaaagtgttctgttctcggcgcgaacgccttcctggctcgtcctcgttccccttctcctcctgcctgagcgcgtcccatgtcccgttgggaattggcaggcggggaagggaggaggggagaggggacgcggtggcctggcgagcgagccgctcccttacctctgtccagggtgagcggctggaccactgtcaatgtcgccatgtctgccgtgggagccgaagtgacgctcggcttcagcatcagcaaccgctcgtagtgagaaaaaaaggaggagattgggggcgggggtggagagggaagacggaaaggagggggaggagggggaaggaaggaaggtggtggtggtggagaagaaagcttgggtgggttggtagccagatggagacgcaactgttccgcggcggcagatcttcagttgcggtgcggagctgagcaggtatccgagagcgactgcatcgccgggctctgggagggaaggctctgccctagaactttgctattccacccccaggagcgctgggtgggtgtagctggcgggttgcttcctttcaactttccactctaataaaatggtcagaatatacgtgtgtgcatgcgggtgcgtgtgtgtataaggggaagagagaggatggaaaggggatatggggaagggagtgggagatgagttttctcagattaagagaaattgccaatccaataatcccatcccctttagagagaaaatgcttccattatcagaaatgtttgggatgtaattacatttgcagttaatttctgttgaagtttttcggaatgttgacctataacggcatataaagataactgactaaaggccagcgttccatcagtagatgttcatttaggacctgagtatattgcctggagaaaaaaaaaaaaaaggcaaacctcttaaaagtgcttcaaaataaaaaacgtgtaggtaagtttctatcgctaagtttttctttttcaagccactgttaatacattaccaattcagtaaatgtagcttagaaacaagtacagtgttcagattttctccgaattttttacataccacatcctgtaaacatgccccactccccctcacccacccagcaacaaaaactttgctcttaatgtccaaactgattttggttgtctatgactacgtttgaaaaatatgtacctagcacttttcatgttgatttctaaccagtggttcagagatgccacttatcgattgattaacatatatgccaggaattgagatagaagagttacattgccttgtgccacgccttgatttaggagttcaatttagtctccgacttcctgtagcctgtaatctagtgggagatggtgttattaaaaacctgactttagagtcagttgatcaggattaaattacgagagccttcaaatactggctgtgacctcttcgccccaataaaaaggctactttcactatcttgtcatagtagggattcatttcctgactacgaaatcaagaaacataaagaaaccttctataagctgaataggggtgactgtgggtgctgaataggggtgactgtgggtgcaggattggaaatgacaaagctgcctccatcttgtttcctgtgacagagctgaattgtttgggctagcaataaactctaaaaggcagatactgttttatagcaaaatatttgcatataattgatgccattttcttctgattacagataggatttctgaaggtctttttcattttatagtctacaattgaattttaaaaaacaacatttcaccaatgtgggaaagccaaagatgattggccatatatagacttaacagaccctaagaacaaacctaaaatagtagttcgatatgtttatttttatttagtatttaagaaagaatgctgatcttgacatttgagtcttagtcatgtactcttcggaagtcacacaatctctcactgatcctgtttcctcctctgtcatacaatggaaataatatcattcaatgtcacagagatctgtcatatgaggaaactaattctaccttgcaatctcacagagttttatgagggtctaatggagtcatacatgtgactgtgctttgaaaacagtaaagaatatacaaatttatttatacaagcatacatcccctggaaccgtgtggtaagctctgtgctaggtgctaaccatgcaaagattaatgagatggccccctttctgcccagtcttgcttgggagacagtgagcaaaccataagcttctgtgcagtactctaagcactattaaaaggaagtgccctcggtggccagaggttgcaaaaacaactttggttttttaccgttattcacatgccctgaattaagcaacagaaagaagttgagatgagcgcaatgataccagagtgtgttacaagcttttgcacaaagttattagacctcactcggtaactgaggataaaagaacatacaaatcccttgacttctaatgtagttattttacaacatcctttattagggaatatgtatttaagcagcttgattcatcagcccaaaagtcataaattgtacccattccaacacaaatccctgattgtggtgtcagtgaaggtagagttttctttgtctttttgtttcctaatgcatcctcaggactaaacatttcatagcatatttctggacttctgccttgagcttcctatttgaaatttgctctgtcattctttctctgtgttgactctgtagggttgttgttgtttttaaatcaagattaaaagagaaattaaaaggaagcataaatcaccat

SEQ ID NO: 781 - DNA, 3844 bp, Homo sapiens
agagatcacgacaagatctaaccagtcgcgcgtggtccccggcgccggagcgggccagctcagcccggcccagcccggccccgcgcagagcccccgccgcccccgcgcacagagccgggtgccccttgcggtgcgccggacgggaagccccgaggggcgcaaggaggcggccgagggcaaggagcagggcctggcgccgctggtggtgcagacagacagtgcgtcccccctgggcgccggacacctgcccggcctggccttttccagccacttgcacgggcagcagttctttgggccgctgggagccggccagccgctcttcctgcaccctggacagttcaccatgggccctggcgccttctccgccatgggcatgggtcacctactggcctcggtggcaggcggcggcaacggcggaggtggcgggcctgggaccgccgcggggctggacgcaggcgggctgggtcccgcggccagcgcagcaagcaccgccgcgcccttcccgttccacctctcccagcacatgctggcatctcaggtaaggcctgtgaccccgcggcagcgccagcgagggagaaggcccagggagctggcggcgaggccagcggagggcctgaggggtgccagggtcgctgggatcctctggcaggcaagaactccatccaggggaggccccgggatgccctttaggacacctgggttctgagagacgaggactgtgttgtaagtccaggggctggccagggcgccgcttctgactcccgtgtgacctttggcaagtccctgaccctctctgggcctgcttccttccctatagccccagcgaggagtgcggtgcccatcgagactcttctcaccctcacagaccagggccacccctggcttgtgaagtcttctctcctggcctcaggacatttttcttgagaacaaagacccttggctccctgtccattctgaaaggctaaggtggccagacagacaaagggagaaggaacatttgcattattttctggacagttgaccaccagccctcccagaggtctctggcccctcccaggccttctacgaagtcctctgtcctggtgaaggacaaggctggtctttcccctaccttgagttcccagcacccccagccacatgtcagggatgagaactcagctcttcaggccccattgaaattccaagctcccaggggagtgttgacgaaaatgtggctggggcacagtaaggagatccgatggggacagtggcctctttggttgcttgggtggaatattccctgtggaaagatttggaatctcttcattcattttcttccctctgaggtttctggcaaattgaacccctgagatcttatctcaagggaaggaaaatagcagttcaggtctgagaaagctcctttgcttcagcagcaaatattttaaaagttgggttggtgggtgggggggtggggggttgggaggcaggcgattctgaaatgagttttacacacagctcagtgttagggtgtgtggagtgtttgaggtatcaccatcactcatctggggctctgggctggaagggaagcctctggagaaagttcagggcccagaggtttaatctgcacccctgattatttgtgtatatgaatgcctcctccccagacaaactggtaataatcaccagcatcacagaggtcatgaggaagtcagggcttctagacacagcctggccaacaggtgcatgacccgggtgagaataccagcacctgggaggcatccgttggtagggctgctggtggttacattcccaggccagtgcagcccatcccagacatcaggtagagccaaatcccaagagaactgaagcctccctccttcctcccaacctgggatgccaggtctgaaatgcccagtaggacctgactgtctcaggagggggtattttctcaggcctgatgaagctgcctcttttcttcttcctgctagagccaggcctgaggctccctgggagcccagtgcaatcatcagccccctgccctcctccccatacccactagctctggggagtaagccattatctcaaaggtcaggccgtgcaccagccagacctcatgaactcaggaaggtgcttgtccaggagttcctggctgctgtgcccttcacaggcaaagactgcattccttcctcagctgccagtgaggtgctgccaggcattccctgtagaactttcaggccagtttatgaactggttggcacccgtgtcctcctcctggcccaggcaggagaaccatgagcaggcagaaggagactttgcaaagtgccttccccagcatgtgtgccctctgcccttcagagcctgcagataggaggggtggcgaggacactgttctcaatgagcagaacctccaagacacccaaagctgcctgtttgccacctggccctatgcctgccccgttttctccctcaaggccttcacccgtgctagggcagtcacctggaatgtcctttccattacccctgctgtaatgcccagcacagaacttgatggcaggcctttgcatggtagcctgaagcgatctcacccttctaactgggtttggccacaggcacactggctcatgcttacctgtgctgcctgtggttatagttatgcgaattgtggttttacatccctaaaacagaagggcacggtgtccaggggatagcacccagcccaacttcagaaagacttcaggcaagatgtctaaccctcgtcttgttctgtttcttccagggaattccaatgcccactttcggaggcctcttcccctacccctacacctacatggcagcagcagccgcagccgcctcggctttgcccgccactagtgctgcagctgccgccgccgcagccgccggctccctctcccggagccccttcctgggcagtgcccggccccgactgcgtttcagcccctatcagatcccggtcaccatcccgcctagcactagcctcctcaccaccgggctggcctctgagggctccaaggccgctggtggaaacagccgggagcctagccccctgcccgagctggctctccgcaaagtaggggccccatcccgcggtgccctgtcgcccagtggctcggccaaggaggcggccaatgaactgcagagcatccagagactggtgagtgggctggagagccagcgagccctctccccaggccgggagtcgcccaagtgaggggctgcccagctgctcccctgccacgcaggccacccgggctgcctgcccctgctgcttgggacgtgtacagcacagaatgagtatttatttaaataaaggagaaaagtgggctgcagcagccggaatagagcctcgtctggcaagtcggggcctgggacacttccctgggcctcaacaaggatcaggctgctggaaacacagtcacttgggagctgctgggctaggtccagatccgctccagcgtcaaggtggcatccgaaggtgtctctggtcttccagcgaggtgggagaggcctcatccagggcccagcggtccctgcagaagccagaaggtgcaggggccaggggtgggagcatcggagggagtcccagagccctggaccttgggcctagaccgcgtgataaaactgggttgagggatgctggaaccagttacgactgaagtcagtgtagacctgagctgggagggaacctgttagtctccccacctcttccctgaagagacaggcacccctcccagccgtggtcaacggagggagtggcacttctgccttgagtccccaggggaaaaaaaaaaaaaagatatttatgaaataaatggtaatttgtgtaaataagctttaaggttcccag

SEQ ID NO: 782 - DNA, 3281 bp, Homo sapiens
gcacacagccatccatcctcccccttccctctctcccctgtcctctctctccgggctcccaccgccgccgcgggccggggagccaccggccgccaccatgtcttcctcgctgtccgtgcgccgcagctactcctccagctctggatcgttgatgcccagtctggagaacctcgacctgagccaggtagccgccatcagcaacgacctcaagtccatccgcacgcaggagaaggcgcagctccaggacctcaatgaccgcttcgccagcttcatcgagcgcgtgcacgagctggagcagcagaacaaggtcctggaagccgagctgctggtgctgcgccagaagcactccgagccatcccgcttccgggcgctgtacgagcaggagatccgcgatctgcgcctggcggcggaagatgccaccaacgagaagcgcatcgacagcttgatggacgaaatctcttttctgaagaaagtgcacgaagaggagatcgccgaactgcaggcgcagatccagtacgcgcagatctccgtggagatggacgtgaccaagcccgacctttccgccgcgctcaaggacatccgcgcgcagtacgagaagctggccgccaagaacatgcagaacgctgaggaatggttcaagagccgcttcaccgtgctgaccgagagcgccgccaagaacaccgacgccgtgcgcgccgccaaggacgaggtgtccgagagccgtcgtctgctcaaggccaagaccctggaaatcgaagcatgccggggcatgaatgaagcgctggagaagcagctgcaggagctggaggacaagcagaacgccgacatcagcgctatgcaggacacgatcaacaaattggaaaatgaattgaggaccacaaagagtgaaatggcacgatacctaaaagaataccaagacctcctcaacgtgaagatggctttggatattgagattgcagcttacaggaaactcttggaaggcgaggagacccgactcagtttcaccagcgtgggaagcataaccagtggctactcccagagctcccaggtctttggccgatctgcctacggcggtttacagaccagctcctatctgatgtccacccgctccttcccgtcctactacaccagccatgtccaagaggagcagatcgaagtggaggaaaccattgaggctgccaaggctgaggaagccaaggatgagcccccctctgaaggagaagccgaggaggaggagaaggacaaggaagaggccgaggaagaggaggcagctgaagaggaagaagctgccagggaagagtctgaagaagcaaaagaagaagaagaaggaggtgaaggtgaagaaggagaggaaaccaaagaagctgaagaggaggagaagaaagttgaaggtgctggggaggaacaagcagctaagaagaaagattgaacccccatttccttaattatttcaggaataattctcccgaaatcaggtcaaccccatcaccaaccaaccaaccagttgagttccagattctatgtgaattaaaaagtcaatatatgtataattctgagatgacttaggttggacattcaatgttgtgctatgaatttcctctttatgcagagtatctgtttgcttgcagagtggctttctggcttgctgccagcctgtgcatggtccacgcttatgagttcaggatctacggcaatgtgaatcattcagatgtttacaataaaaaacaccacatgagtaaatgaattcactaatgttaatgttaaacttcatggaaaaatagtcctttgaaccttcggtggttagcaattaaagaccctgagttatgtgcaataaatagtaaataaagttataccgaatgatgtattttttgctgtggttgttacttaattaaaataccttaaagatggcaccaatataaagtatataccagtggactattgacctccaattttttaaaaagttgaaattttaacaattaccaatacttttttttcttccttcaattggaaattctgagggatacagttatgtcatgattacttgtgaaatctctccccacaaaaattttactgataataaacatgagtaaatgagaaagtctataaataacaatacactttgcctcataacacgtgttgtgttaggttttgggatggctttctagggagcaattctgaaattacttgacagatacactctttatggtaaacaggtcatttcagagtctagagtgctaaccattacactatggaaccatgataaataggtcatttcaaactgatatgtcacaatgcaatatggatagaatatgaatcccatacattcatccctataactgcattttaaaatatagtctaaatatcatgggaggaggttaaaacctgagaacatggtacaataagaaggaataattttttatctatatataatttcaggagaagggattaaaactaccaaaggttatttgccactccactgcaaacatgttgcctgcaatcctgagctcatgatttagtgtgttgttaagcgtaattctgttgcctcaagtaaataccacttaatgctacacatttttaaacctttaaaagctacagacacaagtaatgaaattatgagtcacttaaggggggaggtaatatgcttgtatgttacattgacattgctctgcatgtctctactgggaaatatttggatttcaatgatagcttgactggttggacattgcatcaaatacacgccccatgtatcctttctgtcgtaaagttaagaacgctcttgcatttgatgtggaataaatatagatgatattactatctgctattctgcctttgttctgaaacaattgctttgtcagctaatttcattcaatatttgttttttagacgatctctataagttattaatttaacctgaaaccaaagtggtctccatttaaagttacttaatccctttgtaccacctatttctagttaaatatatgttgctatgcaaataggtaaagtgcttccttgccatgatggtaatggattggaactatgaaggctctcagtgtattggcttctgtaaagatgaggcgtctcctcagaaacaaaacttttcacatttctgcttactagacctgggttgatgtacatggtaagtctcaaacagatgcaagctatgtgcaaaaagtaactttagccaaatggaaatagctggatgctttgagaattacttggttgaagtaagaaaactgtaccatcctctatcctgtgtgccataataaaatagtaaaaaacct

SEQ ID NO: 783 - DNA, 3579 bp, Homo sapiens
gtagaggtaaacttgcttttggctgggcgtggtggctcacgcctgtaatcccagcactttgggaggccgaggcggatggatcacctaaggtcaggagtttgagaccagcttgaccaacatggagaaaccccatctctggtaaacaaaaatacaaaattagccgggtgtggcggcacatgcctgtaatcccagctacttgggaggctgaggcaggagaatcgcttgaacctgggaggtggaggttgtggtcagccaagattgcaccattgcactccagcctgggcaacaagagcaaaactctgtctcaaaaaaaaaaaaaaaaattaaaaacttccttttatccagcagagggctggaaaagttggagttgtttttggtatacttggagagctggctttctaaagtgctgctttgaggactgttgtgtaaagcacttgattcgtcttccctttgctggagttatgggcctgggcttttacactggggttctgaagtaacaaacaaagtcagtccagaaatagttgctcagcaatctcattgttacagtgtcgcaaaatgagctcatattagctttattttctgctaccaatagagtgttcctaagtatttaaagtgtgtgactcctttcttatagagccagcaagctgtattggaatcacttttccagtgttgtaaatgttatttttgtgagtcagtcagtatactcgtgaatgacagaaaaacagatcccaacaatgcaaagtattatatgtgtaaaaaagaacagaaaaaagaagctgccttgttagtaacgggctctatggtttttctcataagaggtcatgacgccagtcagatcacactagccttgggcacagctgcctcctaccccagggcctgccaggctctcggggccatgctgtccaaaggagccctgaaccctgctgacatcaccgtcctgttcaagatgttcacaagcatggaccctcctccggttgaacttgtaagttgcttctcaagaatccccaatgtcagctggtaaggtgactttggaaagtctgtgcttgtctgattgtctgaaggctgtgaatgcaaatccatcattgtcctggtccttcctcagtcacactctctgcctggagcctgttgggcccctgctgtgtagggaaccctgaggggaggtgggtgagcagtgccctcacgcctgccatcccgaactgggcatatgcttctcctcagatccgcgttccagccttcctggacctgttcatgcagtcactctttaaaccaggggctcggatcaaccaggaccacaagcacaaatacatccacatcttggcgtacgcagcaagcgtggttgagacctggaagaaggtaccatcggttctgggaatttgtggattttttaggagacaaatatcctcctctgctttgatattattttggaattttggctgcaagaaatcttgaccctccctagtatcaggcatgtgttttcttgtgtttctgcgtagagaaagcactaaacgtctccagaaaatgtgcgtaatgtctccaatgctctgcaaaccgtaaattgaaatgtgactaaagaaatgaaactgatttccgtaagacatggacaaacactagtctcattgcttttcagtttctgtacactgtgtgactgtgaagtttgacagctgaattgactcccaacttaagtagaaatagggaaagtgctttgcaagaagtggccgacaccagaacaccccgacagcagggatatctgccctgtcaggctcaccagcttgtgtgtgtgttttcagaacaagcgagtgagcatcaataaagatgagctgaagtcaacgtcaaaagctgtcgaaaccgttcacaatttgtgttgcaacgagaacaaaggggcctctgaactagtggcagaattgagcacactttatcagtgtattaggtttccagtggtagcaatgggtgtgctgaagcgggtggattggactgtatcagaaccaaggtactttcagctgcagactgaccatacccctgtccacctggcgttgctggatgaggtaagagggcggagagctgttcacagcctacacagtgtctgtctcatgctgtttacgttggcattaacattgcatctattcagtgagtttagaggatactcttctcaaaaatagttatttctgtcctgaggattttcctcttaaggacctagcttcattgactgcagaaatttcttaacctcagtcaagtgttactggaagctgatggccctggcttaggtgtcaggaccttcttccacagtgataagctctttggtggctgtgacagtgcccagtttctctgtgtgctgagcgtgaccacactgctcagcgaagctccctctggcctgtttgtagatcagcgcctgccaccagctcctgcacccccaggtcctgcagctgcttgttaagctttttgagactgagcactcccagctggacgtgatggagcagcttgagttgaagaagacactgctggacaggatggttcacctgctgagtcgaggttatgtacttcctgttgtcagttacatccgaaagtgtctggagaagctggacactgacatttcactcattcgctattttgtcactgaggtcagcaatgcaccgttggtttcatgtttcatactgtttacactagcactgccctttttggcttaatttagttcattttgtacctaactgagaactgtgctttctgatgtagtgatgacaatgacagatactcgtttaccaaaaagcaccttctgcctgcagcagctgtatgacacactttacctccattaccaccctgggcatctgaatgttggagatgggtggtgtcaccggccggtgggggtggggagggattttttccaaactgatggccatttcacccggatgtcggtggatgccccgcactagtgtgcggaagaagtcaccctgtgctcccccacgcaggtgctggacgtcattgctcctccttatacctctgacttcgtgcaacttttcctccccatcctggagaatgacagcatcgcaggtaccatcaaaacggaaggcgagcatgaccctgtgacggagtttatagctcactgcaaatctaacttcatcatggtgaactaatttagagcatcctccagagctgaagcagaacattccagaacccgttgtggaaaaaccctttcaagaagctgttttaagaggctcgggcagcgtcttgaaaatgggcaccgctgggaggaggtggatgacttctttacaaaggaaaatggtagcagcttcagtgagaaactgcccttacaaacagtcccttctctgctgtcaatccaatactgctcccaaatcctgttttcagtgttcatttccctcaaggcaggcgctgggctcccacgacccctcaggacagatctggccgtcagccgcgggccgctgggaactccactcggggaactcctttccaagctgacctcagttttctcacaagaacccagttagctgatgttttattgtaattgtcttaatttgctaagaacaagtaataagtaaatttttaaaaagccttaaaaaaaaaaaaaag

SEQ ID NO: 784 - DNA, 4104 bp, Homo sapiens
tcatgatggctattgctgtgactggagccaagagcccagtgtgcaattcttccttgggaaggggctgcctggtggtggacacagctgttcagatacacaggtttgcagctgcctgtcgaagtgcctgcccctgctgttggggcaaggaggaagcaggtgcaagaacaagcgacctcagggctgggtgggggtggccggcaggggaccccgcagtggaagtgctgtcatcatcaccatttcacagctgggaaggtggagggctggccagatgcacccaggaacaaggagtgggcctgctgcagggccggcattcctgcccgggaaaagccatgtagggaacctgcctctccacttggcactgagccctggagaccctcctcgaagtgctccgtggctgggcagggtgggccctgctaggtttgagctttcgggggtaggggctcatggggcatcccccagacctgcagggtcttggtttgttggatgcaggagacctagccctgggccgtgtccccaggtgggtctccaggtaggcaggacagaaggaacccagagcaccccacctctcaggtcagtgcggctccacacggtccccctcaggctctgctgactccccaaagggattctgagcatgtgcagaacctctgcttgcctgggacacccctgcatgctcctcctccaggcccccaccctcgaaggcgtggccttcccagcccctctctggctgctgaccagtgggctgggtccccaggatggctcctcaactcctaggcaggcctcctagcactgaggcaggtctctctgcaggctggacatggagtggccttgccctgtgggggatcggctggggctgagtttgtggggtgtcagagtgcatcccccacatactacctcctgaccagagcagcctgcagtgggagaggccagtggctcggcaaatgccctctctgatgaccccaagagcttggggtgaggaggcccaactgaccaaggttaccacctgctggtcgccttttgaacccagaactgtgtgatcttggggaggttgtcccacagtgcattggcctcagatgcctgagacagtgctgagcagctgtgggcaacaaggggtttgtgagcccgccttcgtgacttcattgcacaaatggtcactgagtgccaccctgggccagcgataggatacacaggtgaatgatacagccacttctggctttgtgggtcaacagtctaggttaaacccagggaggcttcctggaggtggtgacacctaggctggacttggaactcctggggtttccttagttgagttccttcccactgggcctcagtttcaccatctgaaaaatgaaggattggctcacatcagtggttcctgggctggagtggagagcgcgttggggtacagaagcagtccaccccagagtttctgaccagcaggtctggggctaggcctgagaatgtgcattctaacttgtgtgaggcaccgctgctggcctgagtttgaagggagcattgtatgagtctgagccatgacctccctgtcctggagtgggggcagcactgagcctgggggcctggacattccacccagcgtcatcgtggggcctttggttgcgttcttgctctccttgccaaagactttctaagaattccaaggaaacctttaggtgtttggtgggaaaaccagtgacgtctgggccagatgctcttttttccctggtgggagggacagggacgtgctgtgtgtgtgtgtgtgtgtgtgtgtgtgtgtgtgtgtgtgtgtgtgtgtgtgttgacgtggggggtgtgggcaggtggtccgctctctccttgtaaggcccctacagggcagaggcccacggtcctgtcatggcactgaagtaatcatggcaacaatttgctctgtgcagtggggaaactaaggccaaaatggcaggagggtctcgcttctccacctgacctcagccgctggcacctgtgctgccttcccttgagggccaggaggttgaggctggctctgtgtgcaggcaaggccacaggcaggccacctctggccctcaggctggcagttgctgcatcgtccagtccccacttggctcctcccaggcatggctggctgtctggggcactggggaaacaggcccagagggcttcagactcccctgggcttcacaagaactcccagctgcagggtgtggtgagaccctgagccccatcacagcgggccatgctgtggaggacagtcccagtgtgggcaccgaggcctccaggaggcccagctgctcagacatctgcagctcaggggcactcagactcacaggccccaaagccagttccagatctctctctagccctgcccacagccctgcctcatactggtcagccacttggcccaagaccttcaccatgtggagtggccctgctcgccactcctgctaccgcctgcctgagcaagctctccttgggctgtggcaagacccaccatccacgtggcagccaccgaaactatgccccagacgtccgttgccttctccagcatccttgggcccagctgtagcggacaggtgcagcctggcatgggggagcgtggaggcggggccggtggcggctccggggacctcatcttccaagatggacacctcatctctgggtccctggaggccctgatggagcgccttgttcccacggtggactattaccccgataggacgtacatcttcacctttctcctgagctcccgggtctttatgccccctcatgacctgctggcccgcgtggggcagatctgcgtggagcagaagcagcagctggaagccgggcctgaaaaggccaagctgaagtctttctcagccaagatcgtgcagctcctgaaggagtggaccgaggccttcccctatgacttccaggatgagaaggccatggccgagctgaaagccatcacacaccgtgtcacccagtgtgatgaggagaatggcacagtgaagaaggccattgcccagatgacacagagcctgttgctgtccttggctgcccggagccagctccaggaactgcgagagaagctccggccaccggctgtagacaaggggcccatcctcaagaccaagccaccagccgcccagaaggacatcctgggcgtgtgctgcgaccccctggtgctggcccagcagctgactcacattgagctggacagggtcagcagcatttaccctgaggacttgatgcagatcgtcagccacatggactccttggacaaccacaggtgccgaggggacctgaccaagacctacagcctggaggcctatgacaactggttcaactgcctgagcatgctggtggccactgaggtgtgccgggtggtgaagaagaaacaccggacccgcatgttggagttcttcattgatgtggcccgggagtgcttcaacatcgggaacttcaactccatgatggccatcatctctggcatgaacctcagtcctgtggcaaggctgaagaaaacttggtccaaggtcaagacagccaagtttgatgtcttggagcatcacatggacccgtccagcaacttctgcaactaccgtacagccctgcagggggccacgcagaggtcccagatggccaacagcagccgtgaaaagatcgtcatccctgtgttcaacctcttcgttaaggacatctacttcctgcacaaaatccataccaaccacctgcccaacgggcacattaactttaagaaattctgggagatctccagacagatccatgagttcatgacatggacacaggtagagtgtcctttcgagaaggacaagaagattcagagttacctgctcacggcgcccatctacagcgaggaagctctcttcgtcgcctcctttgaaagtgagggtcccgagaaccacatggaaaaagacagctggaagaccctcaggaccacccttctgaacagagcctgaggcggatgcagcccgcgacgccagaggaagcacgtgcactaactgggtttaaattttgactgatgtgggttgagatgaggaggcctcactggttggggtccattttgtatataacttttatgagaaaaaaatggtaattatttcacgcgtc

SEQ ID NO: 785 - DNA, 2682 bp, Homo sapiens
aaccgagggtgcccgctgcaaggttaggtctcctggcctcgtgcttcaaacaggaattaatagaatcccaccaggtggtgtttgtgaggcgtagatggcgaggatatctgcagctgcagtttgctcattctcacggctgcactgcattgcactgtgtgagcagaacacaatttatccttccactgctgatgggcatttgggcggtttgcagtttgggatctggccagtcctgctgttgtgagcattcttaagcctgcctttcggtgaattcacacgcccgtggggacgctcactctcagagcacagcttccagaggagagaagatacccccagcatccatgagaagagacctccgggagaagcttgtgtgggtgtgccgaccactggccccagttgaggtcccagccaacatcagctccgacttccagccatgctcaccaacttctcctgcccactccctatcaaggaaaagtcccataatgtatccatcaaccaccatggctaatgcacccggtctggtgagctgtaccttctttctggcagtgaatggtctgtattcctctagtgatgatgtgatcgaattaactccatcaaatttcaaccgagaagttattcagagtgatagtttgtggcttgtagaattctatgctccatggtgtggtcactgtcaaagattaacaccagaatggaagaaagcagcaactgcattaaaagatgttgtcaaagttggtgcagttgatgcagataagcatcattccctaggaggtcagtatggtgttcagggatttcctaccattaagatttttggatccaacaaaaacagaccagaagattaccaaggtggcagaactggtgaagccattgtagatgctgcgctgagtgctctgcgccagctcgtgaaggatcgcctcgggggacgaagcggaggatacagttctggaaaacaaggcagaagtgatagttcaagtaagaaggatgtgattgagctgacagacgacagctttgataagaatgttctggacagtgaagatgtttggatggttgagttctatgctccttggtgtggacactgcaaaaacctagagccagagtgggctgccgcagcttcagaagtaaaagagcagacgaaaggaagagtgaaactggcagctgtggatgctacagtcaatcaggttctggcctcccgatacgggattagaggatttcctacaatcaagatatttcagaaaggcgagtctcctgtggattatgacggtgggcggacaagatccgacatcgtgtcccgggcccttgatttgttttctgataacgccccacctcctgagctgcttgagattatcaacgaggacattgccaagaggacgtgtgaggagcaccagctctgtgttgtggctgtgctgccccatatccttgatactggagctgcaggcagaaattcttatctggaagttcttctgaagttggcagacaaatacaaaaagaaaatgtgggggtggctgtggacagaagctggagcccagtctgaacttgagaccgcgttggggattggagggtttgggtaccccgccatggccgccatcaatgcacgcaagatgaaatttgctctgctaaaaggctccttcagtgagcaaggcatcaacgagtttctcagggagctctcttttgggcgtggctccacggcacctgtaggaggcggggctttccctaccatcgttgagagagagccttgggacggcagggatggcgagcttcccgtggaggatgacattgacctcagtgatgtggagcttgatgacttagggaaagatgagttgtgagagccacaacagaggcttcagaccattttcttttcttgggagccagtggatttttccagcagtgaagggacattctctacactcagatgactctaccagtggccttttaaccaagaagtagtacttgattggtcatttgaaaacactgcaacagtgaacttttgcatctcaagaaaacattgaaaaattctatgaattgttgtagccggtgaattgagtcgtattctgtcacataatattttgaagaaaacttggctgtcgaaacatttttctctctgactgctgcttgaatgttcttggaggctgtttcttatgtatgggttttttttaatgtgatcccttcatttgaatattaatggctttttccattaaagaataaaatattttggacaatgccgataaatgtatgaagttagtatccacatcataaattcagagtgatgtttagcagtaaatcaatattttgaagtgatacacagatgtctttcctccccacaaacttttttaaacaaaaaacaagacctcttttctttagatggtgccacctatgcccaccacaacagagattttacatggaaaccgggctcagtgagaactgatttcctgcccaatatttgtctttgggctgtctctagtgactaattattaaggaatctagctggttatacagttcaaggctttctatgttgttaatgaacctcaaaatagccgttaagacatgaaatacagcagcaggttaccaatgcgaacaggtagttcgcatttatgtaaaacattcagaaaatgaagttttgaatttgttggaacattcaaaggacttgagagcattttattgtaacttaaaaaaataaatacaactgtcact

SEQ ID NO: 786 - DNA, 2610 bp, Homo sapiens
tgtcagatgcagcccagcagagaggccctggaactcagaggactcccaaagtccgtgagcacagtgtcctcaacaaaaccccccctcaccacaccttcctcaacaaacccctcacgccaactggctctggaggactgtgtccaattgcgagctgccttggatttaggttatggtcctgaatgctgctgccaccaccttcctgaagtggctcacaagtcctcagcctccgccggagccccaagtgccagactcccccttcagccgcacagcctgggcactcggaccaagctgccaccttccctgtgcttgccggggccaggtaggacacgtctcacaacagagccttttccgggggcgcccttctgcagtgattcttgcagtcctgcactctgctgtgttctgctcacaccaggcagggggagagggagcgtggcccctctgggaagctcccaggacggcaggggtgggtgctgccctacagatacagtacctgctgcacagggaatggacgcctcctggacggtggccccagcccaggaatggctgggacacccactccagtcttgcccacagtctgcttccagaggacacttgcccctgcctctccccacccccaccacgccctgcatctcgcagccacctggaaggagatgtagaccccactgtggtaaggagctgttcagagcccccggagccctccacttcctaccacgcagacatcctgctgctgtgcgacacagatggaccagggcttgtcctgaaggtcccaggatgcacattcctcagggatggctactctcctccccctccctgttaacagactggttttccatggactcctttaagcccccaagtctggcctctggtcaaatttcaaagacatgatggggtggtctgttaagactgagtagctcatgtggcaccaggtgagggctgctcaggcctgcattaaggaggggagcccgaacaacgggcctcccccttccccccacccacaacgaagcagctgctgctggctcctctcccagagactggaagagaattgatgagaacaccggggacccagcagttccactcccaggcctaaatctaagagggcaaagtcaagcctccactcaaaaccttgtgtgtgcacacactcccggcagcaggattcacaacagccacggagtggaagcagagccagctgtccagtggaggatgaacacacagcggggaagacatgggccgtgcaaccgcggctgccacagagaaagcgcaggagcagtgcatgctgcgtgagaagctgggcaccaggcagaaagcagagtccgggagctgggggaggaggggacagcaagtgcctgctcaatggccctgaggtttaaggtgatggagctgatctagatagaattgggggtgatggctgtataactgggaatacactaaaatccctgacttgtacactgtggccacctgaagtgaacagtacacgctttctgtctcagtaaagctacgcaaagaacagcagacatcccgcatgaagtcagctctccagggccgcaccatgggagctatgggctggcagtggccggctctgctcttgacacacaggaaggatgcaaactcagagccccagtggggtcacggccttgcccggagaactccctctggggatggcagcctgccgtccccttgcctagcctggatgccacatcccgcggcagcgaagcagcctcctgcttgaccgtctggcccggggacccttttgtctcctgggtcagtttcattctttccccaggctgtgctcctgatgaagcagcatcgtagctgatgttgaagggcctcacgccagcacctaggctggtcttccctgggtgcctgcttgagcacgtggcccaaaacagccgttgcatggggcactcagaacccaccacaccctcgccccttcccagcccgccaccctgtggctgaggccctgtgccttgagcaagctgctgcccctcctcctcctggtccagttctgcccacacctgggtgcccacctcccctccctgtggtctccaggagctgcccccaacatgccctgggcagcagtgctcatcgtagccccgtctgtggcctggacaggctctgaccactcctgcgttggcacagcttcctcgggaggctcctgccaacaccactcggcacggtgggctcaacacggcagcggcaacgggtgggagtacttgcctctgcctggcccgaatggcggttttccatttggatttggggatgagcagccaatgagcctatctcattcccgttaacgtgagagaaacatccagacgctatcctcaggtctcacacacccccgccgtgctctgcaccacacctggcaggggcacccccgactgtatgctgggcatcagctcccaggcccgagcgcctcacctcacactggggattggagccctcaggccctagagacactggcttgagaaacttttgagatggagtctcgctctgttgcccaggctggagtgcagtggcatgatctcagttcacagcagcctctgcctcctgcgggttctggaaattcttgtgcctcagcctcctgagtagctggaattacaggcgtgtgccacc

SEQ ID NO: 787 - DNA, 2532 bp, Homo sapiens
gaggcggcgagtcccgcggcggcggcgacgatggggctgcgtgcaggaggaacgctgggcagggccggcgcgggtcggggggcgcccgaggggcccgggccgagcggcggcgcgcagggcggcagcatccactcgggccgcatcgccgcggtgcacaacgtgccgctgagcgtgctcatccggccgctgccgtccgtgttggaccccgccaaggtgcagagcctcgtggacacgatccgggaggacccagacagcgtgccccccatcgatgtcctctggatcaaaggggcccagggaggtgactacttctactcctttgggggctgccaccgctacgcgacctaccagcaactgcagcgagagaccatccccgccaagcttgtccagtccactctctcagacctaagggtgtacctgggagcatccacaccagacttgcagtagcagcctccttggcacctgctgccaccttcaagagcccagaagacacacctggcctccagcaggctgggccatgcagaagggatagcaggggtgcattctctttgcacctggcgagagggtctgactctgggcacccctctcaccggctacaaggccttggactcactgtacagtgtgggagccccagttcccacctctgtgacaataggatcatggccttacccttgaagcattaccgagaaggagaacagagatgggcttgaagagccacgtgctgccggctccaaattcccaaggacaaggatccctctgcatttttgtctatgtaacctcttatatggactacattcagctgcaaggaaaggaaaaccttgattgcagtggtttaaacaaacagaagattgtttttccacatagcatggattctggagatgggtggctaatggtattggttcaacaactccacgaaggtaggggtcacgtcttggatccttttgccttaatctcagtgctcgttacttcatggtcccaagatggctgctgtatccccaagaatcatgtctgcgttcaaggaaggaggggtggaggaagaggaagggccaaactagctggacccgtcaccttctatcagaaagtaaaacctcgtcagaagtctgtttcctgctctctccctctgcatatcttcacttagatgcccttggcccgagccagctaccattgcacctctagctgcaaacaaagctaagacagcagggaacagaattgtcatggctgaatagaccaatcgtgttccatctactgagactggcacactgcctcctgcaataaaactgggatcccattaccaagagagaaatgcagaattgtgtaccagttagcttttgctgtgtaacaaaccatccccaaacttggcagctagaaacaaaccctgtattttcccacaatcctatgggttggcaatttgggctgggcccaacagggcagttctgctgctcacacctgggatccctcatggagctaaggtcagctgttacctcagctgggcctggatggtctaggatagccttactcacttgcctggcaggtgacaggctgttggctggaattgcttggttctcctccatgtggcctctccagcaggctagctcaggcttattcacatgatggcttcaggattccaaagagagtgagagtagaagctgaaagacttcttgagttcttggcctggaactgggactaggacagtgtcacttctgctaagttcttttggtcagagcaaatcacaaggctttacccagattcaagggatgagaaacagactacatgtcttgatgaggggaaccacaaagagcttgtggccatttttcacctatcacaaataattttggatgggtatttatttggataaaggtatttccctcttccccctttctctctgtctcatggggcctcactctgccaagttggaaggcactaagacattgtcctggccctcagggtctaggggaagaggtgttggggcaggaagtgagtctctccatgggctggacccactgtagtaggagtgcctccttgtctgcactgctggtatggggttaggccaggtaggacattccagaggggcttctgaaaaccaagagtccctggggaaagggaacagagtaaggcaggccttgttctcactgccctctaagggaacttggtcactcggcacttttaagcctcagtttctccagttcaataataaggacaagagcttttcccatgcattctctttccccgggaaagttgactgaggtgaccagtaatagaattgaaaagggagagtgtcttcagtgcaatgtggcatcctggattgggtcttggaacaaaaacaggacattagtgggaaaattggaaatctgaaaaaagtctgaattttagttaatataccaatttcagtctcttggttttgacagatgtaccatggtgatgtaagatgttgaccttggggtaggctgggtgaagggtatacaggaactctttgtactatctctgcaacttctctgtaaatctagtatcattccaaaataaaagtttttttttttt

SEQ ID NO: 788 - DNA, 3534 bp, Homo sapiens
gttctaataatcaccataataataggcgctgggtgtacagaggggacccaggcgacgctggcctccatccgataaccaccgtaacaggggctgggccgcgccgctcctccgctctaagtgctctttacatgcttcttaagttaccggcaggccagccgcccttacgagagcccctcacggacattaacccaattgagaagactgaacccagcatacgaacgttaagttgtcccaaatcgcagggctggcgagtgaggagcctgaattggaacccaggagcttctggaacccgctccagaattgcgctctcgaccggtttgtccgctgagagcgaacgggtgcgcgagcgccgcatccctgcccaaggccatcaggcaggcagcgctggggcccgggacccgcgcggagactccaccccgggatccgggaaggctcccccgagccggggtcggagctgcggctggaggggcctcggcttgaggaggatctgggagggcgggggctcagtcctggccaccaggtgtgaggggtcgggtgcggagccctgtgtcagacgcggcggtgaaggctgtagccctgctctccgggatgggggtggtactcttaccgcaccctgccccaagccgcagggagcccctggcgcccctggcgcccgggacccgccctggctggagccctgcggtttccgggagctcacggtcggctctgcgcccctccaccgccgggcctgggcctgggccagggactggctggggcgggactgcggcctcggggcgctgggtccctgcccctgccgtgcactgcgcggctccccgcgccgcagctgggcaccagcagcaccacggaccgcccctgtgctcgcccgacggcgccccgcggcgctttaagagacggcctggcagcccagccccagccgcccagaccggcgagaccagcctgcgggagcagccccatggcgggccaccagctgtgccattcgtggtgcccccaacccttcaaggccgagattgggtgcccctgcacagtggagagtgggccgatgccccatgggacccctgcccggcatcagagctgctgcctcacacctccagcggcggccttggagatgcatgtatggtgggggccatcaacccagagctgtacaagttcccagaggacaaaagtgagaccgacttccccgacggctgcctggggcggctgtggttctcggtggaatatgagcaggaggctgagcggctgctggtgggcttgatcaaggcacagcacctgcaagccccctcggagacctgcagccccctggtgaagctctacctgctgcccgatgagcggcgcttcctccaatccaagaccaaacgcaaaacctccaacccgcagtttgacgagcacttcatctttcaggtgtccagcaagaccatcacccagagggtgctgaagttctccgtctaccacgtggacaggcagaggaagcaccagctcctgggccaggtgctcttccccttgaagaatgagaccctagtgggggactgccggcgtgtcatctggagagacctggaggctgagagcctggagcccccctcggagtttggcgacctccagttctgcctcagctacaacgactacctgagccgcctgacggtggttgtgctgcgtgccaagggcctccggctccaggacgacagaggcattgtcagtgtgtttgtcaaagtgtctctgatgaaccacaacaagtttgtcaagtgcaagaagacttcagctgtgctgggctccatcaaccctgtgtacaatgagaccttcagcttcaaggccgatgccaccgagctggataccgctagcctcagcctgactgtggtgcagaacatggaaggggacaagagccagcagctgggccgagtggtggtgggcccctacatgtacacccgcggcagagagctggagcactgggacgagatgctcagcaagcccaaggagctggtgaagcgctggcatgcgctctgccgcaccacggagccctgaccctttgcccagcaccgcggttccgctttgggagccgaccatcctcgcagttgcatgtgacagccacagccacacgcatggacgtttcatccaacagctccccgagctgccagccagcccgagccaggaggacgtgagtgctgatatgcaggagagaagaggggacaaagaagccctggcccggtcagcggctctggccatacagccttccgacacactccctcctccttatctgcggggctgcctgggctcggaatcccggctcctggtcctcacagccctgatttggaccagaatctcagatgctcagaagaaatatcctgtttagtgatgacccagctctacctgctgaatggacctgcagggtaaacttgggtgcctccatctgggaaagctgatgatgtgttcatgcagtcgatgaccctcactgctttttcagccagggtttctctgccttctgcctggcagagaaaacacactgctatggggaaaatcacagggagggcgctgtgaccagcgcactcaggcaccaagtgtcggcatggctcactgtgctgggtgaaggcctccccgagcattaggtcctccacggggctgtgtcaaatgccctcccacattgtgtcaagtctgcccatggcccaccctccccacagtccaaaaccacacagccctggttctccagctgttctgctgctgtttctgtgctctccctgattaagagcattcagttcctgggctctccctttgagcaggaaatggtgaaagcatgtggctatggtatagcccacagggctgagattgctgtgttgcagtattgatgtaaaatttgttaagaaggaagtacccacagatcactgccatcaactccccagaagttgcactcaagctagtgagcagcccttgtgcttgtcacagttactgtaacaggtagtgtgtatttgcacctggcatcgtgcagcctgcacgtcaacacgttgttttgtgtaactagaacagcacatggaaccactatctctttctcttttttccttctttttctttttttttttattttaattttttgagacagagtttccctcttgtcacccaggctggagtgcaatggcgtgatctcggctcactgcaccctccacctcccaggtttaagcgattctcctgcctcagcctcccaagtagctgggattactggcgcccgccaccatgcctggctaattttttttatttttagtagagacggaattttaccatgttggctaggctggtctcaaattcctggcctcaggtgatccacctgcctcagcctcccaaagtgctgggattacaggcatgagtcaccgcacccagcccgaccagtatctttttcttatgcagtgaaacaactttagcaaaagaggcaatgaatgttatactgagtttctacctctttaactccacctccaatttctgtcaatctacaaacacaagtgtcgcctcgcagtgtttcgtatgaacagaatatcttgtgtttgctttttgtcactt

SEQ ID NO: 789 - DNA, 3186 bp, Homo sapiens
atccccggggatgatcgagttcatcaaagtggaaaacttaaggcggtcttcgtcgggctgatacttcctgctttattgaatgttgatattaaatgcttacctccggaattattttttgaggtatcgactttagattaaaagcctaacaattcttacctttcccgtgggctgcctggctccccgcgcggttcaacgcgagcagcgccagtgaggggacctgtcgcgtgtcctgctcagcgcggtgtcccacgggcgcgtccacagcccggggcgtccaggggctacagcggtgcgagctgctctagagacggagggcccggccggagaccaggggccggcggtttcatcctgcgctgacccttgccaacgacgtggctggtcctggggatcacagggcttcgctcatcccatcttcctccatatccccaaggtggaaacaagggggcgagatgtccacaaactgaggaacagacaaaatgctggctgtccatgcagtggagtgtgagtcagtcatcaagaagagtgaagttcagacccatgccacaacatgggtgaaccttggaaacatactaagtaaagcaagccaatcgcaaaaggacaaaacctgtgcgactccatgctatggaccgagttctgtccccctaacatttgtatgtgaagccttaatccccaatgtgactgtgtttgcagaaagggcctttagagaagtaattaaggttaaatgagattataagggtggggtcctgatctgataggattagtgtccttggaagaggtaccacaggcctggcactgtggctcacacctgtaatcctagcactttgggagtccaaggtgggaggaccacctcctccaggagtttgagaccagcctgggcaacagagcaagacccctgtctctacaaaaaaattaacagggcaccgtggtgcgtgcctgtagtcccagcaacttgttatggttacgtaagaggaatgtgaattcaaccctggtgattttgggtcgtgtcaggagcagccctgcgacaccagttggcaccttctgcagactctatgtgtcgataagacaaggtcccacccagcaagtgcccttttctcagctgatgaacataagcctgcatggacgttactgtccatggaaaggagcggccggcaccggctgtgacagacacgtgcctgtctgcgatctgagtttcatgaacagtaaactctgttggtcacagcctctttggaaaacaatgttagttaaaagaagtgccctgtgaccagcagtgccaccctcgacagggttctccaagtgggacccgggcaagcagcctcagtatcactaggggttgttagcaatgtgccttcctgggctctgccccagagtggccgcaccagtgactgggagtgaggtcccagggccctgtggtccatgaagagctctcaggggattctgatgcccagtggtacaggtgggccaccggactggggtgtcatctgcccgtgggcacgagacatgaacaaggacatagcaggtctgttagtagtcataactaaaagaacaaaggagccgggcgcggtggctcatgcctgtggtcccagggtgttgggattgcaggcgtgagccactgcgcccggtccacgtttctatcaaattgaaatcatgagcggttttgctgagggtgtggggcacccagagcctgcggcctgtgctcgagtgaaaatggtggccccgctccagaagcctgcgacggcgctcacggaaccgcagccttcgtgcggcggcacctgggccgtgctactcctctgtgacttcccggaagagatgagctgctacgtccagcaaaaggcacatccaagatcgttcaccccagcatgactcgttacactccggactagaaggaaccccaaggtgcttcagtgacagaacgatgaaccagctggggtgtaacccccatgcaatggaatatcgtacaggaacgaaaaggacacgctacccctacaagcaacatggatctcagaggcaggatgttgcgcagaagaaaccagacacaaatgcttcggctcgtgttgctgcgactcattacaggcagccgaatctgcggtgatgggggccccaggagcagtgaccaggaggcagtgccacggagcctgcggtgggggctgatagtcagtagcgtgacctggttgggatgttctgtttttaagctggagtccatcatgtttgtttatttgttcatttcgtagaggtgggggtcttgtagaggtgggggtctcgctctgttgcccgggctggtctcaaactctgggcctcgggcgatcctcccgccttggccttccagggtgctgggattgcaggtgtgagccactgcataaggccgttattgttattagtgcttaaaaatatttagtaaacattttatttagcctaaaaaccattcagagagcagaggctggacggaacaaggcgtgccaggcggtgagagcacagaccctcctcttccagagcaggaagtgggtaaatgacttttaagcctcatttctggggtggcaaaactcttctgtatgaagaagtacaaatatgtaatgtcccataatggcagctatgggacgttacgtatttgccaaaacccacataacgcacaacgccaagagtgaactgtaatgtaaactgtggacttaagtcaatgatcgtgtcccgatacgggctggttggttgtgatgcagggcaggtgaggcccaaagtggagcttagcctgccagcgttcttggctttgcccaagaaagaattcaaggacaagccggaggtagaagagaacaacttgattgaagaggcagtgtggcagacctcactgaagatccccctaccccaggctcaagtcagagagagaggaggtggcagtgccggaatttcagctgcgcatccgtcccagctctgcactgcgggcgtccgtcccagctctgcactgcgtgcgtcccgccctggctggagcttgcagacggcagccctgcaggaacccaccggggctgactccttcctccccagatcccacaaaacagcagtggatctccactcggcacgcattcccctctacattcacacgaagtgtcttttaatggaaagtgtataaactcgttaattttggttactgcactgaagttaggcaagcttctgcagctttattaaatgaccaatgctgtccct

SEQ ID NO: 790 - DNA, 2504 bp, Homo sapiens
agtcctcagggtccctaacgtactggacagagctaggaaagcaaacccatttgcttcttcctgcaggaaaccccttgaggttaagaccccacaatcacatgaggatggagtggctcaccctcagtcaacaggccagactcaaggggttcctggcaagtcatttctccctcgggccttcggtttcctcacctacaagatgagagggctggaccagatggaaattcagggggtaaggggatgtcctcacgcagcccacccccacccccacgggaccctggagcctccatcccagttcccaccacgcacccgctccacaaatcctgcccaagggtctctcatccaatgacctcaactgctggaagaagccacaagagggaatgcctttcatctgtgatctcacataccagcctgtcctttccattgagaggaaagctgagctccactgaagcaacagaggcccaaggagaaaccttaactgtgtgcctttgggggaaagcgtggccccaggaagggcttccgtgctggccactgcagtggggttgacagagctggtaagccacaagggggccccacccaaagacaagggggacatttattcctgggaacaacaaaacctgatgaggccgagtacatgacaatgaagactgtagagcttttccgttctctataaaaaggcaaggggtttctagacagggaagaaaaagaatttacagagcagtctttgtgtactaacatacagcctgcatctcttttctttaaaatttcttggaagagaatgagtcatctcaacattgcaggaaaccaaatagaagttgggggaaaaaattactttggacaaagtttttctcttaaatgtttgcatagtaatctttgcctggaaaaaaaaaaagatgcctaaatttagaatagagatgtggtacagttaacaattctggttctatcggatgggaagtgtgatggtgtgctcaggctgggatctcttattttgaaactcaccacaaccatttggccagagtgcttcactggcctccactctgactgctgccgaggggctgatcagaagacaatgagattgcaacagcttctaccagttgtatgctgacaaaatgggtaggaaagcttcctttttccaacagataacagcattggaaacagaactgaaatgcactgtgtcatctcatctccccaagacaagactgtaatgttccaaagcctccttgctcacagaaaggatgtaacagcagatatgtacggaaacataaggatcctaggcatccgggatgcctggccactggtctggtcactcttccttagacctctttaaatcagtacatttcctgagcttggatgggtttgtctattagtgtttcccaaagaacaccaattatgaaagaggtttcagacctgttctcaatagggaggttacttgttaccgattctctagttatttagatcagcactcatgtgctttccaagttgggggtgggactgttgttaattggttatctacatttcaaagctgtattttttgacaggcacaaaagtaccccctatttgtaagaaagaagaataaaaagaggaaggcatgtctctgccatgtggcgagagctcatttcagccccatcccaaggctgagcctgtcagcaggtaggaacagtagggccatttagttctctgccatttagcctgtgtcagcagttttccaaaaaagaatccagttttcaagggcacatatctccccaacaaccactactatcccctccccaccctaaagattgttcagagaccaactgttaaaaaaaaatccagtttaaaactgaatttatgttacagatttcagaggaaaggaacatgaccctgtattaagctctggcagcagaagcaccaccatacataaggtggtggtttcaggggcattcactaaccacttcaaagaggccacatttcaggagctggcactttgcctgaaatgcttttggtggggaggagagggctaaaaggaatgactgtttggtagcagggccagtgctaggtgatggtgggcactgtgtctggtcctctctctcagctaacttgggccaccaaaataggtggtacagtgtgaggctgtatgccgaggctctgggggttcagggggtgatgatccagcaggtcagagctcagaaatgacttctagatttcccctccaccatactacctgcatatatgcaagcagggctctttctattcagcattcattcatcggtgaggataccatgagacggctctgagaaagactgaactccagttaggaccttaaactatgagaagcccaaggatgtataaaacacaaatatacttaattgcaaaacttttatagagaggtaggctaggagataccacaacagggacaccagaggtgcttttgccttctgaagataggtagactaggatgttcaaaaaatacatttttgattgcaatacagcataataggtgtctataataaaagtacttatgtgtccgg

SEQ ID NO: 791 - DNA, 2386 bp, Homo sapiens
agttcggccacgtccctggccacgtcgcgggcgatctcgccatcttcgccgcttcctctcaggggccgccgcctcctgagccgcccagccccggggcccgccgcgctgcgccgaccgccaccgccgccgccgccatgaacattttccggctgactggggacctgtcccacctggcggccatcgtcatcctgctgctgaagatctggaagacgcgctcctgcgccggtggattggcattctgacgttgtatctcatgcacagaggaaagctggactgtgctggtggagccttgctcagcagttacttgatcgtcctcatgattctcctggcagttgtcatatgtactgtgtcagccatcatgtgtgtcagcatgagaggaacgatttgtaaccctggaccgcggaagtctatgtctaagctgctttacatccgcctggtgctgttttttccagagatggtctgggcctctctgggggctgcctgggtggcagatggtgttcagtgcgacaggacagttgtaaacggcatcatcgcaaccgtcgtggtcagttggatcatcatcgctgccacagtggtttccattatcattgtctttgaccctcttggggggaaaatggctccatattcctctgccggccccagccacctggatagtcatgattcaagccagttacttaatggcctcaagacagcagctacaagcgtgtgggaaaccagaatcaagctcttgtgctgttgcattgggaaagacgaccatactcgggttgctttttcgagtacggcagagcttttctcaacctacttttcagacacagatctggtgcccagcgacattgcggcgggcctcgccctgcttcatcagcaacaggacaatatcaggaacaaccaagagcctgcccaggtggtctgccatgccccagggagctcccaggaagctgatctggatgcagaattagaaaactgccatcattacatgcagtttgcagcagcggcctatgggtggcccctctacatctacagaaaccccctcacggggctgtgcaggattggtggtgactgttgcagaagcagaaccacagactatgacttggtcggaggcgatcagctcaactgtcacttcggctccatcctgcacaccacagggctgcagtacagggacttcatccacgtcagcttccatgacaaggtttacgagctgccgtttttagtggctctggatcacaggaaagagtctgttgtggtcgctgtgagggggaccatgtctctgcaggatgtccttacggacctgtcagcggagagtgaggtgctggacgtggagtgtgaggtgcaggaccgcctggcacacaagggtatttctcaagctgccagatacgtttaccaacgactcatcaacgacgggattttgagccaagccttcagcattgctcctgagtaccggctggtcatagtgggccacagcctcgggggcggggcggccgccctgctggccaccatgctcagagccgcctacccgcaggtcaggtgctacgccttctccccaccccgggggctgtggagcaaagctctgcaggaatattctcagagcttcatcgtgtcactcgtcctggggaaggatgtgattcccaggctcagtgtgaccaacttggaagatctgaagagaagaatcttgcgagtggtcgcgcactgcaataaacccaagtacaagatcttgctgcacggtttgtggtacgaactgtttggaggcaaccccaacaacttgcccacggagctggacgggggcgaccaggaagtcctgacacagcctcttctgggggagcagagcctactgacgcgctggtccccggcctacagcttctccagcgactccccactggactcttctcccaagtacccccctctctaccctcccggcaggatcatccacctgcaggaggagggcgcctcggggcggtttggctgctgctctgctgctcactatagcgccaagtggtcacacgaagcggaattcagcaaaatactcataggtccgaagatgctcaccgaccacatgccagacatcctgatgcgggccttggacagcgtggtctccgacagagcggcctgcgtctcctgtccagcacaaggggtctccagtgtggacgtggcctgaccagggccactggaaactgtcccaggaacgatggactcacgcttttgtccttaaactgacttaccatccgaggagttcccatgacgccaaaacagcgaatgtccatcaacaggaatcggatgggaacagaattccatggtctcaatgacttaagtttatgggaagtcattgtggccataatggtagcagaagtagcgagcacgctcaggtgataggacgactcctgagacccagcga

SEQ ID NO: 792 - DNA, 2656 bp, Homo sapiens
taattgtgcaggctgaaccttactccatggttttgtggtctccaggtgtgaaaaaatcaattattcttagcaaagtaggtcagagaaatgggagaaaaggacgggaaatgaatgagagcatgcaagagtcttgcttctatttttttgatcaccaattctctggcttttttcttcctcatatcttacctcccttggttaggaacacaatccacacttggtttcactgtggagaagactcaagagaagggaaaacatattttggctactgtttgtcaagttattcagtattgaatatacttaacatatacccaaactgcagatcacaaaaaacacaaacaagcaacaataaaaaacaccaacaaatatctgtaaaaacaagcaagtgctagtacaaagaaaagtgatataaatcgagagggaaaatgatcctgctttctctacttggcttgtgttcaccaaactctgtctttgctgactctgaagcttctttcattttaagcttataattcttataggtttagtccaagtatgcaattacccttggctgtgagaggtggctgagcagttagacaaatgctactaaataggatgaaaggtgaacttgcacttaaaaagttaggttggaatctaaagcatacaattcagtcttctgggaggttatagtatggtactaatgaatatattttgggaaataaatttgatgcaagttttaaataaaccagacttgacttctataataaatttagaaactcttttaccaaaggtcctcattgcaggttttggggataaagggtagagtgctataaatctattatttaaagaaaactaaaatgaattctagatgtttctgattaacagtaagcctctattttccctgcataacatatttgacccttggcccatcagaaccgtagctgcactgatgtattagagaccattacacacgtgaatttacttggtttagcaggaagcctatatgactgtttaaatatttgctatattgttgtaccaaaatacaattctgtgtctactgctcattgtagtctatccaaaggcaactgggcagcagtattctgaaatacgtacaccaaaaatacaccacgtacaattcatcaagttaacataacccaatgataatctgtgtgtgtgtgtgtgtgtgtgcatgtgtgtgtttgtatttcctgctaatagtatgcagtttgcttccctaaacatcaaagatcttcagaaagaatattctctaacatctttttctatcttttctattcaggaattttactcttccatatctggccatgaccttagtctcgaacactcttttgaaagtgtacagatgtctatgcaaaacaatagaaggatatggtgtagctcacacacataggctctgatatagctttaataatttcccctcatatttcaaatattctgaaatcatgtatcatctttttcaaagactgaaataggttatttgcatatggaagagtgataaatttttttttgataaagaaaatgtggctagttcataattgcttttaggccttataatcaaaaaattaaaaattaggatattgtttgagacccgtttactatgaaataaaattctaaatatagatgtgctgggggtaaaaaatcttgacaatgtaagggctatttacatggcagaaagaaaaggaagaaggtatatcaagaatagcctgcactgaaacatgaaaacatattaagtagagggccccagagtatccaacgtttttaaggtaaagattgatcaaggtgaaaaaaacaaaacaaaactcagtctcttatctttttgggataatcttcaagatatttagataaagtagaagagttagatgagtgcttacaaatacaatgtggcactctaaagcaatataattttaaaatattgtgttcaactacttatttgttgtttcagcttgttttaataagaatcttgaaaataatgatagcattaactatcacagacatagcatgtgaatgctgggtaagcagtcatactctgctaagaagctgtctgtttctcttaaatatagtagcacagaatcaaatatcttataaaacttatcctgaaattacatatgcatcattatatttgattagaatgtattctgtacaacagctacttctgataaaaatgaatctaaaaagttaccttccaaaaatcaaggtccctgcgattctttctcttcttttgcaagaagaaatgtgaattcctaaaagctctgtatatattagataggaagcagctgggacaccactgtcttctcatgctccatcgggatacagaacaagatacatctggctgtatgagagaaaaaagaaatcttctagaattaatgtagcacactgtcaattaggatccaaatttagatactgaatgaagccttctcaaaacacataccagttcacatccttctgtttcttaaactgctgccaacagaactttcgaaatttcaaccttgagaaaactatataaattgtatgtaaaattatataattaaattttataatatgtttagcaggaaaatgtaaaactgctgttcattttttgttttgcccaggattaagaaaaaagaaaaatagagaggaacttgctgcaaggcagacaataaatgaagctattttaatgaaagcacat

SEQ ID NO: 793 - DNA, 2368 bp, Homo sapiens
tttaaggtattttgaggcctgagtggtccagagtattgtttcataatcccaagtctctttccttgggaaatcataagttcatggtattgtgggatgtggataaaaacctcatccttgcccttgagtatctgtcagtctgtttgggggagattggatgcatatatgcaaaggactaggaagaaaagtctgagtttagctcctttgggacagaggatgcagacggttatccatctattcatccatctattcatccatctattcatccatccatccatccatccatccatccatccatccttccatccatccattcatttatccaaccagccaattaaccaaccaaccaaccaaccaaccaaccaaccaaccaaccaaccaaccaaccaaccatctaaccacccaaccacccacatacccaaccaatgaaacaaccaactaaccaatattcaacacctctcatgcgctaaactcacaatccagtgagcaagataatgacagtccctgtcttcataagtcctatgggctccagggcaagtcagagtcctctgataaacttacctattattcttaccatcacagcttagatttgagcacttttacctcaaacactgtactaaaggttatactcttattatatcattgacttctcttaatttctcctacctgcaagaagtaattgcattgtatagttattcacataacacatgtgaagaaatgagttcaaagaggttaagagattaatcttacccaaagtcctgtagatagagagtggcagcttcaggacaccagtccaagccttatctatattgcaagtattgcataaaacctcagctgaaattttgataaattttatggaacttaagctagatagatcttgttcacctgaacatcctgtctgggatgcatggtagtagactgaacagctccactgcttatgaaatgtgtgacctcaggcaagttgttaagctcttggtgcttcatgtttatcattggcaaatggagatgataatagtacttatctcatgggattgttgtgtggatcaaatgtgtgaatatatgtaaagtgcctggcccatgttatataagtgttggctattattgttattgtgttgacagacatttcagaagagtacttgtttgggcgaagaagttaatgaacacttctttgttgaacctgtggggttaaggcatgcttagaggaatgtaatctgggctagatgcttggctattcaagtgagcatgtgacagtgatggtctcagtctgcctcccttgtcagagcatcatctgtaaatgattgcctccatcacttaccaagcacagtcacaggaagttgtgacctccctttattggaactgtcattttgaacctatgtttagtctggcagacgttttgacctccgtgatatattgctgagggtgttttgactccatgcttataactacaacattaaaaacaccaataatggctgaatttttatcaagaaagtattttcttaattaatgcttactcaatcatttttactccaagataaatgttcaatacagagcagttaaacaatttctacctttttccatcttctattttatcaaaatcattttatggagatgaattcttttgcatttggaattttacaatgatggcttataatttattgacaataatttatttaggtcaaattttagcttctgccactgaattttccatcgtagttttatttctactaagtcaaattttcctggtttaaatttgattgatttgaattttattgggataatttgattcccctgtgaatgtttgctcattaacacattctttgtgtaggttagctgttgtcagttttattttgaactgattatttcaatcgaaacggtgagggacaaatgcctaatcaccttaagcgtctatggaagccaggagtgaggccaggtaaaggcagcccagaccagatctaaatgaaacgctgtgggctaagttttcattcacagaagatgggcagagtggcagatcagaggtaactatcaatgatacaaacttcaaggaaatgatgagatacagaggaccaaagttaaagtcaatgatatatgtgaagcatgatgattttccaagccatacccaaaccctatgagctgtgcatgttatacccagcagtttaatcctggaagactcttggtgcatgttgcagggatgagttagctcagtgtgatgtagttaaagagcagtgggattggggtcaggtgatctggggtctgaacctagttctgtcactccttgtgtatactgggacaagtccatctcccacctgaggtctcagttttaccaactgtcaaaagattgccctaaaagttcatagaccccttcgaaaatctg

SEQ ID NO: 794 - DNA, 3031 bp, Homo sapiens
aaactaaaggcacacaggatgaacatggaacgacatgagatggacgcagggcccggaaggcttcccaagggaggcgcacagtggaaggcagaatgcaggttggccctgtggggtctcagctggaccccgctttccctgacaggcctggggaatggagctgcctccgcccacagcattgcaccctccacctggtgccctggagttctgatgcctctctgccccctcatctcttctgctgcaaagctagatctggatcctgggggttctgccccaggcccctcccagcatcacacatactggacacgcacacgcaatcacacagagtcactcacagtcacgtgcacactgtggatggaagcccactgttcccctgtgtcaccatggccactctacaagcatagacatgcactccccttcactgtccctggcttattgcgctgcccccctcccatttcctgtccacctgtcaggccgggggcgggggaggggggaggcacaggagggaggtgtcagtgtccctggagccgcagatggacattccttgctcgggtcagatcacataagctgcctccttccaggaacctgagccgcctgtcctcacgccttacccaatgcctgagggtgggacagctgggctaagtgctcacggcagcaaaaaagagtgcgggctagacagcagaaaggacttcccaagtgtgtgtgtatagggttacccctgtcctggggtttagctctggcttactgtctgaccttgagaggtccttatccctctctgggccttcctattccagagtgagggcagctgcttaccatgtaaagggcttcttaaagggtctgcgatggagatgctgggggctggcactaaggtgaggtacacacaaagggaacagcagcttcctttcaacaggcacttgtacacacacacaatcatacatagacatgcagattcacacacatccgcatagctgctcctacggatccctggtcactcattcatgtcacatagagacatgcatgtagcacgtatacccctgcatgcagacatctacaaacacagatacgcatacaaacagctgcccagtgctgttcctgtgtagccaccaggcctgtcctcgtgtctctgtctctactgagggaagtctggggtgtctcttctctaggaagtgcacccgatactccagcagtcggaggacccattcaagactcccctcgtctctgcagcacagtcttcctctgggagtggacacaaagtggcaggagatgtggggctggggccgattcccccagacatcacctccatcctgtgattgatgagttgaggcccgcagccccctgctccccacggttcctgcctccattgagcaggtggagggggggttccgtgtccgcacagcccttgtttttctttaattaaacatctggctcttgtggcctgggaagcctcagaccctcgctgacagcctccccgccacaactttggcatcaatgatgggttgaggggggagagctggggctctggggcccacctgtccccatacagtgcaggggactgggagctccaagaatgccctgaccatactgtcctcacccccagtgccgccgcgggagcctgtgctcagctgccgctccaacacttaccccaagggcttctactgcagctggcatctgcccacccccacctacattcccaacaccttcaatgtgactgtgctgcatggctccaaaattatggtctgtgagaaggacccagccctcaagaaccgctgccacattcgctacatgcacctgttctccaccatcaagtacaaggtctccataagtgtcagcaatgccctgggccacaatgccacagctatcacctttgacgagttcaccattgtgaagcctgatcctccagaaaatgtggtagcccggccagtgcccagcaaccctcgccggctggaggtgacgtggcagaccccctcgacctggcctgaccctgagtcttttcctctcaagttctttctgcgctaccgacccctcatcctggaccagtggcagcatgtggagctgtccgacggcacagcacacaccatcacagatgcctacgccgggaaggagtacattatccaggtggcagccaaggacaatgagattgggacatggagtgactggagcgtagccgcccacgctacgccctggactgaggaaccgcgacacctcaccacggaggcccaggctgcggagaccacgaccagcaccaccagctccctggcacccccacctaccacgaagatctgtgaccctggggagctgggcagcggcgggggaccctcggcacccttcttggtcagcgtccccatcactctggccctggctgccgctgccgccactgccagcagtctcttgatctgagcccggcaccccatgaggacatgcagagcacctgcagaggagcaggaggccggagctgagcctgcagaccccggtttctattttgcacacgggcaggaggaccttttgcattctcttcagacacaatttgtggagaccccggcgggcccgggcctgccgccccccagccctgccgcaccaagctggccctccttcctccctcaggggaggtgggccatgcagctaacccacccaccaaagaccccctcaccctggccccttgggctggaccctccaatgccagcgactcccaggagcccttgggggacgtgaggggagcctctcacatccgatttctcctcctgccccagcctcctgtctatcccagggtctctgttgccaccatcagattataagctcctgatgctgggggggcccagccatccccctccccccagcacccacaattttcagtcccctcccctctgccctgttttgtatacccctcccctgaccctgctcctatcccacagtatttaatgccctgtcagtcccttctagtctgactcaatggtaacttgctgtatttgaattttttatagatgtatatacagggtggggggagtgggcggttctcattaaacgtcaccatttcatg

SEQ ID NO: 795 - DNA, 3407 bp, Homo sapiens
gcggcagccagcgagcggggagaaacagattcacacccaggggcctccgggcagggcccacgggactcaggccgtgtcccgcttggaatgtggagcaggcgcggcctcggcgtcagcagagctcccctgcatctcctcctgggggtgtgggggccgagtgggagaactggcggacagaggaaaggggcctcgctcgcaaggcccgggcggggaggcctggcctcctgctcagtcggtgcaaatggaaaaagagacgttctgtttctccggaaaaccctgactaatacagtagaggatatccagattgacaacttcaggagaaagtctgatttaggagtcggaagcccagattggaaaaacctcttgatagatgtcactcgggaagaccatgaaaacagccaaaataattcaaagagaagatgcaaagtgaactgtgaaacagaccaaagatgaatctctttggtaaatcccctgcctaaatcccctgccatggaatagctgcctaaacttgggcaaataacttgacatttctcagtttccacattccaaaaatggatttttatgagaattaaatgttatgatgcattccagctacctgtcctagaacctggcataagagctcagtacatgctggggagggttatcatcatcgtcatcatcatcttattaacattcatgttgaagggatgatgggctgctgagaagttcatgaagaaggtgaaaaactattacagaggtgggaggaaaaagagaggactatcacagaagcagaagagctgagagtattgagaaagggtgacgggttagggggactagcaagtaccctctggcgttggcgatattcagtttgttgaaggccttgatgaactttaatgaagtggtgagagttaaacaaagctgagataggatatgaatctcagggaggatatgaggactcattgattaccattccaagaaacttgtctgaaaaggaaagaagagatggtggtaatcagagcagagtggcaggatgcagggagtttttatttatttatttgttcttgttgctgacgttgttttcatactattttttgtttgttaaagagggagagttgtgagtataaaataacctataaatagggaaaaccaggaacagattcatgtgaaagcccttgactgagaacagaattaattacccgtgcagaggtagtcttcaagccttggcaggtaagcaactgtctgagacacagctggctcgggaacagggcctttctttggctggcaggcttgaggcagcataatttggaagcggatatgagaaagggcataataatgtgaaatttgactgcctagtgggggagaaactttgaatattatgaggcggttatgaaagtatttccttcttatggcttcaatggcactgcctctgagcattagtgtttgtcctcaggaggtaagtgtggggactgtatcagcagttactacctagataagcatggtgtataggggtaacatggtttatagagcatgcaagccttcacctctttgctagatgagatatggaacctagattcggagaccacgtgacccctgaggcatggggaggtggggtcagaaagcgttactggccatgatccagacccaggcgtggagaaacgacctactggggttttcagggagcaggaaggtggggcaggtacagagtatattctgggggacagtttcataaaaagtgagtagatctccacaacttagtttctagactaaatggactaagcatgttccgccctattcttcctactaacaataacaaaaagctctggacaaaatttataaagcaacccacagaagactccgaagttggaaaaagaaataaaaactggcgatttcctccatactcaaggcatcatgtagcagggagtgccttgggtgttgtttatgtgtttgttttcttttgttcattaatttttttctcccgtgtatggcagtgtgggctctagcaatgcctaccacccggaaacacagatgggtacaaatttaaaaaccccaagaaaactctttttagccaaatgaccagtgtttccagcagagcaaaaacattttgaccacatctgcccttttgtgctggctaaccccttcccctgccaccatgtgctgctggggggacattgtggatgaagcccactcatttattcctcctcctgcagtaatgtgaccatacccttcccactcctaactagaggctgggggaggactatgtgggggagagaactggagaaagcaattttctaaatttgtgtatgaaatcctggttagaactctgagtgccccatgcacaaaacagacaagaaacaacacagcaaaaagattcaagggtcagaaaaactgaacactggtctgaaacactgcccgggtttcagattggcatcagggtagcacccaagtggggcagattgaaatagcactgtaaaggctttgaaaatgaaatgacttttgagccacagctcacaaagtgaaccggaacaagcattctgaacttaaacaggtcaagtgcctgctaaaatcaaagactgaaatgggaaccagaataatataacatactactgaaaatgtctaggatgcaatccaaaatctcatcacactgaaaaccataaaaatctcaacttgaaagagaaaaggcaattgtaagcattgagattacacagatgttgaaactatccagcaagaatcataaagcagctattatacaaatgccctgattttaaagcaagtatgaatgctcgaaacaaatgacaaagtggaaagtcacagcagagaaatagaaaatgtaaggaagaaccaaatggaaattttaaaactgaaaaatacaataaccagtttttaaaaattactagattcagagggaaagaccaacaactcagaaaaaatgggcaaaggatatgaagagtttacggaaaaggaaatgtagataactcttacccatataaaaatatgttcagcctcactcatataagaaaaatcaaaattgaaattacactgagacactgcttttcacctgtcagaatggcaaaactcaaagtgtgaatatacgctatgagaatgtggaaaattctcatagattgcttgtgggcatctagaacaatttggttgaatcactaaaatccacatgccatttggccctgcaattctacttttagaaatttatcatataggaaacctgcatatgagtgaaatgacatacgtggagtgttactcctggctgcattgttggtaatcacaaagaactagaaaaaacttaatgtccatcaataagatgctgattaaattaattattatacgtcatacaatggaaagttagaaaaccgtaaaaaaatgaaaccctctctataacctgctaccatataataaataaaaggacaggcaatgat

SEQ ID NO: 796 - DNA, 2719 bp, Homo sapiens
tttccacagtacccacttattcttgaaagactcacatgtctttgccttttcagatgatgggcaagcgatctctgccactggtcctctcagctccaccatctttgtccgtccctttgtgcttcctttgcagtacacacaagcctgttgtctaaacagaagctcaaatgcacaatgaggtcccagcaccccttcttacagcatccccaatctttatgaggaattctcttgaagccccttatttggtttcaggttggggatggggtagcagagagagggagaaaggatgggagttaattacctgtcttctggaacattctatcaaaagaccaatggctccatatctcttgctcactcctgctcccagttctttccccacacagactgagagaggagaaggatctaaggtagtgggccattatagggcccgtgccataattggggcagaagttggatccagctgtgagatgctgcgctggcccctgactgacacagagccttctctagaacaggtagtaaacacaactcctttttcctcacctgaaggccagaatttctgaatagggcagggaggggacaattgaaaacgcccccctagtatcctattatggagcatcagaggtatgcggggaaggggacttcacagctgtcctcatctgaatatccaaacagttaatgacctaatggccattcatgacagaaaatctgattgcagcaaacaggaagtctccctgctaatactcacccctgcctgttcttgaccttaccttggttactggtagtcaggcactattccccttgcagtactgcctcattacttggaaggtgatttttagccacacctttgcctgcttccctccagttaagcacaagcttaccccctactgccctgggtgatagaaatgcaaagcaagcctgttgacaatttctgaagaccccaagaggatgactatcagaatgaggccagttctaactgactgagttttcattagtgaagatcatgaaatgcctggcccatgaaggctcgaggtttgcatctggtgtgagctcacatgcgtggatgcagaagcttcccaggtgctgtgggtgtctcttggcggcattttactttataatgctcagtttgggttcctcttctgctgaacctaattttttcactccaggggtaaccactttttccactttcaaataatggtgcaacttcagtgatttaatttagagaggtgatgaagtgaccgttcaagtgttcagcaaatggataaaagcctttcacaaattcctcaaaaataaacactctcatcttctgaaaggtttactaaatacacactgtaaagaactagccatcagcatatatacttcttgttattcgatggttgcagtattatgttttattcaagtttggttacatggatatggaaaggtaaagtctgacccctgaagcaaagaagatggtcattctgcaagtagggcagggacagcaggaacagagaagagtctcaccatgtcttgaccatgaaggtctcaagatgtctaggaatgcatttctgggggtggatagggttgtctacaaatggtgcccccaacatcaggccaggtcaggccaggctaggaggtgaggggctccagtaggtggcctgctgagttggagaaacagttgggcgacggagctgagtgagcttggtgaatcagccccgagagagcctactagaaggctggactctgtgcaacacaatatttctctttattgtgtccttagtgtttattgtcctgtggttttcctttagagtttagcaaagccattcagctcaccttgagctgtgctaaggtgaaacatgaaaagcttcatttgtgagatcattaaaaagggatgcagtgcattcctggaggccagcatggaggaagcagtcataattaaagtgagacaaaaacaaatgggaggagaaaaagtgtggagggtgaaaatttcactccttcatctatttcaacaactgtttatacctctgctcagcactatactgagtactagagctacagcagcaaacaagaccatcaaagcttgttctagtggagggacacagaaaagacaagcaacataatacaaataataattgtagctagttctaagtgcaataaagaaggaagagaaagagagccaacgtggctttcagtgtgccccgtgtggtaggcaagggggagagatgtaggtggggaggagagggagctgagctgcacctgtgtcaggtaggaactgaggggtcctgctaaaatgtttggattttgttctgagtacagtggaagatgctgatgaattgtaagcaggggagtgatgagatccaatttacattttgaaaagaatcctccagttgctgtatggggaatggattacaggaagcaagagtgaaagcagacatacctgttaggaggctactgtgaggatccaggcaaaagaatgtggcagcttggcctaggtgtcaacagtgaagatggggggaatggggtgcaatcagaatatgttctgcaggtagggctgaaagaacctgatggtggcttggatatggggataagagaaaacaaggaatcaatgatgacttctcgggttttatcttgaacaaagacaggagtgattggtggtgatggttgtgctatttaaggagaaagaagaaggaaagaaagaaagaaagaaaagaaagagagaaagaaagaaagaaagaaagaaagaaag

SEQ ID NO: 797 - DNA, 2538 bp, Homo sapiens
tagtaagtgctcaataaagattagcttttacttaaaattttctttgttgttttttctcctacccattagaatgtaagttccataaaggtaagaaccttctgttcttgtccaccaaggcctagaaaggtgggacacagagtaggcacttaaatattgattggctgaaaacagaatgttatcccacccttcagggtcaaatgccatgtcctctcttcccagtccggttctccaccgagggacatgaggctgctttcactatccgcataagacacccgcccaaccctcggctgtacccacctgggtctctaccccagggaggtgaggctggtaggggcagggacatattagaaccagccttggtggggagcaagttgggagagggcagtcctgggaggggatatctacctgttcccctctcccaaccctccttgtctgcacccaaccctgtgcccccaatctcagcccagtacaacatcagcgctctagtcacgattgccaccaagaccttcctccgttatgatcggctacgggctctcatcaccagtatccgccgcttctacccaacggttaccgtggtcatcgctgacgacagcgacaagccagagcgcgttagtggcccctacgtggaacactatctcatgcccttcggcaaggtgtgcagctagcaggctgaacggcaggccagaggactcccgcagggggtgtgccctcgatctgcagcctccagggtagtgattcgaggaccacctgcctcagaatcatggggtgcctgttaagcatgaggattcctggaatgtaagcttcgtgggagcaggaaattctctctgaattcttagaatggtgcttagtgcctaatggcattcaataaaatagctgatgaatgaataaataaatgcacacggaaattaaacgcattctaagaccactgacttggaacctctgtggggatctgcatttcttttacctagctcctggcctttcgaaagcactcaaaagtctggagaagaatacaagctgagaagggtcgggggagagaaagaaaggtggcagagggccatgtcctatttctgcagcctccccaaccacacacacctttctgccagggctggttcgcaggccggaacctggccgtgtctcaagtaaccaccaagtacgtgctgtgggtggacgacgacttcgtcttcacggcgcggacgcggctggagaggcttgtggacgtgctggagcggacgccgctggacctggtagggcaggggctgcaggatgtgggggtggagaagggccttgaacaggctaaggccacagcgggggcgctgcggccaggaacggccagccctaggacaaagagagaaccacgaagtggggcctgggaactgtctgggtcctgcaggggtgaagcggaagaggatggggcaggggtacccccgaaggcaccggagcgcagaccttgaccccttcgggtcccctatcccaggcccgcctggaggcaacctccctctccctgcaggtggggggcgcggtgcgcgagatctccggctttgccaccacttatcggcagctgctgagcgtggagcccggcgccccaggcctcgggaactgcctccggcaaaggcgcggcttccaccacgagctcgtcggcttcccaggctgcgtggtcaccgacggcgtggttaacttcttcctggcgcggactgacaaggtgcgcgaggtcggtttcgacccccgcctcagccgcgtggctcatctggaattcttcttggatgggcttggttcccttcgggttggctcctgctccgacgtcgtggtggatcatgcatccaaactgaagctgccttggacatcaagggatgccggagcagagacttacgcccggtaccgttacccaggatcactggacgagagccagatggccaaacaccggctgctcttcttcaaacaccggctgcagtgcatgacctcccagtgatggcccgctggggatttctgactgtcaggctgggcctgcctccttgtccctgccaggaatttccaacaaaccccaccaccctgtgagcactctactggctgtccctgagcctctagttcctcactcttccttttcagaacctgatgcccagtaggggttgtcctggtgacacccctcctttttccagtgcccagaggcctggtggagccataacctctcccacagccagtgccaagtcctccccctgcccattctcatggggcaggaaatggggggatcactttccaagtgccaaagagcccagagggactctaagaacctaaggtggaaacactgtcctctcatcttgggaccgagggggtggggaagttccccaacacataatcccaagactgtgcccctcatctgcatcttcagatccagtactctgtgtacctgctccagccccacccccacagagagaacttgtggctctggggctggggtgagggctggtggttggtgaaagccattcttagttgtgtctctgcaatgctgtgggcacaaaggaaggggcaccagagtccctgtgc

SEQ ID NO: 798 - DNA, 3868 bp, Homo sapiens
tataaaataacagtagataccaatgacttagaagaaaaaaaagccttgacatctctatttcctcatctctaaaggtgataacacttgcactatggtgatcctactagtaatacatttggagccacgttgtaaacttcagagtttgcaccattattattatttttttattattattattttttgagatggagtttcgctcttgttgcccaggctggagtgcaatggcgcgatcttggctcactgcaacctccatctcccaggttcaaggattctcctgccccagcctccctaatagctgggattacaggcatgtgccaccacgcccagctaattttgtatttttagtagagacggggtttttccatgttggtcagactgcttgtgaactcccgacctcaggtgatatgcttgcctcggccttccaaagtgctgggattacaggcgtgaaccaccatggatggcctattattattattattagagatggagttttgctcttgttgcccagtctggagtgcaatggtgcgatctcagctcactgcaaactccacctcctggatccaagcgattctcctgcctcagcctcctgagtagctgggattacaggtgtgcgccaccaggcctggctaattttgtatttttagtagagacggggtttcaccatgttggtcaggctggtctcgaagtcctgatctcaggtgatccacccgccttggcctcccaaagtgctgggattatagacctgagccactgtgcctggccaaagtttgcaccattattattattattatttttcttttgagatggagttttgctcttgttgcccaggctggagtgcaatggcgtgatctcggctcactgcagcctccacctcccgggttcaagcagttctcctgcctcagcctcctgagtagctgggattacaggcatgggccaccacgcctggctaattttgtatttttagtagagacggggtttctccatgttggtcaggctagtctcgaactcccgacttcaggtgatcctcctacctcagcctcgcaaagtgctgggattacaggcgtgagccaccgcacctggccagtttgcaccattattatgggagcacttgcaaagcctgccagttgatggtagggtggaaaagaagaggacaactagaagagagttcctacaccgcaaagtaaactttgctggctctgcgaggagcaggaaacctgcatgatgagaacaaggactgggtggcactgcaggaaatgctcaattcgagtttcacttcctgtgttatcactttttctttgctgcaatttcatctttgttggtcaattctcttttaattttccatttttttacattctatgtaaatgtagtttttatgaactagagagtctgactccatattttatctttgactactgtcagctctcaagccccacctcttccctccccttctgtcccacacctggatggctgattcaaaagcccaggtgcttcctcttttggctctaaaggcaagttcaagccatgcaggccccagcatgtgcattggagccttcatttccgccccactccttaaccttaataacacccaaagccagtctctcttccctgctctcaagccatttttttttcttctttttctggagacagggtcttgtgtcacccaggctggcgtgcagggccctgatcacagctgccagtagctggaaccacgggggtgtgccaccacgcctggctaattttttaattattttttgtagagatgaggagtgccactgtgttgcccaggctggtctcaaaactcctgagctcaagtgatcctctcttggcttggcctcccaaaatgctggggttacaggcatgagccattgcacccagccttaagctatttttgaacccatttgggattcatccctgttctccccagaaagcctcatgtgagtcataagcctttacatattctctctgtgcatgtggggctgtcaccagttttgaaaaaccaggttttgggtggggaatctatctcgtatctttgggtaatatcacagataaatacagcagacattaacattttattcagtaaccactgacagtaggggaaagagctgagctccattctgatttgtgcagtgatgatcgggctttttttctttttttggtggttggatattttataccttctttttccccaaatactctccactgaatgtagtcgactggtgattttaaagggggaatgagggagtatggaggggtatgagttggggctcagtagagttggggatgtgaaaaattacaagggaccagtgtaaatgtgatgaggccagcggtgtctgcctgctggcaatggtcaaagttagattccatcctcccacagagactgggagacagaggccttatctttcccaatcactacatttcaaagcaatggctccttgagaaagcaatgttccttgagaaagacacttcttagctgtaggagatacacacttgcatacacatacacaacatgtgtatcacataaacatctcaaagggacagaggacagattcataattgtaagtcctttttagtaaatgctcttaagagagggcggtcaggagcctatggtcagatattggcaagaatagtaagttatcctggcagcactgagatttctcaggcaggcattttaatggtggggacaggggtcatcctgggaacacaggctatgctactagaagccatgccaatttgtctctcagtgcagagtttcagatggagttatggggggagagttctgcagttctcagtaaccacaacagtatatatcactggaagatgaagcccacacaactacagatgttactgtttctgagtgagccgaataacaaacttacagtgagcagtcaccaacagacagaagtgatgtgattggttactgatcatgacatgcatttgttattaatgtgatgatgtgtagactgaagagctagcagcctgcactttatgcgaaaactcagttaatatactgtgtacctgaaatttgagttgtgtcgttgggggactggtgttattaaatcatggtgactgaaattcgtgcatatcagaactgtaccaagcaagggctgcctgatgagtataatgctctcatgttttatgggaatttatataaatttaaaataatatgaataaatatttgaaagttgtatgttatgcacaaggtttgaaataatgcaattcttttaatattttaaaaaattgttaggactcagattttcttttatcttttcttttttttaaggtacggagtctcgctctgtcgcccaggctgaagtgtagagtgcagtggcatgatctcagctcattgcaacttccacctcctgggttgaagcaattcttctgcctcagcctccggagtagctgggaatacaggtgcaggctgccacgcccggctcatttttgtgttttagtagagatagggtttcaccatgttgcccaggctggtctcaactcctgagctcaggcaatcctcccgccttagcctcccaaagtggtaggattacaggcgtgagccactgcacctggccctcgactcacagattttcaaaatacttttgaacagtaagctgaggacagtgtttattatgactacactggtctcctttcactagctcacaaaatttaactacatcacttgtcagtctcctaaaaatgcagtgtatgtgctttgaaacttgtgaatgatctgctgatttgtgctattttatattcaatgttgttgaaagaatagtttttaaaccaagtaatgcaaaaatttagtgtaacatgaatgcttgtgctgtaaaacatactggaaaatcaatagctctggaataaactttggattttt

SEQ ID NO: 799 - DNA, 2651 bp, Homo sapiens
atcacagtggggttccatagatgatggtcctgtcatatcagggttcccattgaagggggccctttttggcactttcttttattccattagtctgtttgcctggtcacacattttattgctttttcccgcaaaagaatcaatgtgggaatttatttatttatttattgagacggagtctcactctgtcacccaggctggagtgcagtggtgcaatctcagctcactgcaacctccgcctccctggttcaagcaattctcctgcctcagcttcccaagtagctggaattacaggcatctgccaccatgcccggctaattttttgtattttttgtatttttttttttttctgagatggagtctctctgtgttgcctaagctggagtacagtggcgtgatctcagctcattgcaacttctgcctcccaggttcaagcaattcttcctgcctcagcctcccaagtaggtggaattacaggtgcccactaccatgcctggctaatttttgtattttttagtagagacgggatttcaccacattggccagattggtcttgaactcctgacctcatgatccacctaccttggcctcccaaagtgctgggattacaggtgtgagccactgcacctggctgattttttatatttttagtagagacgggtttcaccatgttagccaggatggtcgcaatctcctgacctcgtgatccacccaccttggcctcccaaagtgctgggattacaggtgtgagccactgcgcccagccaggaatttatttttaaattaaatttgatttatttagtttcctaacccttttattgtttttaggcaattttttgaagtataatatgaataagaaaattatggtgaattgttacagcatcgagacctccaagaccaggacatagaacaatcccagcccccagaaacctccaccccataaggctccacaacccctcttctaacacacagattaccttcagctcttcttgaacttcatataagtgtgaaactcacccatgctgttgaacacagcactgtttcattcatgtaagcggccttatagtattccattatgtgaacgcagtttattatccgttctgttaatcacagtagtttttacctgttgtgagtaagggtgtcacaaacagcctcatgtgtactttgtggcagatggaattcttgtacagatgtggaacatacactggatttgaagtgctgggttatagagtatgcacatgctcagctttatcaaacagggcttaacagcttttcagagtggctgtgccaactcacactctccaacagtctatgggagttccagttgccccacacccttgccaccacttgcaattgtcagctgtaaattttagccattttgtcgggtgtatattggtattttattgtgtttttgatactcgttgctcccgcaatcattgaagttgagcacggttgtatatgcttattggcaatttggatactgtctttgcgttttcaaaaattgggtttttgtcttttattgatttgtagaatttctttattctgaatttgagttcttagttgtgcttgtgtgtgtgcacatagtaaacacacacacaggttaaaataattgggagatcattagaatgagatgaccccagcgccttgggtttcaactcaagcaaaccaaagtccatctcagtgtacatggttatagttcaggtaagcagaaaccaccagctgatctctaacacggggcttttgactggaatgatttctttccctttctttctctttctttctttctctctttctctctttctttctctctttctctcttcctttctttttttctttcctatctttctgcctttctttccttccttccttccatccttccatctctttctttttcttttctctttcttttctttctctccctctctctttctttcctccctccctttcttccttccttccttctttccttccttcccttcctccttccctccttcccctccctccctaaaattcatagaataaaaaaatgcctgaatagccaaagtaatcctaagcaaaaagaacaaagctggaggaatcacattacctgacttcaaattatcttacaaggctatggtaaccaaaacagcatggtatttaggattgttttcccaattctttgaaaagcgatgttggtatcttcataggaattgcattgaatctgtagattgctttgggtagtgtggtcactttcacaatattgattcttccaatccatgatcatgggatgtatttccgttggtttgtgtcatatacaatttctttcagcagtgtttgctaggtctccttgtagagatatttcacctcttggtcaagttatttctagttattttattttactttttgcagctattgtaaaagagctcgggttcttgatttgattctcagcttggtcattgttggtgtatagcggtgctactgatttgtgtacattgattttgtaacctgagacttcactgaattcatttatcagcaattcattcatttttagaggatacttggtccatgcacatgtcagagattgttgtaatgtttctttcttgcaatgatctcatcacattttaatcacaaagtcaggctagtcttttaaataaagttgcaaagcattaatcatt

SEQ ID NO: 800 - DNA, 2371 bp, Homo sapiens
gcaacatctcctgagaagcactctcccttgtcgtggaggtgggcaaatctttatcagccactgccttctgctgccaggaagccagctagagtggtctttaaagaaaactgggcatctcctgctacttaaaatcaaaaactacctaaaataaagattataaaaaagtaaggatgaatggacggtctttgattggcggcgctggtgacgcccgtcatggtcctgtttggaaggacccttttggaactaaagctggtgacgcagcgcgcagaggcatcgcccggctaagcttggccctggcagatgggtcgcaggaacaggtcattaatagcatctgggctctatggctacaatgccaccctggtgggagtactcatggctgtcttttcggacaagggagactatttctggtggctgttactccctgtatgtgctatgtccatgacttgcccaattttctcaagtgcattgaattccatgctcagcaaatgggacctccccgtcttcaccctccctttcaacatggcgttgtcaatgtacctttcagccacaggacattacaatccattctttccagccaaactggtcatacctataactacagctccaaatatctcctggtctgacctcagtgccctggagttgttgaaatctataccagtgggagttggtcagatctatggctgtgataatccatggacagggggcattttcctgggagccatcctactctcctccccactcatgtgcctgcatgctgccataggatcattgctgggcatagcagcgggactcagtctttcagccccatttgaggacatctactttggactctggggtttcaacagctctctggcctgcattgcaatgggaggaatgttcatggcgctcacctggcaaacccacctcctggctcttggctgtgccctgttcacggcctatcttggagtcggcatggcaaactttatggctgaggttggattgccagcttgtacctggcccttctgtttggccacgctattgttcctcatcatgaccacaaaaaattccaacatctacaagatgcccctcagtaaagttacttatcctgaagaaaaccgcatcttctacctgcaagccaagaaaagaatggtggaaagccctttgtgagaacaagccccatttgcagccatggtcacgagtcatttctgcctgactgctccagctaacttccagggtctcagcaaactgctgtttttcacgagtatcaactttcatactgacgcgtctgtaatctgttcttatgctcattttgtattttcctttcaactccaggaatatccttgagcatacgagagtcacatccaggtgatgtgctctggtatggaatttgaaaccccaatggggccttggcactaagactggaatgtatataaagtcaaagtgctccaacagaaggaggaagtgaaaacaaactattagtatttattgatattcttggtgtttagctggctcgatgatgttaacagtattaaaaattaaaccccataaaccaactaagccttatggaattcacagtcacaaaatcgaagttaatccagaattctgtgataagcagcttggctttttttttaaatcaatgcaagttacacattatagccagaatctgtatcacagaggtgcaagttgacagcagagctcagtccccacttcctgcaaacaatggcctgcaccctatcccttgtgtgtgtgacattctctcatgggacaatgttggggtttttcagactgacaggactgcaagagggagaaaggaattttgtcaatcaaaattattctgtattgcaacttttctcagagattgcaaaggattttttaggtagagattatttttccttatgaaaaatgatctgttttaaatgagataaaataggagaagttcctggcttaacctgttcttacatattaaagaaaagttacttactgtatttatgaaatactcagcttaggcatttttactttaacccctaaattgattttgtaaatgccacaaatgcatagaattgttaccaacctccaaagggctctttaaaatcatattttttattcatttgaggatgtcttataaagactgaaggcaaaggtcagattgcttacgggtgttatttttataagttgttgaattccttaatttaaaaaagctcattattttttgcacactcacaatattctctctcagaaatcaatggcatttgaaccaccaaaaagaaataaagggctgagtgtggtggctcacgcctgtaatcccagcactttggggagcccaggcgggcagattgcttgaacccaggagttcaagaccagcctgggcagcatggtgaaaccctgtatctac

SEQ ID NO: 801 - DNA, 2840 bp, Homo sapiens
tttttaatatggctactaaaaatgaaaaattccacacgtggcctgcatcatcttcctggtggacagtgctgcctgagagttccctttttgcgcttcctagtgagctagtgatcgactttacacctggtccccttgtgatgggaaaccctctgttgaaacagcagggtcctcgcctcactggaccgggactcagaccaggtggaaatgatgatttcacactcatggccaagctgcctctcaccccagatggaggaagtgaaagttccagcctttgcggttattgtggattaaaagcaaaaagattttcgtggaggcgccaccaaagcctgaagtgtacccggtgggcaggaccctccacaggcacctccacgccccactcctgccctgtgcccgtaatcccagcactttgggaggctgaggcgggcagatcacttgaggtcaggagttcgagaccagcctcgccaacgtggcgaaaccccatgtctactaaaaaaatacaaaaattagctgggcgtggtggtgcacacctgtagtcccagctactcgggaggctgaggcaggagaagtgcttgaacccgggaggcggaggttgcagtgagctgagatcctgccactggtctccagcctgggcgacagagcaagactctgtctcaaaaaaacaaacaaaccaaaaaaacagaaacaaaaacaaaaacaaaacccccaacaactcctggggactggacctgaaggggtcttcagagcgttaagcaggacacggagggcaggtgagcgagctgaggggcaggagccatggggagcccccaacagaacctgctactcctgcagcaacgtttgggcagaagaaaatcctcaaataaaacctccaagaacgtgcacgccagtcaccgctcatctcggacacgtttattgctagaatcaggtcttaagttctaaagcgggtcagaaatatcccgcagtgaggaaatgttgtaatcattgtaaaaataattagcaggtgactaagatcatgaccacaactgacaaagacgtgtgcagatcccacgaaaataggaacatttgctcgactgtcaactttacaaataaaatcgggctccaacccaggagtggccgaggggcactggcgagggaagggctgtcggcgctgccgcccgatgcctagcacgactgagacccctctgccacatggcggggacgcggggttcccaccgcgtggccgagcagaaattccttgaacttctcccccatccaaggaattgtggcatctcggagggctggaccggcacacgccggctcaggagggtgccagggtctgggaatgttctcttcacaacagaacaggaatgtacagtcagcttctgtaaagtgctccgatactcagtacaaaaatacaaaacactgatgataaacatggcacacatgggatctgacggggggcggacagcgtcgctgatggccagggaccgggctgggcagagttgaggtcgtcggaggggccaggagcctggggacacctggccactgtgttctcaggaccttgtcaccaatgggctgtatggctgtggggctctggttcccggttggcaccagctcctgccccgccccctcctgagcccacagcacccagtgggcgcctctgcccaggggagcacttcctgatggagtttcccctcccttgtgcccatctgtccccgagtggcgggaatgtccctgttcactgtattcagcgtcacaggagtgcctctgccagcacagtgggagaagggctgaatccccccgggatctgcagttcccaggaccctgggttcgggagaaggacttggccctggcaggggctcacatgtaccccactgggaacaaggacgatcagccaggacccagtcctaccaccaatgcttggggtgcagaacaaggcttgacatgggccctttctccaccggagctggatcgtggatggatctcaccaccctgggatgtcccagcacctttgatgctgcccaacacctccttcctccacccctccagggaacggaccgtaagctgcaacagctcactacaagcgaggggcccgcacagcggccacttgtccacttgctgcaacgtctctaggtgcatcctctgcatgccctgggacatggcgctctcgacagtctgtgatgtgccagcccccacctggaaggtgggacgccagccctgggagctcatttcccgggggctgaggaccctgtgcccagggtgtgtacccgccctggctgaagctagaggcccgctcccccagacaggctgagcgtgtgaacagcaacggttgcccttgggaagcagagtttgggaaacagctggtttcaaaaccaatgccaagtaaaaaggggcaaaggtcagcccctttcacgatgggcttccaaacccacagaacctgactggagggccactgatgttccctcagtgggccctgccccgtggccctctctgcccatgcccccgtgcctggctcattccctgaccctgaggttcatggtgaacctgcgtggggctctgtttgggaagtggattctgcctgattctggggacagatgctgccgacgccacctggcccctcctggtgccctaacccttggctccactgtcgcgcggcggctgtggagcgtggccccggccggcagctccttctcaaagcaaggtctgtcctgtcctcagctccgtgcagagccggcaccgttcctcactgcctcggaaaaacagctcggagttgatctccccgccacccggatggggtgctatgatttcagacagctccctggtttagttctggctcaactttccattaaaaactttcctttttg

SEQ ID NO: 802 - DNA, 3205 bp, Homo sapiens
cattgcttcgagtcacgaccaggtcttctgtgcttgacagccactcccccaaagagaaaaggcagtattgcgcaggcgatgtgtatttccttttcgtcacacacatttgctgtgttacttgtctgtttttaaaatctacattcatgcatgctgcagggttccaagcttgaactacccttgtggctggcaaaaggactttttgacaacaagcgacggatcctttctgtggaactccccaagatctaccaagagggttggaggactgtgttcagtgcagatcccaatgtggtggacctccacaaaatggggccccatttctacgggtttggctcccagctcctgcattttgacagtcccgagaatgcagacatttcccagtctctgctgcaggcaagtaatgggtgtgaaaacctgtggtgctgcacttgtctcaagagccagccacagatactacttttacccaggacagtgtatgacttgtaaatttagtctgtttttattccaggtcagcctacagttacactgtctgtccattttatatatttacatatatacacacacacacacacacacacacacatttttttaatatgacttgtctgccactcctcatatttgcttgctacaagttgaggccagcaggaactctaggaaatgagaaaagggtgatgatggccaggcatggtggctcacacctgtaatcccagcactttgggaggccaaggcaggaggatcgctgagcccaggagttcaagaccaacctgggcaacatagtgagatcccatctctattaaaaagaaaaaagagaaaaaaagggctatggtgcattacaggtgacaggcacttagatacacagtcccaggcctggcctaagggttcctgttggaaatacaagagttattgggttgtttccttcctttgttctggggttagggcttggccctgccatgaactagcaatatgacttggtcaagctacttgacctctctagacatcaattcacctgtaagaattgatggagatgataatagtgccaaaattatagagttgtggtaaaactatgtaatgccgtgtaataaacaataactcatattgttattacttttccaggacaaaacaatgttatacatctgttcccaacctttatggtataaccttattttaatttttcataattacttttttattctgttactgttagaagaaaccatcatttcttcctcttgggacagaagcatttgctactaatgacaataataggtgatgcttctcaaggagcttgctgtgtgctagccatttgctaggtgcattacatgtattcattggttttcttaacaacttactggattttcataacaatccacttcacagatgaggaaattgaggcatggcaatgtgcaataacttacttgggtgctagagggaattcagacctccttctgagtcctacacatcattctttcttttcatgccatttaaatgttctgagataaaaatggatatgactttgtggggtgtgaggtcaaccctgacttgtcttactcccttgtttcccagacttttatcggacgttttcgccgcatcatggactcctcacagaatgcttacaacgaagacacttcagccctggtagccaggctagacgagatggagaggggcttatttcaaacagggcagaaaggactgaatgactttcagtgttgggagaaggggcaggcttctcagatcacagcttccaacctcgttcagaattacaagaagagaaaattcactgatatggaagactgaaagccggaagaacacagaatggctcctcacagacgtatccctccgtgtgtccttgataggagctggttgaccttgtacagaaccagaatcctgtcccatttcatggcttatttcctgtggccatagagagttatagggaactggacatgctggaggatgtgggtgtccctggctctgtgagtcttccaggaccgtcccaccctgctgacccacagcccaggccctttaacccaagaacccatggccaaggagaaatcaaagtccttcctaaataagaatcactgccatataatatatcacagtagagttgcaactgagattccttgtgtctgggagtttggacagcttcagatgtacagtttcactagccacaaagcacaggtacaaactgggtcatcgcctgttcacaaaatgctctcttgatcttatttgcctcatcttcctcatggttgtacagaggatagcaccccaccatgccagcctgacttggagatatctcctgctgcctgcctgcagggagttaccccagtttccaaaaacagtcgcccagataaaggaggaaaagggaaaggcagacgaatggcatggcttttactaaagaaaagatgttggcctcatactctatactcagggcttaatgaactggaatctgcataactcagcagtcaacccagaagggaaatggttaaactgagcttgttattgcctcggagagcctaagagcacccgcacacttaattctactccctgtctagaaaagctgtcagggagtcgtttggaattgcaatgtagttattaagggctgttaaccagcctgcattacatctggaagtcaggacttgggtgctgactatgaagggccctgttttcaaaatctaacattgcaagtgtaaatgggcaagaagcctccgttgtgcttttttttcctcttcagtaacttttgcaacattattgcatagaagatccctgaccatttactaggaacctggttaagcaagcactaatctcttttcctggagatcaaggatgcaacctcaggttgagaaagaaacagggttccctgggcccattagactgtttgcagggcatcactgcttccccctgacacctcacaactagcaaaaattgtctttgtctttggaaattatagagggatttgggtatccagattgtgcagatgcaaacttaggctgtcttgatgcaaacttagaaccacagaaatgcttttaaaatgcctgttttaagatggaattgttgtttttataatttgattttagtgctaaataaatgattggctttgtacatgaatatgttctgtacaagtgctctttcactagtactacagataatcaaagctatcagaattgtgtctttgatcatatttgacggtaatacacaaataaatccatgttttagc

SEQ ID NO: 803 - DNA, 2640 bp, Homo sapiens
ctgtcggcccaggacatcagccagcccctgcagaacagcttcatccacacagggcatggcgacagtgacccccgccactgctggggcttcccggacaggattgacgaactgtatctgggaaaccccatggacccccccgacctcctgagcgtggaactgagcacctcccggcccccccagcatctaggaggggtgaaaagggagcctccacctcgcccacctcagcctgccttcttcactcagaaaccaacctatgaccctgtgagcgaggaccaagaccccttgtccagcgacttcaagaggctgggcctgcggaagccaggcctgccccgagggctgtggctggcgaagccctcggcgcgggtgccgggcaccaaggccagccgaggcagcggggctgaggtcacgctcatcgacttcggtgaggagcccgtggtcccggccctacggccctgcgcgccctccctggcgcagctggccatggacgcctgctccctgctggacgagaccccgcctcagagccccacgcgggcactgccccggcccctgcaccccacgcctgtggtggactgggacgcacgcccgctgccccccccgcccgcctatgacgacgtggcccaggatgaggatgactttgagatctgctccatcaacagcaccctcgtgggcgcgggggtccctgccgggcccagccagggccagaccaactacgcctttgtgcctgagcaggcgcggccgccccctcccctggaggacaacctgttcctcccgccccagggtgggggcaagccgcccagctccgcacagaccgcagagatcttccaggcgctacagcaggagtgcatgaggcaactgcaggctccggccggctccccggccccctctcccagcccggggggtgacgacaagccccaggtgcctcctcgggtacccatcccccctcggcccacgcgcccacacgtccagctgtctccagcccccccgggcgaggaggagaccagccagtggcctggacctgcttcccctccccgggtgcctccgcgggagcccctgtcccctcaaggctcgaggacacccagccccctggtaccacctggcagctccccgctgccaccccggctctcaagctcacctgggaagaccatgcccaccacccagagctttgcctcagaccccaagtacgccaccccccaggtgatccaggcccctggcccgcgggctggtccctgcatcctgcccatcgtccgggatggcaagaaggtcagcagcacccactattacttgctgcccgagcgaccatcctacctggagcgctaccagcgcttcctgcgtgaggcccagagccccgaggagcctacccccctgcctgtgcctctgctgctgcccccacccagcaccccagcccccgccgcccccacagccaccgtgcggccgatgccccaggctgccttggaccccaaggccaacttctccaccaacaacagcaacccaggggcccggccaccacccccgagggccactgctcggctgccacagaggggctgccctggcgatgggccagaggcgggccggccagcagacaagatccagatgctgcaggccatggtgcatggggtgaccacagaggagtgccaggcggccctgcagtgccacggctggagcgtgcagagggctgcccagtatctgaaggtggagcagctcttcgggctgggtctgcggcccagaggggagtgccacaaagtgctggagatgttcgactggaacctggagcaggccggctgccaccttctgggctcctggggccctgcccaccacaagcgctgagatgcgtctggagagccagagggcctgcctgaaggaatcacctgagcctgtccgtccaccaggagtggggagatgcccccatccagtcctggaggacccgctgctcctgctgctcccggggatggagcaaggccaaggctgcgggaggctgggagccctgccctgcccatccctcccgcaccagcgctgtccctgcacactttggttcagtcccggtgcccctgccaagatgtggaaggggccgggtgaagacaggcttgagggctgccccagcaggctctgggtatgacctgcctctggccctggtcctgggcggggcctgtgggtggagtagtaccctcaggccctgccctgggtgacagactgggaggaaaccaggctggacctgggcaggcgggatgtgttggccacagggagaggcggaccggcacccggtgggacctcctaggactgggccttcttccagggggcccctggcagcagctggggtgtcgggcagaatgtgacttgtggccttaccatggacttgaatgggacttggctggcctcaggatcttgtgcctggaaatagcctgaggtggctcaggaagtggagaaagggtgccagaccattctctggcggggaccagggcccaaggccccagggctggaaggagaccaaggggcagccgccctggagggacatcagtgcttcctcttccacccaattcccccacgcggttccatgttttcccaccagcctgttggcgaagttgctgctccggcattcagtacctgcttcttccagagaaataaagttagtttctattttatgtt

SEQ ID NO: 804 - DNA, 4276 bp, Homo sapiens
aataaagcaagaaagtggggggcgggcatggtggctcactcctgtggtcctaatggttttggaggccgaggcagaaggaccgcttgaggccaggagtttgaggttgcagggagctatgatcatgtgactgcactccagtttggcaagacgctgtttcaggggaaaaaaaaaagaaaagggggataggaaattagggaagtgccaggaccaggcatgaggatatgtttttaaatgacagggaggattagcacagggaaggccttaccaagaaggtaatttattttttagagacagggtctcactcttgcccaggctggagtgcagtggtgtgatcccagctcactgcaacttctgcctcccaagttcaaatgatcctcacacctcagcctcctgattagctgggactacaggcacacaccaccaaccctggcttgtttttttgtagggatggggtttcaccatgttgcccaggctgatcttgaactactgggctcaagcaatctgcccacctcggccacccaaagttctgggataacaggcgtgtgccactgcacccggcctggttgtttgtttgtttgttttttaaattgattcctgttaaatgctgacaataggtcagataaagagttctcagagtagacctttggatttaactatatggaggtcattggtaatcttgtcaaaagtagcttcttgggagtggtggaggtgaaagcctatttcagatgggtttcagagagattgggaggagaggcattgagtttagacatttcttttaagagttctacagagggggcagaagaagtagaaggggaatgccgatgaggagttggcagagttttctataagatggaagagtttatgacccccctgccctttttttttttttttaataatgctactgggaatgacctaggagaaagagaaattggcaatgttctttccttgaagagggatcggccctatatatatgtgtacttttatgagactggaggaaaggcagagtacatagatgcttatgatgacaggttcttagatagtgcaggaacttgtggaagtgtttttttctgaatgcttctgttttctcagtgaagtagaatgcacgttcagaatgaagatagggaagtgttcttagagatttgaggacaaaggagaaggtataaagtcattatctatggaagtgagggattggactagggtgcaggccagtaaaacatggcttgtgaaccaaattctgcctgccctgtgtttttggaaacacacaaagttttgttgtaacccaagcatgctcatttatctgttgtctatggctgctttcctactggaatagctgagttgaatagttacaacagaaaccatatggcttgcaaagcatacagtatttactctctggccctttacataaaagtttgctgacctccagactagggaaatctagtataatttccaggcagccttaaaaactctttagaagttaatggtccagaataatgacaaatagctgattgttgaatttcactatcttcattgcccctgttagagagttttgagctggaaagaccgaactgaacaaaggatgtcaatgtataggtttcttccacaaatactgagctcttgctagatgccagatactgtgctagccttgggaattcttgctctcaggaagcttacaatgaacttaaacctgattaaagacaattcatgaatatatgtgtgatttcaaatagagaacgacatgccctatattgcctgaccaaacggtgcatcatcaaagttattcaaactgtagtagcctgtgctgtcttacttctcttcctattctgtatcagatccattgttgctaccccaatcctatagctctttgattcatgtctgttatgtgggtggatggagaactcactttattactgctaccatagatctgatacttcaccacttgaatcttgcacagaaaccagagaagctagctaatgcatgctgtagcatttaaaaattccatgtgatacaattatgtatgattacatttcagttttgctatactttatatttggcttgtatgattaaagtaaacaaagtaaattccattgttataattggttttgagtgttataggtttattcaaatccaagatttgattacagttttgataagagtcacagcttaacactgatgaatcccctaatgattttggtaaaaatcattaagttaaggtggatacacatcttgtcatatgatcaaatggtttcgcgaaaaatcaataatcagacaacaagatgtgcgaactcgatattttacacgactctctttaccaattctgccccgaattacacttaaaacgactcaacagcttaacgttggcttgccacgcattacttgactgtaaaactctcactcttaccgaacttggccgtaacctgccaaccaaagcgagaacaaaacataacatcaaacgaatcgaccgattgttaggtaatcgtcacctccacaaagagcgactcgctgtataccgttggcatgctagctttatctgttcgggcaatacgatgcccattgtacttgttgactggtctgatattcgtgagcaaaaacgacttatggtattgcgagcttcagtcgcactacacggtcgttctgttactctttatgagaaagcgttcccgctttcagagcaatgttcaaagaaagctcatgaccaatttctagccgaccttgcgagcattctaccgagtaacaccacaccgctcattgtcagtgatgctggctttaaagtgccatggtataaatccgttgagaagctgggttggtactggttaagtcgagtaagaggaaaagtacaatatgcagacctaggagcggaaaactggaaacctatcagcaacttacatgatatgtcatctagtcactcaaagactttaggctataagaggctgactaaaagcaatccaatctcatgccaaattctattgtataaatctcgctctaaaggccgaaaaaatcagcgctcgacacggactcattgtcaccacccgtcacctaaaatctactcagcgtcggcaaaggagccatgggttctagcaactaacttacctgttgaaattcgaacacccaaacaacttgttaatatctattcgaagcgaatgcagattgaagaaaccttccgagacttgaaaagtcctgcctacggactaggcctacgccatagccgaacgagcagctcagagcgttttgatatcatgctgctaatcgccctgatgcttcaactaacatgttggcttgcgggcgttcatgctcagaaacaaggttgggacaagcacttccaggctaacacagtcagaaatcgaaacgtactctcaacagttcgcttaggcatggaagttttgcggcattctggctacacaataacaagggaagacttactcgtggctgcaaccctactagctcaaaatttattcacacatggttacgctttggggaaattatgaggggatctctcagagcttaacaggtatctggagttcacatgtgcatagctatttcactgtataaaaatagattaagatattttgagattttggtgatatttcctgtttttaaagtttcaggggtgtgtctaattcttcttggtgctggtttatttaacagaagtcttagtttttggatattaatattgtggaaagttaacagagctgatgtctagctgatcaaactcagaattatgaagcaattgtgaagctttcggatggctttaatggagcagatctgagaaatgtttgtactgaagcaggtatgttcgcaattcgtgctgatcatgattttgtagtacaggaagacttcatgaaagcagtcagaaaagtggctgattctaagaagctggagtctaaattggactacaaacctgtgtaatttactgtaagatttttgatggctgcatgacagatgttggcttattgtaaaaataaagttaaagaaaataatgtatgtattggtaatgatgtcattaaaagtatatgaataaaaatatgagtaacatcataaaaattagtaattcaacttttaagatacagaagaaatttgtatgtttgttaaagttgcatttattgcagcaagttacaaagggaaagtgttgaagcttttcatatttgctgcgtgagcattttgtaaaatattgaaagtggtttgagatagtggtataagaaagcatttcttatgacttattttgtatcatttgttttcctcatctaaaaagttgaataaaatctgtttgattcagttctcc

SEQ ID NO: 805 - DNA, 2805 bp, Homo sapiens
agattatatggagctgcgggagctgccgcctgggggaagagaggtgcagcttctgctaggtttgtgctctcctcccagggtctccttggcttccttccccaaagcagctcagagctggtatgaggtgagggtggggggcagccggccagcctggctgttgacggcaactccagggcttgtttcgcgcagccttgccagcattacccatcctcatcagaaactggcagcggcagccacagctcgggcaggcggctccagccccaggctggatttgcagaatctgtcctttgcctccaagcccagctttcagctgggagagggggaagaaggcgcagtggcagcagttcttctggctctttctccctttctctctttctctttctgtgttcaagtcacattacatgggattctgttcttttgggacttcgtcatcttttccaatatgtcctgggacctccggagctgtaacggggatgctaaggacacggtcagtggattatcgtgactgtactaatgaaaggattcaagctctcctgcactgccagtaactccaaccgcagcacgccggcctgctcgcccatcctccggaagcggtctcgctcgccaaccccgcagaaccaggacggagacaccatggtggagaagggctcagatcactcctcggacaagtccccgtccacaccggagcagggcgtgcagcgcagctgctcctcccagtccggccggagcggcggcaagaattccaagtctcacaagcgcctctcaaaaaaaagccagagttggtataatgtgttaagccccacctacaagcagagaaatgaagacttcagaaagctctttaagcagcttccagacacggagcgcctcattgttgattactcatgtgcactccaaagagacattctccttcagggccgactctacctctctgaaaattggatctgcttctacagcaacatcttccgctgggaaactctgctgacagtccgtttgaaagacatctgttccatgactaaagaaaaaacagctcgcctcattcccaatgccatccaagtttgcactgattcagaaaagcacttcttcacttcgtttggggcccgggataggacatatatgatgatgttccggctctggcagaatgctctccttgaaaagcctctgtgtcccaaggagctctggcactttgttcaccagtgctatgggaacgaattgggcctgaccagtgatgacgaggactacgtgccccctgacgacgacttcaacacaatgggatactgtgaagagatccctgtggaagagaatgaagtgaatgacagctcatccaagagcagcatagagaccaagccagatgccagtccacagctgcccaagaaatccatcaccaacagcacactaacatccacagggagcagtgaggcccccgtctcgtttgatgggctgcccctggaggaagaggcgctggagggagacgggtccctggaaaaggagctcgccattgacaacatcatgggggagaagattgagatgatcgctcctgtgcactccccttcactggacttcaatgacaatgaggacatccccactgagctcagtgactcttccgacacacacgatgaaggagaggtccaggccttctatgaggacctgagtggccggcagtacgtgaatgaagtcttcaacttcagcgtggacaagctctatgacctcctcttcaccaactcgcccttccagcgggatttcatggagcagcggcgcttctctgatatcatcttccatccatggaaaaaggaggagaatggaaaccagagccgagtgattctttacaccatcacccttaccaaccctctggctcccaaaactgccactgtcagggagacacagaccatgtacaaggcgagccaggagagtgaatgttacgtgatagatgccgaagtcctcacccacgacgtgccctaccatgactacttctacacaatcaatcgctacacgctcacccgtgtggctcggaacaagagccgactcagggtctccacagagctgcgctatcgaaaacagccctgggggttagtgaaaacgttcatcgagaagaacttctggagtgggctggaggactacttccgccatttagagagcgagctggccaaaacggagagcacttatttggctgagatgcacagacaatctcccaaagagaaggccagcaagactacaacggtgcggaggaggaagcgtccccatgcccacctgcgagtccctcacctggaagaggtgatgagcccggtcaccacgcccacagatgaggatgtgggccacaggatcaaacatgtggcaggttccacacagacgcggcatatcccggaggacacccccaacggtttccacctgcagagcgtgtccaagctgctgctggttatcagctgtgtgatctgtttcagtctggtgctgctggtcatccttaacatgatgctcttctacaaactctggatgttggaatacaccacgcagaccctcactgcctggcagggtctaaggctccaagaaaggttaccccagtctcagacagaatgggcccagctcttagagtcccaacaaaagtaccacgatactgagctccaaaaatggagggaaatcatcaaatcctcagtgatgctccttgaccagatgaaggactcgctcatcaaccttcagaacggcatcaggtcccgcgactacacgtcggaaagtgaagaaaagaggaatcgctatcattgacaaggcaggaacagggtggctgcaagaggcctgtgcaatacatgtacatagccc

SEQ ID NO: 806 - DNA, 3404 bp, Homo sapiens
aaatcatgataaaacattgcaggagctgacagacaaaatagcccatatagagaagaatgtaaccaacctgacggaactgaaaaaacacactacaagaatttcataatgcaatcacaagtactaatagcagaatagacaaagcggaggaaagaatttcagagcttgaagactggctttctgaaataagactggcagacaagaatagagaaaaaagaatgaaaagcaatgaacaaaacctccgagaaatatgggatcatgtaaagagagcgaatctaagactgattggtgtccctgaaagagatggggaaaacggaaccaatttggaaaacgcatttcaggatatcatctatgagaaattccctaacctagctagagaggccaacattcaaattcaggaaatccagagaactccaggaagatactccacgaaaggaacatccccaacacacataatcatcagattctccaaggttgaaacgaaagaaaaaatgttaaaggcagctagagagaaaggccaggtcacctacaaagggaagcccttcagactaacagtggatgtctcagtggaaaacctacaagccagaagagattgggggtcaatactcaacattcttaaagaaactccaacccagaatttcatatctggccaaagtaagcttcacaagcgaagaagaaataagattattttcagacaagcaaatgttaagggaatttgttaccaccagacctgccctacaagagctcctgaaggaagcactaaatgtagaaaggaaagatggttaccagccactccaaaaacacactgaagtactcagaccagtgacactacagagcaaacatgtaagcaagtctgcaaaataaccagctagcatcatgatgaaaggatcaaatccaaacataccaatactaaccttaaattgtaaatgggctaaatgccccaattaaaagacacagagtagcaagctggataaggaactaagatccaatggtatgctgtcttcaagagaaccatctcacatgcaatgacacacataggctcaaaataaaaagatggatgaaaatctaccaagcaaacggaaaacataaaaaagtagcagttgcaatcctagtttctgacaaaacagactttaaatcaacaaagatcaaaaaacacaaagaagggcattacataatggtaaatggttcaattcaacaagaaaatctaactatcctaaatacatatggacccaacacaggagcacccagatttataaagcaagttcttagaggccttcacagagacttagactgccaggcaatgatagtgggagactttttaacaccccactgacaatattagacagatcattgagacagacagttaacaaagatattcaggacctgaactcagcactggatcaaatggacctggtggatatctacagaactctccaccccaaaacaacagaatatacattcttctgatcaccgcaaggcacttactctaaaatcgaccacataatcagaagtaaaacactcctcgacaaatgcaaaagaactgaaatcatgacaaacagtctcttgggccacagaagaatcaaatttgaaatcaagattaagaaattcactcaaaaccatgcaattacatggaaattgaataacctgctcctgaatgacttttgggtaaacaatgaaatttaggcagaaatcaagaagttctatgaaactaatgagaacaaagatacaaagtaccagaatctctgggatacagcaaaggcagtgttaagaaggaaatttatagcactaaatgcccacatcaaaaagttagaaagatctcaagttaataacctaacatcactactaaaagaactagagaagcgagagcaaacaaatcccaaaactagcagaagacaagaaataacaaaaatcagagctgaactgaaggagacagagacatgaaaaacccttcaaaaaatgaaagaatccagaagctgttttttttttctttgaaaaaaagtaataaaatagaccgctagctagacgaataaagaaggaaagagagaagatttgaataaacacaatcagaaatgataaggggaatatttatcactgaccccacagaaatacaaacaaccaccagagaatattgtgaacacctctgggcacataaaccaggaagtctagaagaaatggacaaattcctggacacacacacctccccaaggctgaaccaggaagaaactgaatccctgaacagaccagtaatgagtttggaaattgaggcagtaataaatagcctaccaaccaaaaaaatcccaggaccagatggattcacagctgaattctaccagatgtacaaagaggaactggtagcattcctactgaaactatttcaaaaaattgagaaggagggactcctccctaactcattctatgaggccagcatcatcctgaaaccaaaacctggcagagatacaacaacaaaagaaaacttcaggccagtatccttcatgaacatcaatgcaaaaatcctcaacaaaatgctggcaaactgaatccagcagcacatcaaaaagcttatccaccacgatcaagttggcttcctccctgggatgcaaggttggttcaacatatgcagatcaataaatgtgactcatcacataaacagaactaaagacaaaaaccacatgattatctcaatagatgcagaaaaggcttttaataaaattcaacatcgcttcatgttaaaaactctcaataaactaggtattgaaggaccatgcctcaaaataataagagccatctgtgacaaacgcacagccaacatcatactgaatggacaacagctggaagcattccccttgaaaaccggcacaagacaaggatgccctctctcaccactcctattcaacatagtattggaagttctggccagggcaatcaggcaagtgaaagaaataaagggcatccaaattggaagggaggaagtcaacctatccctgcttgcagatgacatgatcctatatctagaaaaccccgttgtctcagcccaaaggcctcttaagctgataaacaacttcagcaaagtctcagggtacagaatcaatgtgcaaaaatcactagcattcctatacaccagcaacagtaaagccgacagccaaatcagcaatgaactcccattcacaattgctacaaaaagaataaaatacctaggaatacagctaactagggaggtgaaagatctctacaaggagaactacaaaccaccgctcaaagaaatcggagatgacacacaaaaaaatggaaaaacattccaagctcatggataggaagaatcagtattaaaatgggcatactgcccaaagcaatttatagattcaatgctattcccattaaactaccattgacagtcttcacagaacgag

SEQ ID NO: 807 - DNA, 4599 bp, Homo sapiens
cttcccagatggacttttttttttttttttttttttaagactgagtgtcactctgttgcccaggctggagtgcagtggtgtggtctcggctcactacaacctccacctcctgggttcgccccattctcctgcctcagcctcccgagtggctgggactgcaggcgcccgccaccacgcccggctaattttttgtattttttagtagagacagggtttcaccatgctggcaaggatggtctcgatctcctgacctcgtgatccgcccgcctcggcctcccaaagtactgggattacaggcgtgagccaccacgcccggcccccagatggacttttatcactcagcagaattctctggagatgcacccaggctgttgcaggaaccagctttgggaccctggagggcaagagctcaatggcaccacaccacccttcggtgcttggaacgttgcagagaggcaaggagggtctatctggcgtgtgaggtcacaggaaagctgacgagccagttacccgacgtgaccccgaggccgcaggcaggggactttacctgcacggcaatcacagacaagacttccactgagatgcgattaaactcgtcaaagcagccccaggctcccgtctgggccaggcccttgtagatatttccacaggactggaaagggcgagatggagaaaggaagagctgggagggtgacagggagggcgggcgctgcaggggcctccccctgcctcttcggctgtgttttctcttcccaaagcttgctcaggccccggtgcattggagccttccgcaggccagcaggcaggtcagcttactgcccagggtaacaccgtggagggctggacacgaggaagagccatcctttcacccttgcctcccagaccccaggatggggacttcctggagtccctaataaggggcctcagacaagcacatttaagttctaaaccttgcatgttttactcagcccttttctttcttgcgtggagaggagagggagtcctctaaggcgggatgggggcacgtctagcaggccggaggctttccctcaagacatctgtgtctctctaggccccacctgggccaatcagaaggactcgtcccatctacacctgggattccaggtggatgttaagtcccttccagggagatccaacttcagatttcacttttctaaaatccaggaggcggatgtggactgcgtggccctgacagtgaacatgggctgctggtcccatcctcagcctcaggagggggcccccagattgtggggctcagatcccaagctggggaggggagaccctctgcaggcctagggtccaaaactcagggttccatcccccttgccttcccgtcttgcaagaggctgctgcagcctggagctccgaggtatccccttcccctccctggcctcctgtgagccgacgatgtcctgtgcaggctctaatgactgatgggaccgggccaatcccctgctcccctcccaaacccacctggacactgcttgtaccccaccccatgctgaaccatgagggaggtgctcacccctgtgcggagtccccagttcggggcaatcttaacaactgaaattgagagagggtcacctccagggcaggggctggggcaggacatttggggctgcgtctgtccaccctggaagtctttccagagggaccacctgagggggatgctaccagcaagtgggggccctggcacctcctctccagtgccattcacaggtatccagagatctggagtttactgtggggcctcggaggacagggtgctaggatctgcttctataaaagacgactctgggtgcctcctccggaccccggccgcgtaccttgtagtccatctgctcggagcagttgaagacgtagaccatggtgcccagggctctgcccaggtccttggtcgtctcagtcttgccggtcccagcggggccggcgggggctccacccatgatgagatggagggactgggtcagggtgatatagcacctgcaagtgaccacaggtaagcgtgtgtgccagtgaccccatggcctccctgcttttatttttttgagacagagtctcactctgtcacccaggctggagtgcagtggtacaatcttggctcgctgcaacctctgcctcctgggttcaaatgattctcatgcctcagcctcccaagtagctgggactataggcgcccgccaccatgcccggctaatttttgtattttcagtagagatgaggttttgctatgttggccaggctggtcttgaactcctgacgtcaggtgatccacccacctcggcctcccaaagtgctgggattacaggcatgacccccaggagacacatgggagagggcagaaaaccttcaggtgtgaaggaggaaccacaaccgtggagcagaggcagcccaggtgcctttcccacctgtggcattcagggaggtgggcactgctacgacaaccagagtctgctcatgagggtccataaaacatgaccccaactcagcaggcccacagaggggtgcaggaactctcccaaggccacacagccggtgctagaacaaggacacggtggtagaactgaatgtgaacacaggtccacctgacgcaaatgcccagtccttccagcctccacagctgacctccaagtcggacagttccaagaatcatgcggaagggacccaccaagagcacatgtgagttactcagggacgggcctcacctgtcagtgagtggggtgatgaccagccgcggcgtgttgcccagatactcataggaatactggatttgggcatcgcagatgttggcaaagcagtgtcgcttctcttcgtcccagcgatgccggagctgggcctgccaggtgaaggcctgagaactctccacctgcaggatgagccggagctcttgttgccaggtggaatacaagagctagggctgcctaaggaaggccagcatgcctccaaggccggtcccctgctgcccagggaaccctccctggccctctttccccctccagcacccacatccaactgtatggccaccctcagtggaatctcgctacagaatggcacttccaatgggcgggcaccgctcatctgactgctgtgtgttgctcaccaggggtgagtccgggcaaggaggttaggaggcagctgcagccagcaacagagtcagtgccccaggaagaggaagtggcagggtctgaagtccctgaatgcactgccctgaacccggcgtccccttgcccttcccctggcccctgggacaggggcgctcatgccttggccacgatcattttggccaccacgtcccgtgcgtgcacatcgatggtgcagatggtcatgatcttcatcctgtcgccagcgttgaggttcccaatgagcagcgtgatgagtacgttcagctggctaatctgcgggggagagtgccttcgatgagacaccacgggtgcccacatgcactggggggtcttgtggctgggtgcccacagctgcatagggaacaccaccatgcttttgtttacagtaatgaaaaacaagagcgccctcggtaggccccagccaggcactggtttcaccagggtgcggccctgatgggacacctggcagtggctagcatggacgtagtagaaggaaattcaaggccacgagagagggtggatgagaagcaaaaacagctgactttaacgccatccagagtctgtatatttttacatataaatcaattatacacacacagagtaacaggttgcataagggccctgcagtgtcatgcttgggttgtggaattacaggtaaattctccttcttttcaagatgatcttttgtttccatatttctaaccaaggacattttttttttaaagactctcagtagcatctgccaattttcaggcgagaaatcaaagtacatatttctgaaggtgtctgttactcgtggggagaggtgcctggggctgtggtgcgtggctgttatttggcctgtggaaacgacggttttgcggggctcagcctccgagaagaagccgctccaggtactcgcccggcaggtttcagaaggatacacgggcccatgcacctgctttttaaacaagttttaaaaacgtaactaactacacactagtaacacacctgctttttgttataatctttgatagcgttttcatagccttcctccagcctggcaaatgccaggcccacctcggtcgtccaccagatctgggtgcaagtcagggccacctgaaagtacataccccccattgcccacgcagtgagcgatcgctggcgcctgctaacgcagacattcctgctgaaagcttagatggttttccaggggaccacagttaacagcggagcccatgaacgcaaagaaactcgccccttatctcagccacgaggcgccgccgagcccccacccgcctcagacctgggctgggtagtccaggatccactgctccctcggcttctcttcgtaggtcaccacggcctctgggatttcgtgccggagggtagagcacattcggtccagcactcgattcagccacacttccacctggggacgggagccacggtgaccaatacagccatgtgtgcctgc

SEQ ID NO: 808 - DNA, 3024 bp, Homo sapiens
gaaaaaagattttagtacttccaggaacccagtggaataaaaactgatgtgtgtgacagtggaggctcgggacctctactcttgcctttgctctaaggttgggtctgactatgggcccactgcctacagctgtatggatagcacagggcacaaagatgccagccagggagggcaaatgagagttgaaagccagcccacactccatttgccaagccttgcgctgcagcaccacatccacccagagggggctgttctcatttgcattgtgcaaaggcagtgtctggggccaagaatggccctgctgcgtggactccagacctcttcctgggcttttgcattcctgtgttcctctctggttcttgcatagtagaggttttctctggcctggttttggaggagcattatattgatatctggtatagttcactgaatattttctctgcgtgcatgtgtgtgtgtacgtgcatgtgtgtgtgtacaggggcaggagattaagtgctgctcacatatggaaatgggcccttcggctgagcagcacttcctgttgtaacagatcaaaccctcttcactgtcgggtaaagtggaaccacgttttgctttgcagggcagcatgcgagtctgcttcctgccacaaatcacaatttgactgctttctcattgtttcagtgctagttctagccttccccgttgggagccgcctcctgtcctgttgagcacattgcaagatctgtgtccttgctcgtgtatctactgtgagcacggtgtcatcaccacccccacaaccctagtgtcagtatgcacttgtgagccaggaaggaccactgaggtgcccttgagcagaagtgggtgctagaccatgagtccagaggcctacgttctgctcctacactcccattcactgagcaagtctgggcctcagatttcccagctgtaagacagggacaacaatggcacctacgccacatggttcttcatccacacttagaggggcattgttaacagagacagttctcccaacattgagcagaaagcaaggctcctccaagaggtccccaaaacattgatttacatgatctggttccctgtccctccttacctctccacacacctgcaacccttgtcccctcaaagcaatatcctggttttgctacattcccatgcatccccaagatcattctaacctgtgatgttgtgtctgcctagagatctccccatcgaccagccttaaatccataatgaaaaagaaagattatggcttccgtgcaggaggtaatgggaccaaaaagaaccttcagtttgttggggttaacggtgggtatgagaccacctcaagtgaggagaccagcggtgaggacagcaccccagaggacttgtctgacagcgaggcagagaagaagtgtgacggcccagatcacaagcatgtcaaagatgcccatctcacctgcgaggctgggcagggcatccctgagggcacctgccatgctgcccaggaaagtgggcctggggaagaagtcccccactccaaggccgagagatataaaccctcagaagaatttcttaatgcatgccgggcactgagccagcatctgccagaaactgggaccaccacagaccagctcttgaggcaaagcttgaacaccatcagtcaagagtggttccgcgtctccagccggaagtcgtctagccctgccgtggtggcctcctacctccacgaggtccagcctcactccccacacttcctgaagctgcttgtcaacttggccgatcgcaacgggaacacggcccttcactacagcgtgtcccactccaacttctccatcgcgaagctgctgctggagacaggcgtctgcaatgtggaccatcagaacaaagctggctacactgccgtaatgatcactcccttggcttccgcagagaccaatgaagacatggctgttgtctggaagctcttaagagaaggaaatgtgaacattcaagctactcagggaggccagactgcgctgatgctgggagtcagccacgacagggaggacatggttcaagcgctgcttagctgccaggcagatgtcaatctgcaggaccacgatggatcctcggccctcatgctggcctgtcaccatggcaacgtggacctggtgcggctgctcctggcacacccagcctgcgacagcagcctgactgacaaggctggccgcacagctttgtccatcgctctgaagtcacccacccatatggaaattgctgggcttctgagagcccacgcggagcagggcaggtccctggggctgtaggggctgcagaagaactggccgtggggaacaaaagccttcttctctggactcctccctcgcccttgaagagggcagaggtcacaggccagagagccacccttctagagaagaaactatgtcaaatatgcacatacattcctgttgtataattctgctcattaggatgctttgtagtttttgccttaggccaagcctgaaaactacacgggcttcagagcagggttcaaggtgcaaggtgaggggtacgtcggtgtcatccaaacatccaaaacatcttcagccttgaattcctcatgactctaccctctgtaacattgtgtagcaagcaggcaggcaggagcacattagcacattagaaaagcaatactttttacatggaattttacagtgcactatctttctgttttttaagcaagtgtatacaaatatgtcccattgatatgcatgtctatagatgggaggggatttaagccaaccccctggcaagcattctgtaggggaccctagaagaatcaccgtgcagactggtgaaactgaacaagcaccatttgggagctttgtttcgatggggttgacagagaaatcttaaaatctgacagggtagaagaagcactttggcatcaatgccatatgtacagtcttgactatttctgagtcatctagtggctccaatttgctccagggaaattggaattaattaagaaatttattatctagtaagttgctatgtaat

SEQ ID NO: 809 - DNA, 2350 bp, Homo sapiens
atatgcctttttaaaaaaattatcttttccattggtgactatgaggttgagagatgattctcctacatttctggctgctcctcttcaagtaccttccctggctcctctggatttttttgttttgttttgttttgttttgttttgtttttgagacaaagtcttgctttgttgcccaggctggagtgcagtggcaggatcttggctcaccagctcactgcagcctccacctcccgggttcgagggattctggtgcctcagcctccagagtagctgggactacaggcccggctagtttttgtacttttggtagagatgggggtttcaccaggctggtcttgaactcctgcctcgggtgatctgcccgcctcggcctcccaaagtgctgggattctaggcatgagccaccgcgcctggcctggctcctcttcttcttccactcagatatgcctgaccctgtcaacactttggttgaggtcttctttcttctttcttttttgctccgcacatttagcttatgacttcaaccatcatttctcagagcatgggtctggctcaacctctctcctgaatttcagacctacaagtctagctacttggtggagacctccccagaatgacctgctgcttcccaaaagcagactctccaaattacagtcagtatctcccccggaagcattcccccaggcatttctctttctgccttcaattccccattctcctacattgccttgccagaagcctgctggtcagcttggatttctttttgtccttttttttctatattttgctggtgcctagtcatgtagttgctgcctctacactttctcttctttaaaaaaaattattaaagcaccacgtgcttgttgtaaacatttccagaaaatacagaagtgctcaaagtgaaaaaatggaaatgccttgtcccttcctcattccctgccctaacctcacgccccagattcagctatgtaatagtctgtcatgccaagtcttatttccagctcctcttttccatccccactgccatcatctgaactaaacggattgttttccatctggtctccttggcttttcctttcagtgcagctcaacagacattaatcaagtgccttccacacaccaaagtcctaccctagatcctagaggttcagagacaagtaagatagttaaagagatccacattccagagctgtttaactttgggcaagttacttaatctctctgacccttacttccttatctgtaaaatgatgctaatcccagcacctttttcatgggtttggacgagcattaatgagatgatccatgtaaaactctttgtactaactacctggtacactgtatctgctccataaatgtcagtgacaacaatgataataatgacaatgtttggaggagtttatagcttaatggagagacttaaagcataagaattatctaggcgaagaatgatgagaaaatatttttggaaaaggaaaacaaacagttctactaaaattaaaaggctgatgtagaggcttgggaaactgggaggtaagagctcggactgtgtcctctaagacagtaattcccgaagtgtgagcaaaagtccacctgcatcagtcttacttggggtgattgctcaaaatgaggatttaatggctgcacctccgagcaagttggtaatttacatatcggaatgctatccatcaaggaaaatgggcagactacagttacatgcatcaacacagacaagcttcaaacaatattgagtgtaaaaagcaagacatagaaatatatatttagtaagagtaaaaatacagtaaaggtaaaaaagaggcaaaactaaacaatatattgcttaagcaataaggatacacaaactaatgaaaatcaaaggatttactaatacaaacttcagtatagtaattaattggaatgggagagaaagatgcaaagtttctatttctttttttgttttgttttgagacagtgtctcattctgttgccaaggcaggagtgcggtggcaggatctcagatcactgcaggctcagcctcctgggttcaggtggttcttctgcctcggcctcccgagtggctgggattgcaggcatgcaccaccacgcccggctgatttttgtaattttggtagagatggagtttcaccgtgttggccaggctggtctcgaactcctggtcttaagtaatccgcccacctctgccatcaaagtttctgtttcttaagttggctgccgagtacacaggttttctttgtaaaataattatttaaattgttaatatgcattacttatatgcttttcatttacaatgtatttcacaagaaaaataaaacaaagcaaataagaaaac

SEQ ID NO: 810 - DNA, 3276 bp, Homo sapiens
taatgctcgtgagaaaccttatgaatgtgaagaatgtgggaaggtcttcagttatcctgcaaaccttgctcaacatgggaaagttcatgttgagaaaccctatgaatgtaaagagtgtggggaagcttttaggactagccgtcaacttactgtacatcatagatttcattatggtgagaaaccctacgaatgtaaggaatgtggcaaggcctttagtgtgtatggacgacttagtcgacatcagagtattcacactggtgagaagccctttgaatgtaacaaatgtgggaagtcctttaggctcaaagcaggccttaaagtacatcagagtattcatactggagagaagccacatgaatgtaaggaatgtggaaaggcctttcgtcagttttcccaccttgtgggtcataaaagaattcatactggagaaaaaccctatgaatgcaaggaatgcgggaagggctttacatgtaggtatcaacttaccatgcatcagagaatttattcaggggagaaacactatggatgtaaagaaaatggggaggcttttagtagtggccatcaacttactgcacctcatacatttgaaagtgttgagaaaccttataagtgtgaggaatgtgggaaagcctttagtgtgcatggacgacttactcgacatcagggtattcatagtggtaagaaaccctatgaatgtaacaaatgtgggaagtcctttaggctcaattcatcccttaaaatacatcaaaatattcataccggtgagaaaccctacaaatgtaaggaatgtgggaaggccttcagtcagcgtgcacaccttgcccatcataacagaattcatactggttacaaaccctttgaatgtaaagaatgtgggaagtcctttcgttgtgcctcatatcttgttatacatgagagaattcatacgggagagaaaccctatgtatgtcaagagtgtgggaagggttttagttatagccataaactcactatacatcgcagagttcatactggtgagaaaccttatgaatgtaaggaatgtgggaaggcctttagtgtatctggacaacttactcagcatctgagtattcacagtggtaagagaccctttgaatgcaacaaatgcgggaagtcttttaggttcatttctgtacttaaagcccatcagaatattcatggcgctgagaaaccctacgaatgtaaggaatgtggcaaggcctttcgtcatgccacaagcctcatatatcatgaccgaactcatgctggtgaaaagtcctatgaatgtaaagaatgtggggaaacttttagtcatgcttcacatcttattattcatgagagaattcataccagtgataaaccctatgaatgtaaaagatgtgggaaggcatttcactgtgcctcatatcttgttagacatgaaagcgttcatgctgatggaaatccctatatgtgtgaagagtgtgggaaagcttttaatagtagccatgaacttagtatacatcatagagttcatactggtgagaaaccctttaaatgtaacaaatgcagaaggtcctttaggcttagatccatccttgaagtacatcagagaattcatatttgatagagaaattgtggcatatacaggtagtaaagaaagcacattgtgtcaatggatttatcccactgaacaatttgaatgaagacaatgtggaatggctttgagatacagttcagtttttattaggcatcaatttgtattggtgtgaacttttcaaaatgtaaatcatatatgcagtttctttggtatgacctgtgttaactcagattcagagaatttataatgtatttttttaataacataagaaaacttttctgatattcctctagttttggattgccaaaatattcatagtagaggaaaactgagaaaacgtaggaaaccattctttatacttgcatgtaaacatcttccagcaacaatcatttattgttaaacctggaaaaagccattacacaggaaacctctgttgatataagcgatgatgggaaaggctatttagccactctgcatatttaatgctcatgatcaacatctgcttcctatagctgggatgatatgggggaagatatttatcccttctggggatcatatataaatgatgatagtagtacctacagtatagtgctgttagaattacatgagttagatgtggaggtcagagtggaagcaggtgtgagagggtcccgcagaagaaaacatggctgccaaagtgtttgagtccatcggcaagtttggcctggccttagctgttgcaggaggcatggtgacctctgccttatgtaatgtggatgctgggcacagagctgccatctttgaccaattccgtggagtacagaacattgtggtaggggaagggactcactttctcatcccatgtgtacaaaaaccaattatctttgactgctgttctcaaccacgtagtgcgccagtcatcactggtagcaaagatttacagaatgtcaacatcacactgtgcatcctcttccggcccatcactagccagcttcctcgcatcttcaccagcattggagaggactacgatgagtgtgtgctgccgttcattaccacggagatcctcaagtcactggtggctcgctttgatgctggagaactaatcacccagagggagctggtctccagccaggtgagcaacaaccttatggagtgagcagccacctttgggctcattctggacgacgtgtctttgacacatctgaccttcttgaaggagttaacagacaggtggccccccaggaagcagagagcgccagatttgtggtggaaaaggcggccatcatctctgctgagggtgactccaaggcagctgagctgatcgccaactcactggccactgcaggggacggccagagcgagctgtgcaagctggaagctgcagaagacattgcataccagctctcatgctctcggaacatcacctgcctgccggcagggcagtccgtgctcctccagctgccctagtgaggccccagcctacctgcacctccgtgaggcaactgggccacagccccgatgattcgtaacaccacctttcgccctcaccccagaaatcactgaaatttcatgattggcttaaagtgaaggaagtaaaggtaaaatcacttcagatctctaaaaaacaaagaattacatgagttagtacatgaaaaaattatgggaaactacatgaaatatactgttacgttcaataaacattagcttctgtatataataat

SEQ ID NO: 811 - DNA, 4408 bp, Homo sapiens
aagtccccggagccgaggcttcctccgcgtgagcccggcgagtctggccgcggatgccctgtccggagtgctccgtgccgccccaggcttgccagggtccgcagcgagacatgcccgagccaggcgctgcatcgacctcgacttatctgtaagcagcggaagatcctgaaggcactaactaaggtatctccaggcaaccaaggatcttacctctcacattgagaaaaaccataacttcagagacatttcctggctccaaattcaagtcctttcagagacccctctactaattattttccagtaccactctccatggaataaaaggagttgcaaacatggcctttgtagatgcagggaaacccacgttccttttagagctgatgttaacccatgagaagcgaccacccctcgacgacttctccttcacggttcccatccaggagcacggccaactctcccccggaatccataacggctcacgcaaatagatttctttccgttcctcctcggagggctctccacatttatctgctcgagacgtggcagctccagaaccatggtcagtaaggacaccggcaaatgcatactcacaacatcggagagtgaagtggaacccgccgcctgcctggccctggagatgaaatacgccctggaccccaaccggcagattaaaaaacggaacaaagccctgcaggtgcggtttaaggatatctgcgaggcacagaatgagcagagggacacacagctgtcctcgggccagctgggggagaagcgggaggccaagcccgtgtcctgcagagcagcctaccgcaaatacatgacagtgcccgcacgcaggtccatccccaacgtcaccaagagcacaggcgtgcagacctcgcccgaccttaagaagtgttaccagacgttccctctggaccgcaaaaaggggaacctcaaaagcctcccagctgcagatccctttaaaagccaaaacaatgggtttctaacagatgcgaaagagaagaacgaggctggacccatggaggaggcccggccatgtggcgcggggcgggtgcacaagaccacagccttggttttccattccaaccaacacatgaacacagtggaccagcctttgggggtcaactgcacagagccctgtaaaagcccggagccgctcagctatggagaagctgcgctccaaaactccactcggcctccatccgaagagcccgattaccagctgctcgggagggccaagcaggaccgggggaggccaaactccgaggagcccgctccacctgccctcaggagggtgtttaaaacggaggttgccaccgtttacgcacctgccctcagtgccagggcccccgagcctggtttgtcagactctgcagccgccagccagtggtcactctgcccggcagatgacgagcggaggagagccacacatctcaacgggctccaggcgccctcggaaactgccctggcctgctcacccccgatgcagtgcctgtcccccgaatgtagtgagcagccgtcgcagactcacaccccgccggggctggggaaccagcctagtcccacagcggttgctgcaggtgaagaatgccaacgaatcgtgcctcatacggaagtggtcgacctcaaagcacaacttcagatgatggagaacttgatcagttcaagccaagaaaccatcaaagtgctcttgggggtcattcaggagttggaaaaaggagaggcccatcgggaagggctttcatatcggacggggcaagacacagctaattgtgacacatgcaggaacagtgcatgtattatctatagtgtggagctggattttaagcagcaagaagacaaactccagccggttctaagaaaactccaccctattgaggaaactcaggtcataccttcgccttactctcaggagacttactcctcaactcccaagcaaaaatccaaaactgaatctaaaaagcacggaagatggaaactctggttcctttaacactcacggtgtctggagtctcgaggccgtctttagaacccactggagtttaagtcaatacttttccaaaatgaataggatcgagggaactgtggtgcccattcaggcacctcccacttctcgccctgcgtaccaaaaaggcctttgtaccaatagataattaacagaagcaaggtattctgtgtcactccttgccagctgttctttgcagttcactgatgtgggatgtaaaatctgaaatgaaacttacgtagtcaaagatgataagtaaaaattttcccccacccccgatctgcaagtaatacattatcaacctgcgagatggcaggctgtcaccctgtacacagctataactcataattattttcaagccttgattttttttttaaataatgagaagaaaaagcaagccttatgtttgcgaaggacttcatttttatgtttcattttgcaaataagcagggggcgagtgcaattttcagcacatcaaattccggagaaagcacaattttttcaagtggtcggagaccatgaataatctctaaaatgtgactatatgtatatttgccttcatgtgctatagcgctaagccaagtgaccacatctcagtgtcacaacgacacctcaaatttagcatcctcttcatctccagacttacgacatgtttactgctcattttccaaatggccagcagccaggagtcccccaaagtcaggatatgcctttaatcactgcaagtagacagggtcagagctattggacactaagttttcttagatctcatttttaatcttttggtacccaaaggccaaataatacattctggcaagaatctgagaacatacatagagatacacgatggataatccacccaccaataaatcacaggcattctgtgccatggcagacagtgtttttgtggatcgatcctccgagacactgttagccatggtaagtgcagccagacgttatgtacaattcgttatgctttgtattaatggtggaagccctgaccatctcaaagagaaacagtgcgtttagtttagctgctaccaagggacaatgtcgcctacatttaacctattagtaagttgtactaaacaacatacttaggggaaagctgtgaatcaaatgtttttaggtattttttaaatcaacagtaacacttagagttctctcttgattacacattgcaatgtaaatcttagttcctttattttttcactcatttctttgcacctttgcaagtatctttttatagaaatcaaatcccctagtctattaatgactttgtctatcaattttttgattttcacaataggaagtagggatcttactttgccttttttttttttttttgtacaacttaaattttgaatagtttgtgagcatacaggaaaacctagtcttgaagtttctgtccagcagtttcacatctagtggagtgctgacatgcacacctcattgactagatgccaaacacacagtggctaaccttggtaaaaggatctcacctgcttttgtcagattggagctgcttcttgccatgtattttcctcctgactcaacagcaaatctgttttagttctaagtgttttgattctacaaggacctagtgatcagtaaccagatcgggccttgaaaaaaaaatgaagagtatgtcgtgtaaacattcttcgggggccaaacaacactgcagttgtatgctttaatttaaaacacacatgtgcacacacacatcctctgcggaaacactatatgaagttcgaatccctgaatatcaataaaaggaactgagaaatattttggtgcaagaacaatgaggaagttgatcctgtaacatgaaggaagtgtaactgtttcacgtagactaaatatttaaaaatgggtttcatgttttttatactgtttttaactaaagttataaaaatgtttccaacaagttctctctccttatgttttaagaatcccaactatctcagtaaattgaaataagggtattagcagttttctaattagtaacacaaatctgtctaaacaagaggacatcctagtacacaaaataatgtcactgtttcacaccagtctagaccaaaaaaaaataaaattgaaatgttcagagtcaaaaaggaacttctgaagataaattaattcatccctaaaaattaaagtgtgttcaaaatagaaaaactattgtcaaaatcatttcatagtttaattgcaacacgtcactaacagatggtgattcttctcttggaaagattcaagtaaaaactctgatacaaaagcaaggtaaaacgcacagggttcccttatgtagatgtacacatggcattgcatatagagattaaattattatacttgtcgttaagttctttattaatttttaaataaaaaaatcaaagatgtttt

SEQ ID NO: 812 - DNA, 4830 bp, Homo sapiens
acaaagggcccgcgcgcagccgccgccgccgccgccgcgcgaggagccaggatggtcctggtccacgtcggctatctcgtgcttccagtgtttggctctgtgcgaaacagaggtgccccctttcaaaggtctcagcatcctcacgctacctcctgccgccacttccacctgggccccccgcagccgcagcagctcgctcccgacttcccgctggcccaccccgtgcagtcgcagccaggcctcagcgcccacatggccccggcccaccagcacagcggcgccctgcaccagtcgctgaccccgctgcccaccctgcagttccaggacgtcacaggtccctccttcctacctcaggccctgcaccagcaatacctcctgcagcagcagctcctggaagcccagcaccgcaggctggtctcgcaccccaggcggagtcaggagcgtgtatctgtccacccccaccgcctccatcccagcttcgacttcggccaactgcagacacctcagcccaggtatttggctgagggcactgactgggatctcagtgtggatgctggcttgagtcctgctcagttccaggtgcggcccatccctcagcactatcagcattacctagccactcctcgaatgcaccactttcccagaaactcctcctccacacagatggtcgtccatgaaatccgaaactacccttaccctcagcttcacttccttgctctccagggactaaatcccagcagacacacctccgccgtacgggagagctatgaggagctgctgcagctcgaggacaggttgggtaatgtgactcggggagctgtacagaacaccattgagaggttcaccttcccccacaagtataagaagcgaagaccccaggatggcaagggcaagaaggatgagggggaggagtcagacacagatgagaaatgcacaatttgtctgtctatgctggaagatggagaagatgtgagacgcctaccctgtatgcatctctttcaccaactgtgcgtggaccagtggctcgccatgagcaagaaatgccccatctgccgagtggacattgagacacaactgggagccgacagctgagggaggaattagccagtggacaccccatttccttcaccaggtccccccacggccatagcccttgcagccaaactttgccttctgagccatttgacgtagaggaaaagcctgcaagcacattttgtggaaagaggagttggtggtatcggtgtcgagggagaggagggggttggggaggacccacctctccagaatggcgactgtccccatccgcctggctgagcaggagagagggagctggcggtgcccagcgcaagggcgggaaggaggggcccaggctgcggagaacccaggtgggatcctgaaggcactagctgacagacgggcccctcaatcctgtcctctgaaggattgtatatatacctctcgaccacgtaggaaccatgtaggggtctctagctatttctgtggatggcagccggagcatgttagcttaagaaaaatgttgtgtgtggtgctctagtcatcttgtggtggacatgtcgctattaccgaattcgcaccaaatatttctcattgagtttcttgttttggtgcctgaccgaaccaacgacagccccaatcttcccgtctttatgagagaaaaggaaaaaggaatcaaaggtggaagaaaaaaaaagccaaattctgtttacggtgaaaaaggattttgtttttcacccaatttgggaggcgagaggggggggttctcgttttatttttgtttttgtttttaccttggcttttgtttttctcatgtttacagtgcacggagtgtggaagggggtctaggagagggagagctggaaaaggagctgatggggtcttatcctggcctctgagggttcagcggaggtgaggaaggcagcagagctccagcaggtgaagggagagttcatctaggcggggctccccaggcccagggctcaacttcatggccccagctatatccccccagttccacactaaaccagggagggctcggccctcagctactggtacccaatgtgttcctgggagccgagagacccatggtcactccaactccttcctttaggctgtgctcttgcctgtcacaaagaggcaacgtagccactgcctccctatgcaaaaaattaaccagatgatgcagataagacagcataggtgatggctgcttggtcttggccacagtgctctcagccagcactaagggctgaggtcaataccgcagaccttggggaggaagctgagcatcccccgggatgtctccagtcctgacacagtccctcagagatggccctggctctgaggtcacatcagctaggtttgggaggcccctcagcttggtttgggagtgcccgtgttcctggtctctggctgcttctctgactctttgataaccttgggcaagtccctttctttctctgtgcctcagtttccttctcctttgaggggggagagagaacagtgcagccccatttccggtcctgctacctcacctagatgttgtgaggattcatattctctgtccagcgtgttctatgctctcttctgagaaccttgtggggtgtcgggatgggggtgctgggagacacagacctgatacagtatgtctttctgcaccacctcacaattttcctgaaccccaaagggagcagagagataagaggacagaagaatggagatgggaaaatccaccaaattccaacccaaacccaactttctttctccctatgtggaagacaccagattagctggaattctgccaccttcctttgtgccccaccccccactgttccctcatttgcactgctctgtaagcctccccctcacctccattcataacccagtctcaatgccctcgtatcaataagaccggggtaagggggacaggatacttgtcacatatttgaagaaattccatacagtgaaggaaatttgagtctgtattgctgctacaagggtaaaaccaggaccaatgggtaaaagtaacaggcgggcagattttggcttgaggaagagcttctagcacgactggttcatgcgggaatagctgctctggccacctgcaggcagaaagtgggggaagtggctcctggcaggagatttctcccagcactaatatcctggtgttctataaaatctttattgagtgcctaccggtgcaggcgctgggagagacaatagctttgaggagctcacaatctagctgaggagacaagacacatccaatgctgcaaaaatggtgaataacctgattcagggttagcagcaatgagtatcacagcgtccaactcagtagctccagtgtatgaaaatgtctccagggctaaaggctggagatctcaccagtggggaaagtacatctgagtcaggattttgggggaaagctagttactgatagccacaggaagttgagacttctgccccattctctccaatggctgggtgaaaaccaagaattcatcggaagatggctttggcctggaggtagctagggtggtctaggaagctcactcctctcttagtctcagtctttcattctttctgctgagactggcctgaaaggctggcaagtgggagggagtcagtggggaggccaggatagaactagagctggtgtcccaggttccagtctgggctcttcactgacaaagtgggcaacactagaaacttccctttgtctctctgggccttagtttcctcagttacaacctaaggaggttggattggatgcttgctaatttccttctgacactcacactccctaacatcaacacatcttcaaggcggcagagctgtgcgcccacccagctattgaaaaggactttctgtgggcacacactctgtttcagactgggctgggggcacacgtgctgggtgagacagtgggccctcgtcccctcccccctcccaattctctgccccaggctaatattagggactggggaggggaccaccagaggggagagggaagctgcttactttgggggtagaccctgaagcccctcctccttcccccacagatggggacaggaggtgatggggtgctcagaaccctgcagctcccacttctttagccgggcagctgtttgggggacaagagagggccagggtctgtgcttctgctcccggcactggtcagggagtctgggaagagtggagaagaggcagggtcaggcctcagcatctcacatccaccacctccaggaggggagaccactggtaagtcctcctcctgctcaactcaagggactcagaccctttcttgactgagacgcatgagtgccttctggggtgagagcagccccagggtttaagttgggcgtcctagcagctgcagcagctgtgccgccgcgggtccaccgaggacgccaatcaatcaacccaacaccacaagcttggttgggtgcaagcagagggtgagcaggggctgcccctccacctggccaggacccccttcggcacccagttgcccttggccaccacctgtggcaggactcaagctcctcttctgcaaatgttcccagcctccgtgcaagtattcttaactctttacgcctaatgaacaagcacagtttttcaatggtgaagaaaaaagcaccagactttttttctttttttcctaaagaaatcccctaagccccccgcctgtaggcgggacaaacactccctgcgtggggctgtagcaacgtctgtcaggcccccttgtgtttcatctcctgcgcgcgtagagcaaatgctagagcgatttcagctgatagaaaaacaaaaatg

SEQ ID NO: 813 - DNA, 4378 bp, Homo sapiens
aaattatctggcccaaagtgttggtagtgccaaggccaagaaaccctgctttggttcctgggtgtagggacgtgtatgttcttaaacaagagcccctcccgcctgcattgtggtggatgatggctgccttttcattgagtgcgggctgtgtgccaagcgagttacctccatgcttttctttaatccttacaacttttgaggtacgtgtggttttttttttcttactttttcacctctccccaagttgtctgcagatgtgtgtttttatcttcattttacagatgaggaacccgaagcgtagagggttaagtaatttgcttgaggggacccagagtgggagatgatgggctcggattcaggcccaaggccatccccctcccagtgcctgctcaactccacagcatgtgctgagtccacacaccaggattcaaatccctgctccacttcccagctgtgcaacctgagcaagttacttcactgcctcctgcctcagtttccacacctgaaaactggggacaggaagggctgtgtggagcaggccaaattttgcgatgaagcatctgggtctgtgggttgcacagcggacagcgcagggccatttctttgccctcatacggagcagggcaacgagcagcacatcccgctttgatgccgagggtgaggagagggcaggagaccactgacagcgtgctgggcacagagtctggcacacagtgctcagtccccgcaagcggtcacttctgttacctgtttgatctgctcttcaggagctgggtctccacctttttcaggaacacactgtgtgaaaagcaagccatgcttgtgtcgggaaagcccagtgggtccaatctatgtcatcaagttttagacttcagtccctctctctttttgtcttccccttttgcagacaccttggaagagcttaaggaaatagataaaggcatgtggaagaaactgcaggagaagtttgcccccaagggtcctgaggaggatcataaggcctgagctcaggccttacctcgtgcacatacctaggtgtggagtcttgtacattgccatcgtcaataaaactgccccagtttccccttgaccttacggtttgggaatctcctctagctttcccagaaaggaagcccttgctgctctaaagaaagtttcagcctgagaagggatggtgattgagctatctgctgtgactgctgctcagggtagggaaatctcctggggagaggaaatgcaggttaccctctgggcctgatgagggtaatggggcctcggcacaaggtgcttcctgcattgccacgggagcccccgcccctctggcacgggtctggtgtctcctggcaagatactcaggctcccttttgttgtaggagctcctgggaggaagccaaaaatagcagtaaatactgaaaagggcatcctgttgcaaagagaaagcagtagggaggtgtgaggccgagagaggcaaaaagcctgcttggccctcatccccactgactcagagaaggatggaccttaggcctctatccctgaccttgcaaaaacccacattgcccagttggcttaagggacagggaagctatagacaggccttggccaagcggggcctcagctgcagttggcttcagcactgtgggcaggttctgtaggtggccacaagtcagaggccctgctggctgaggacacacacagggtcacctcgttattccatggaaccttggctcttactgatattgagcatccttctctctggaaccgtgagggacagggctgggcccacagcggccctggtgggtacaaagtggaagtgggttcttaacctcgtctgtgtctagactcctcaggatgttctgaaatgcataaaataaaatcgacaggactgccgtagaaaccagttatgccgaaatgcagttctgggtaggcaaatctcaggggaggacccttgagacaggatgtcactcagcgtatctcctgagagcctgagaggccaggccagcagggaggggctcttgttcctgtcttctgccagtgtgtcctgttaatccccacagcccccgggggagtgcaggaaacacatccctttttaacggactagatttctattaatttatttaaggcaattaacatattagttctcaggccaaaggatttgtaaaacattacaccaaaaggagaaaaacaagcggtcatgaaacagccacgcaagcgcagctcagcccttgttgcctgggcgtacaactcttccccaggaagcctgggaagaggcaggtcctgggagcaagatcgtccatcatggagtcaccaggccacctggagccatgccgggggtggcatggacacgacagtgaggtctgcactggctacagcagatctgaggcacggagggagctgcacagccatgggcagggctgagcacagcacccttgaaataagttaaataacaaagccctaaaatcactagtaacagcataactgccacctcccccagaggccggcagccgccaaaatgtagtgcttggagttaaaggggtgaccccactcttaactacccacaaggaggactacaaagagttgtcagttattgctttaaggaacaaaggtctctaggtaggatttatcttctgctaaggcattaaggtaaactgagtcccagtgaactttcaagtctttttaagggctctaagcaggactgtcagctctgaggctccccctccatgctcttcaaagcctgggtgggtgtcagggtgtctggcagagtgggagtggaggctggccagctggctgggccacccaacccgagggagggggcagtgttcttcccagtcgcagtctccagtgatgagcatcccctgttggggccttcggtggctctcctcagcggctaatgcagttctggacatccacaaagcctaggcgttgcctgcgtttccgctgctccgtcatctagggttaagcagatgccaacaggcctggtcaggccgcctggcaccttccctccatgggtgctgtggaagagcttggcacccgtcttcccctgtgggcccagctgctattcggcactggcggcgggccagggcccctcggggtgctttaaggatgtcgatgtcagcaccaaacccttgttctcaattagcgtgtcacaaaccctggatttgatgcagctgggaaaccagcccactaacagaggctgcctcatcttcatgcaggcactgccagatgcagaagaggatgtctaggcaagagggccttaaactcccccatctccagtgatggggatcccctcaaaggacctacctggcagctgtcagaggaaggggatgagagacagagggccccaccaccctgtactaaagtttccacttggccttgtctttagcggcccaaggcaggggttgtcaaccccagtctgacttgccatgcaggggagagtgggtttggcacctgccttctcatccaggcccagggccagaggccagtggggaagagggtgggtcaggaaggatgaaggcaggcagggactgcccagggatagaacccagggtgggcctgggatcaggcggggtgcacacctgctccttgagctcgttgagctgggcagtgaggtgggacaccagcttcatggtggagttgagcttgtcctggagaatccgaatctcattctgctccccctcgccctcattgctgacaagggacatggcccgcatccgggggaaccagtccaggttcttgttctgaaaaacatcaccagtgggttaagcaggcgtgggcccggcctagaaaggcctcatttagaaaaacagtaatgtggggggaggcttctgccacacccttaacaaaactactcgtcagggatgtgtcatgggaaaatctgaattgacctggtcctccccggggccagagtgagctggcagtcaaccctcttgtcaaccctctgccaccgagacaggctgacttccgttaggcagcgtcggcagctgagtttgagtcctttgctggtatcagcaccatctgtttactctcataacaccccctgagaggtggaggaaggcctctgcacccagacagaccctggatctccttccttccttcctcccgcccgcctgcctgacaagcacgccccacgccccgggaagacgggagtcagacagatggcaaattgagggatcgggaggctccgctgaggagagctggcatctgacacgtgtctgggaggcaaagccacgtttcccaggacagaggagtcggggggggagggggcaccaagcaattctcagcttccttgtagtaagctgtgaattctcagaccaacagataaacctgtacacaaagatcagtttgaaatacagactaaacgataaataattccttctttatg

SEQ ID NO: 814 - DNA, 4626 bp, Homo sapiens
aactgcctactccttgtatgcagctgtcagcgttgggctgcaaaccagtgacatcaccgagtacctcaggaagctcagcaagactggagtccctgatggaattatgcagtttattaaggcaagtgacagctgagaccagcaattccacctgccctgctaatgtaacaatgggcataggtgctccatgttgtcagcctgtggcagccatgagaatgtgccattcagatttcctgtggggagcataacgactgattaccccagccgctacactctggatccagcattgtgttctgggtgaggccacgcttctcatgagccgctacactctggatccagcattgtgttctgggtgaggccacgcttctcatgagccgctcccagctgtgggtattaacacagaggggctactaattcaggcccattgtagccagggagaatttggaaatgcagcccaaagtgagtgtgctggggactgaattgtgtgtgttcccctcaaattttgtcttcaaaacctaatatccaatggtaatgtatttggagtaagaaagtagttaagactaaatgaggtcgtgatccgctatgattagtgtcctcctaagaagagacaccggagcatgctttccctcacctgcccttcttgtcatgtgagtacacaatgggaaggtggtccatggacaagagccttcaccagaaactgaatcggctgataccttgatcatagactttcagcctccacagctctgagaaaatacagttctaatgttgaagccacccagtctggaattttattatggcagcccaagctgactaacacaggtggtaaactctgtctaaagctaagtatctgcaggagaccaatagtcaacaagttccatgagggaaagtcaaaaacaacttcagatgtttttgacaaaacaaagagggttccatgtgattaatagttgaacatgctaggtttcttctgcgagatgggtgaatgccatttaaaagagatggacagtggctttcattgcctttggctgatccaaaaggagtcagattcagaccttgggatctggagtggcagaagagtgccacaggaattcagtatggtactgcagccagtcccagagaagctgcaggagtcctggagagaactctcttttcctgtgatgtgaaagcgtgcccggccaggtgcagtggctcactcctgtaatcccagcactttgggtggctgaggtgggtggaccacctggggccaggctggtctcgagctcctgacctcaggtgatccacctggctcggcctcccaaagtgctgggattacaggtgtgagccaccgtgcctggcctgagtggcaaatttttattgttgccacacagcctctactgtattccttcctaaaggtggttgggaacctgggaggatttaagctgtattctctgccatcaagatgcttacattctatttggggaaataggagcattggtgaagaggctttgcattttatttaagccgcaattactgtgcacatactctgtggagttgtagtaatactggtgtggtcttctctagactagggtgggggctgtgggaatagagaggaaaggcagaatgcaagattttaagcagcgttttataacttaatggatatgcatcagaattacccaggcaagaggaagattttgttctcagaaagcagaggccaatggaaaaagctcagtttaggcacatctgaccactttaggattgcaagttgggtttccctaaagtaaaatgaactcttcacttggttggtaggtgtaagatgtgaccagtaatgaatgtgttctgagttagctgcacatttacctgttggatgttatctgtatttgcagttgtgtactgtcagctatggaaaagtcaagctggtcttgaagcacaacaggtaagagattccatgacaggcctgtcccaaggcactgtcactttctgcgcaccagcaggaataaagggatatgggaaggacctgatgtttatgctgtcttttctgtgaagcacagataagagaagagaaacaagagatgtggcccagactggaaactcatccactggccactgtatttcctctagcagtggagctgggctcaggcccctgcctacttgacctcaaagtcacaaccctcatatgttaaatcatggccggcagctcatggtacagatttggcgaagggttgtggggagagtcatgaggcttgtatttccagaccatctaattgaatgagcagtggaatctccaggaggtacctgctggtcagtagaccccttcttcctcccctgcttgcagatacttcgttgaaagttgccaccctgatgtaatccagcatcttctccaggaccccgtgatccgagaatgccgcttaagaaactctgaaggggaggccactgagctcatcacagagactttcacaagcaaatctgccgtatgtggactcctgggccacccttgggtgggggcaggcatttaggatttcagttctctcaggtgtctttaacccagcacttacaacctagcagccctgctggttctaccctttacaacttcacccattgcttgataacagcagaattaaatgttgtgtgcacgttcagcacctacctctctcacagatttctaagactgctgaaagcagtggtgggccctccacttcccgagtgacagatccacagggtaaatctgacatccccatggacctgtttgacttctatgagcaaatggacaaggatgaagaagaagaagaagagacacagacagtgtcttttgaagtcaagcaggaaatgattgaggaactccagaaacgttgcatccacctggagtaccctctgttggcagaatatgacttccggaatgattctgtcaaccctgatatcaacattgacctaaagcccacagctgtcctcagaccctatcaggagaagagcttgcgaaagatgtttggaaacgggcgtgcacgttcgggggtcattgttcttccctgcggtgctggaaagtccctggttggtgtgactgctgcatacactgtcagaaaacgctgtctggtgctgggcaactcagctgtttctgtggagcagtggaaagcccagttcaagatgtggtccaccattgacgacagccagatctgccggttcacctccgatgccaaggacaagcccatcggctgctccgttgccattagcacctactccatgctgggccacaccaccaaaaggtcctgggaggccgagcgagtcatggagtggctcaagacccaggagtggggcctcatgatcctggatgaagtgcacaccataccagccaagatgttccgaagggtgctcaccatcgtgcaggcccactgtaagctgggtttgactgcgaccctcgtccgcgaagatgacaaaattgtggatttaaattttctgattgggcctaagctctacgaagccaactggatggagctgcagaataatggctacatcgccaaagtccagtgtgctgaggtctggtgccctatgtctcctgaattttaccgggaatatgtggcaatcaaaaccaagaaacgaatcttgctgtacaccatgaaccccaacaaatttagagcttgccagtttctgatcaagtttcatgaaaggaggaatgacaagattattgtctttgctgacaatgtgtttgccctaaaggaatatgccattcgactgaacaaaccctatatctacggacctacgtctcagggggaaaggatgcaaattctccagaatttcaagcacaaccccaaaattaacaccatcttcatatccaaggtaggtgacacttcgtttgatctgccggaagcaaatgtcctcattcagatctcatcccatggtggctccaggcgtcaggaagcccaaaggctagggcgggtgcttcgagctaaaaaagggatggttgcagaagagtacaatgcctttttctactcactggtatcccaggacacacaggaaatggcttactcaaccaagcggcagagattcttggtagatcaaggttatagcttcaaggtgatcacgaaactcgctggcatggaggaggaagacttggcgttttcgacaaaagaagagcaacagcagctcttacagaaagtcctggcagccactgacctggatgccgaggaggaggtggtggctggggaatttggctccagatccagccaggcatctcggcgctttggcaccatgagttctatgtctggggccgacgacactgtgtacatggagtaccactcatcgcggagcaaggcgcccagcaaacatgtacacccgctcttcaagcgctttaggaaatgatgcttaggcagggtacttcgttcaagaccggcgcttggcacccttgttggaaagggattttcagcataacattttccttccacctctttgaccttccctccagcgttggccaaattgtgctgaggaagatgcatcaagggcttggctgtgccttcataggtcatctagggttttataaaggaggaggagacaatattttttcaaactttttggggagtggggtcatttctgtatataaaaaatgttaatatttaaggtatatttatgttaccgttctgaataaacagaatggaccattgaaccagt

SEQ ID NO: 815 - DNA, 3773 bp, Homo sapiens
aacagggaagctgtggataccaacggagggtgggagcccgggaggctgcgggtagcccgggcgcccaggggcggcggcggcccagcccaggtgcccgcgcacaggggacctcggtgcggagccacccctcgagcgcgactgtcgcagcgccagcgcgcacggggccccacgcacccaccctccgcacctgccgcggggtccaaaagggatcctgcaaaaatgagccattctcaccccgctgggttacttgctgcatataatagccttatggataaacacctggctgggtattttaacaatacaaggataaggcgtcatctcttaagatcaggactgatcacaagaagtggaagaatactttctgaaaaagaatataaactaaatatgatgaagcgggatcatcaaaaatatatccgggaatgcttagcccaggcaatttttcataaagttcttgatatggagcgttaccatcagcttgaaataaaaaagaaattggagaccttagctaggaaggagcgaatccagaggtttaagggagagcacacaagaaggtctgttgaaaataacatgccaatcctgtctccccacccaccagttggcccaaagagtaatcgtggccatagtgttctggttgatgaaggacattccagtccgttagcactgacagcccctcgaccatatactgctccaggaaatatgcagcctccaattcgattacagcctcttcccagtaatcctgcagtagaaactgttccaaaggtaacttcaaggtccagatcaaaaacctcattgctggaaaatgaagctctgtttcccattgggggcaagaaggcagtgatgaagttcaggaactccataggcaattcacagagaatgaattcatatcaacttccaaacattaacagttacatgatgcctattcctcctccacttcccccaactgggaaaatcacaagagaaaatagatctgaaacatggagaaggagaagatttcgtccaaccactgctgcaaatggcttagaacctcttttgacaaaggattcaagaaggattcataaaacatccttacatagtaatgcagctattacaatgatctatttggggaaaaatgtgcacctatcttctgataatcctgacttccgggatgaaattaaagtttatcagcagcactgtggtggggaaaacctttgtgtctacaaaggcaaactacttgaaaaagagacctttcagtttatttccaaaaggcatcatggtttccccttcagtctcacctttttcctgaatgggatgcaggtgaacaggttaagctcctgttgtgaatacaagcatcggaaaggttccaggcttggaggcaaacgaggctactttgggtttgtgtgtgttgagagatcatctccttgctacaagtgcattattgcaatgggccttgacaaaaaaccgtctttgccgaaatctaggaaagaaaagagcactgagaaaggagaggaactgaagaaggctgaggggaaagtgaggaaagagagagagtatgtgataccaaaaagaaatgagatcaaggagaacaaaacctctgtttcagccaaattttcagctcaagaaataaaaacagggctcaaagaagtggtaactgctgtggaggaaatgacaagtaaaggaaaaccaggacaagaagtcttggaagacgaccaggaaaatactttaaaatatgagtatgaagaagactttgaagtagatgaggagaaacaaggtgaaaaatctaatgaagaaggacaggctgatgttcaaatgaatggaataccgcagtcacctttggatgataaaaaagataatttagaccctgaaaaagagagtgaaacctcatcacagaaggcaccagatgcccgtgacaatgtgaaagatgagaatgatggatgctctgagagtgaactggaagaggataaacaagatatgaaaactgcttcatcaacctcatccagaagtcacccttattctagtgacagtgaggatgaatctgcagtgggggacagggaagcccacactgacagcagcacagatgaaagtgccagaaggtcatcttctcaggaactgagtgaaaatgataagccaagaaagtctcaccttccaattgaggaatccttagaaattgaaattgaagaccaagaaataacaaaagcagatgtggagaccaagccgatgccaatagacgaaagctttgagaatgttcttaaagaaggaacggagaaaggaacccaagagattgcagagggtttatctgagaagtccgggaaacatgtttctgcagaagaaaaggaaaaggataagagtaagctttgggaagaaagcactgctcaggtgaaggacaaaaaggcaggtctccctgggttggaggaaggtggaaaggattcattgccattagcctatgtcctggctcttggtgcaccaacaatgaatttcatggtggatgaaacagcagcaatcaactcaaacaaggaatcccagcaattggtgcaaaaaacgtatacactggagaagaaagaagcaatggaggaagatgaagcgccccagcacagagatgctgacatagtacagggaaaaggggaggcagcactgtggggagaagcaggagctgttcatgaggctcccttgagggcgtggaagccaacagcagagcagccagaattggcagaagagtttacagaaaaaagggagatccctccaggcatagaaaggggggcagagggagcagcagaagcagaaggggtcagaaggctgggtgaaggggggtcagaccccataggacaagcagcagcaaaagatgctgtgggtctgagtaaagatgaggctcctgaaaagcaagccttgatgctcacagtgcttgagacagacaaagcagcttctgaaggggaacagggtttagagaaggcagtgcttgcaaatgaagcagcagccctgaacttggagcatcttcatgaagtagcagccctgagagaggcagcgacatcggaggagggagaggctgagggtggggtggctgtgagtgatgtcggagaaagtgaagaggaagcatccatagacctagaggacacaggacccatggaggacacagcatcaaagagagaggacggttctgaagaggcaattcttgggggagaggaaccagccaaagagagaaaagaggttatgagaacagaaacacgcttgagccccttcacaggagaggcagaggcaagccggatgcaggtttcggagggcagccctgaggaaggaagccttgcaaaggaagccttcctttgcaaggaagatgtggaaggggaagagatggtgactgaggcagaagctaatagggaagatgataggaaagaaattttacccaaggaattagatttagcaagagagcgaaggaaagctgagaggccaaaaacatctctgaggaaaactgactctgagagagaagaggtgacaagggcaaatgcactcaaggatgaagatgcttttaaagaagagcaaaaacttaaagcgggagaaggggaaacagagacagaagtaagagctgaggaagagacaaaagctcccccaaatgaaatgggatctgatgctgagaacgaagcacctgtggaggcttctgagttgtctgacaatccagggcttctaggagaagattcactaaaagagacagtggttcccatatttgaagcaacgcctggatttgaaaagtcgctggaaaacataacagctctgaggaaaaaaaaaaaaaaaaaaaaaaaaaaaaaaag

SEQ ID NO: 816 - DNA, 3194 bp, Homo sapiens
aaaatgcgtctccagtacgcccttgacactcacctcgatggaggtccgcttcttgcgcttgcggccctgtgcagcgatcttgtcaatgctggtcgggctccctgtggacgaatccgcctcctccagccacttgttcagcaggggcttcagcttgcacatatttttgaagctcagctgcaaggcctcgaacctgcagatggtggtctgcgagaacacgttaccatacagtgtgcccagcgccaaccccacgtcggcctgcgtgaagcccaacttgattcttctttgtttgaattgtttggcgaactgttccaactcatcagaggttggcgtctcctcgtcggagtgatcctggcaatggtgctagcccagttcgccgtgatccgggggctctcggagcaccgggtgcaggctctgtgcagaggcggcagctggaggtggggtgagtcccccgtgttccagcatgccgctcacggtgaagccaggctgcgagtacacgttgaggggttggccgcttgacgtgatagacgggttcggtgccgggctggccccccaggcgttggggtggttagtgtgcggtgagtggtgggctacgtgtggcgagcggtgatggatgatcgcacccagttgcaggtcttcgcgcccgggcttcacgtcctgctggtccagggggctggtggccagtgtggaggaccatgggcccccgtcgctcagactggtcacccagtgatgcccgaggggatgcccattgctgggaactccctgcaagtaatccctttggagaagtttctgagggttgcggaaaggactcccctgctgcatgcccgcagagtccgcatggactagggaggtggaactgagaatgctgtagggattcgaggcagctgtggccatggtcggtgaggatcccctactagttataatgtggcaaagggagcagcttcagcctttgatatctacggtgcggggagccaaagacgctagcacgggttaccggcacccaccacggccaatcgcagcgcgtctccgcctggccaggagtaagcccggccaatagcggtgcgggaggtcgggctcgctttccaaattaggctggtgaagctccggagtttcaatgagacccaagcaggaagtgaatcaatctttcagctccattggctgcctagcgcagagtggcggccgtacatttgattactaccccccccaccgcggggtttatgttgatggggaaaagatgtgagggatgtgttgttggggggcagtcagggagtgaggtggaaaattaaggttgtagaactcctttttgattatttagattaatctaaataaagaaaaagtaaagcaagtttaaatgtcattttgatctcagtgaatagggatttttcagactcactcggctgtctgggcgggctagttgtgtgcctaggactgcaaaacaaaacgtcgctacaaactttgagcaaagtaacgtcttcgattggaccctaaaccaataaagttgaaaccaatgattccaataagaacatttcagtttatttcattgtattaagaacctcgatatcaaggtctgaaagcttctaagagatatcctgttctttcaatttttctgaaaaattttttaggtcacgaagaactgaattattctgggaaagtaaaatctaatgtgatactgacaatattcagttatttcgaagtttgcttcccaatctagctggtcaattggaaaccttgctttctcgctgctccatatcagttcccatcacagatcccacaacttctgtcaaaggttctgcttgctgaagcgggcagccctcacactcacccaaaacactctgcagacccactacgaataggtatacaggaaaacgttcgtgaccccgcgccccgatgccatcccctaggaaaattgtttttaaccttcaccgctcccccaccctcctcacccgccctgcatttaatgtgcccaggaaattcagagagagagaaatggcgggatgtttggcatcaagtaccgcccccacttccccagtccccatcaagcttgaatttgctttcagcttgaaaagataggactgcttttacattttggatagaataaaagaggtgaaacacttgtgctccttctaagcttttataagttaggaaaggacaagtccgtgtgctccacagcccggcgcaaaggcagtgcttggaagcagagtggggagaaaggcaaagatttgatttgttctagctgagaaaaggcaacaccagatacccaacatggtctttgaagttaaaaaaatgacctttcgttgaataattttggaggtaacctagctgcctaattatatttgcacttacagaagacggcatcagagttcccttattggtttgaaattccattaaatatattgcaagagcgcctaggttaagcttgatttaaatttgcatacattttcatatatttagcagaaataaaagaaggcttgctgctaccagaaagtcattaaggcattagtttctctaagaagacagatctgaagaatgtgcaagaaaatgagaaaaaaataaaaacaaggtgagcttattctgccattcctttatatagctaaagagcatctatttcctgtgaaatgagtaatttcttatgagagcacagagcaataggagctgatattggtaagtgtaaacgtgtttattaggcatgaaaacctggcatctgattcagatctatttctttttttcactcttttttttaaggtaaacacttagtaattattggcagagaggatcatttgccatctcaccccctcttcctgctctctcattgaaactgtagcttcatttgcccacgtcttattgtagaggcttatctgcttttagaaattgagttttcctttctctctctctctttctctctctcccgcccccccccaactccccaccttttctgctaaggaactcatttctttactgctaactgtttgcatcttcctttgcaagaatgcaatctcatttgtgcctgaaattccgcttctggaagaaacaagaacttgtcaaaatcaaacaaaagtaaagtttttaggtgctctgttaagctggcctttggaagatccatttgtgagtctgtgtcggctcaatttagaggtcagagggaaacgcgttgaagaaaccttacgtgtaaaacgatcatgatcattgccatgctgtttttg

SEQ ID NO: 817 - DNA, 3571 bp, Homo sapiens
ggtgcgtgtcggggatgcggccgcgcaggcgctcgctccctggcttcctggccgggtagcgggcgttcggctaccggagtccagcctaagggcccagccgaggtctccccgcgcgaggcggttgcgctaggtgagcgggtaccgcggccgcgcctcccttgtcatttactcagcggtcagaggcatcctgcgtctgggagtcccaagtgccttcggctgggtgcccctgtccgatcctcaaaaggaaagcacaaatcccgggtgcgagtctaacccaggaccgaactttcccgcgaacctgaagttaccatggggcgggagccaccttagcgccgcgtccgcccgcccctcgcaccggctaggatgctgcggaaggcaggggcgccgagaggcaagggtgaaagacgccgtccatacccccaaagcccgaacctgcatctcctctgcgaggcgcagggcgggaggaccgctgcagttgggagccggctccggacaggcaaagcgacccgacaggtaaccttccacaggcccacacatgtgttatcagccataccttaggacagaaggaatgagtttgcagaaaggatgacaactccaggaaggaaattggtagactcaacgtccagggaacctacgaatctgctatcccaagccttctgcccccaaacacttcaccctgaaatacagcccagagcatgcactcagtgagtcccactgaagaagagacggaaggcagaactgaacaagatgtgtccagaagaggtagccatagatcatggacatgaccaaaagaagcttactttattttcaaccctacaaccatactgagaatttagccctggggacatcttccgatataatctggcatagaagagtggttatcacacctttagcatgggacccttgagacacctttgctgtgaataatggagaagcaaaaggagttactaatgaagacaaactaaacctgagaacagagagagcctaactatgtgctccagaagtgccatgtgtgtctaagatgaagtttcgctcttcttgcccaggctggagtgcaatggcacaatctcagctcactgcaacctctgcctcctgggttcaagcgattctcctgcctcagccccctgagtagctgggattacagctgggatatctaccttctcctgccctcagacatcagaactcttgtttctcaggccttctggctcagactgaattacacaagctttcctggatctctggcttgcagatgacataccatgggacttcactggccttcatatctgcccaaactggaaacaatccagatgtccctcaacacatgaatggataagcagattttggcatttctatgcaatggaaagctacttattaattaaaaggaatgaactattgatacatgcaccagcatggttacaagtttggggaaggaaaatcacacagaataatcacacatactcggactccaggcccaggtaattatatgaacatgtcaactcatttaatgacagcatggagtttttaccagttatacgtaaatagtgtatttgtacaactggaagtgatttgcaacaactttgacttatcaagaatactaactttagcactgataaatattagtaaaatgttggatgggattcagaccacattggttggaataaaccagtgtaggtttcaggggaagcagagggttagcagcataataaaaattaagagcattaaattcacctaaagggccagcctgacagccctggaggccaatatctttcctttattcccaaagcatgtataacataggcttcacactcaagtattagtaagatttcctctagtgttcttccaataaatttagccattttccatgaaggaatgccttatatatattaaagaaaaaagctttcacctcataatttaaaatttaatcttaaaatttcttaataaaagaaacaattatttcctgggattacgaaaacctccactgtgagtttaaagcacttggagctccttaaaggcagaaactatgtctataagacacattcctcacagaaagggcttggtccaaggtgggtgttctacctatgcttattgagtaaatttattagttaatataatttactaatttttcagcattaagttaaaaaatttcaatcagaataagagttcacacattttgtaactagtacacaaaggccagacactgaagtgccaattatctacccaaaaatatgttgactgaaacaatacaatgtatattttacaatgtaatatttttcctatatgcaatagaaggttaaattctttaaatttctatatacaatatttccatttacaatgccagtggctaatctttcttgcttttttatttagacctatttctatgtgatttttttcttaaagaatatgaggtgtatttcctttttctctaaagagtgcagctattggaattagaaatattttcaaattgtcacataaacatgtctgacattctgcattctatgaatctcattgtatgcacacagctttcatcctcctgttctggactttaggttataccttccacataagattaattaccattccctgttttatgaacccaaagtgctctgggcaatatatcacagcaaaaatgagttctaaagcagtatgataaagtatcttaccatcacagctttacattatttggggatagagtgctcacgaccagtatattttttatttctgcctacattgattgaagttaatattagttaaaaaaaaaaaactcaagggacattttaactttaatggcccttatatgtgtggttatagcagagtgcaaaactactaaaatgagttgtcgtaccatggttttatggtactataacaattacctgggaattgcatccatgatagaaaactctacaagtgatcgattatcttgtgctcttcagcagaaaagcactaaatgaatatataaataattgtatcaatgtatgaaatcattggtagccagttgacaaatgctcgagctgcaaaaagcacaaaccaactagaaataacaccacttattacccattctagcaaggtcaacaattggaagtattttggtagaaaagttaagtttctgttttcttccaactaaagaagataatttgtagtactcagaccctgagggtgctaaagtcaagctgtagctaatttggagttttaaagatgcgagagcgtcccctgcttatttcataccatttccccactttgaaagagttcttaagcaaatgtttaccttgtcatcatgtgtaacttgggcaatatgttctgagtattatggggttatgtgctcccactgtgggtttttcacaaaacttcctctagttgctgtgcaaagcaagttactgtgaaggttctccaaggttctggttgatttgtgtttggaataagtcttttgttgttacttgctctctgacagagggactggaaattatctggactttggaagagactttgtgatatttggataatgttctcaaagtgagtagtatattagcatgtggtttacttatgcaaaacaagtcaaaagatgaatttaaaatat

SEQ ID NO: 818 - DNA, 4049 bp, Homo sapiens
tttgcccaggctggagtgcagtggcatgatctcggctcaccgcaacctcatcttcccgagttcaagccattctcatgtgtcagcctcccgagtagctgggattacaaggtgcacagcaccatgccgggctaattttgtatttttagtagagacagggtttctccatgttggtcaggctgatcttgaactgctgacctcaggtgatccacccacttcggcctcccaaagtgctggcattatagacacgaaccaccgcacccggcctatatgctttcttaatatccattctggatcagtgctgttggaagacaaaattacaacaaatttagttaaagatctaattagcttttattcttgatttgtgaatagggcaacctccgttctacaaaatagaataagagctcgatagggtaatagcacaacagtgggttttgtagggcggcaacaaagaaacagaacaataggtaaaaaagctgattggttaacgtcaagttacattaggttacttttttcctaagggttaaagcagaagcgacttccttattattctgactcaggaagactggaatcttctgatcgcaggaaaagctggtctgtttgagatgcacctccttctttaaagttttagtttgatcaagtggcatatggcatgagtggctgcattttggtttggtctcatcctggggcctagtgcaggggctcagtccaaaacagtgacctctcctgggccaggcatggtggcttctgtcatcccagcactttgggaggctgaggcggcagattgcctgaagccagaagtttgagacctcatctctaaaaaaacccaaaaaacaaaaaagccacacacacaccccatattaacattatatatatgtaacatctcccataatttttaacagaggtaacacatgtggacatgtttgtgtatctgtttaatcaatctgttattagtgacatagagttctaaaaaaccttttgtcatacatacaaacaattggaagattattttagcttggaataaactaaatacctgctgctataacaaaatgacaaaaatagcttaaactgggcaatttataaacaacagcaatttatagaattcttatagttctagaggctaagaagtccaagattaaggtgccagcagatttagtgtctgatgaggatcctgtcctcatagacggccatttccttgctctgtcctcatgtggtggaaggggcaaactgctctcttacatctctcttgctcttttttttttttttttttttttttgagatggagcctcgctctgtcacccaggctggtagcgcagtcttggctcactgcaacctctgcctcctggattcaagtgattctcctgcctcagcctcccgagtagctgggatcacaggcgtggaccaccatgcctggctaatttttgtatttttagtagagatggggtttcaccatgttggacaggctggtcttgaatccctgacctcaggtgatctgcccaccttggcctcccaaagttctgggattataggtgtgagccacagtgcccagctccatctctcttacaaggccactaatcctataaatgagggcttgccctcatgacttaatcacatcctaaaggtcccaccccttaatactatcacatttgtgttaagtttcaacattcgtatatttaaacttacgacacgtgtcatataatgtgtcatattacatattatgtgtcataatatggacacattcagaccatagcaaatagtactgtgcatatcatgcagtggataggctaagttttagagtcaactttgtagaaaataacgtattgatgactagtactttaatatgttctggagtatcgggggaacccacccccaatatttcaacataggttccattttccataagtgccggccagctgagaaataaagagagacagtataaagagaggaatgttacagctgggccgccaggggtgacatcacatatcggtaggaccgtgatgcccgcctgagtctcagaccagcaagtttttattaagggtttcaaaaggggagggggtgtaagaacagggagtaggtacaaatatcacaggcttcaaagggcaaaaagcagaactactaataagggtctaacaaagatcacatgcttctgagggaacaggacaaagggcaaaagcagaactactgataagggtccaacaaagatcacagggcaaagggcaaaagcagaaccactgataaggatctatgttcggtgctgcacatattgtcttgataaacaaataacagaaaacagggttcgagagcagagaactggtctgaccacaaatttaccagggtggagtttttccccaccttagtaagcctgagggtactgcagaagaccagggcgtatctcagtccttatctcaaccgcataagacagacattcccagagcagctgtttatagacctccccccagaaatgcattccttccccagagtattaatattaatattccttcctaggaaaagaatttagtgataccttctctacttgcacgcccatttataggctctctgcaagaagaaaaatatgggtgtttttgcctgaccctgcaggcagtcaaaccttatggttgtcttcccttgttccctaaaaatcgctgttattttattttttaaggtgtactgatttcatattgttcaaacacacatgttttacaatcaatttgtacagttaacacaattatcacagtggtcctgaggtgacatacatcctcagcttacgaagataacaggattaagagattaaagacaggcataataaattataaaagtattatttgagaactgatagatgtccgtgaaatcttcaaaacttatgttcctctgccatggctccagccggtccctccattcggggtccctgacttcctgcaacactggagtttgttgttcactggatgctgacaaatatgagaatgatccagaattagaaaagatccgaagagagaggaactactcctggatggacatcataaccatatgcaaagataaactaccaaattatgaagaaaagattaagatgttctacgaggagcatttgcacttggacgatgagatccgctacatcctggatggcagtgggtacttcgatgtgagggacaaggaggaccagtggatccggatcttcatggagaagggagacatggtgacgctccccgcggggatctatcaccgcttcacggtggacgagaagaactacacgaaggccatgcggctgtttgtgggagaaccggtgtggacagcgtacaaccggcccgctgaccattttgaagcccgcgggcagtacgtgaaatttctggcacagaccgcctagcagtgctgcctgggaactaacacgtgcctcgtaaaggtccccaatgtaatgactgagcagaaaatcaatcactttctctttgcttttagaggatagccttgaggctagattatctttcctttgtaagattatttgatcagaatattttgtaatgaaaggatctagaaagcaacttggaagtgtaaagagtcaccttcattttctgtaactcaatcaagactggtgggtccatggccctgtgttagttcatgcattcagttgagtcccaaatgaaagtttcatctcccgaaatgcagttccttagatgcccatctggacgtgatgccgcgcctgccgtgtaagaaggtgcaatcctagataacacagctagccagatagaagacacttttttctccaaaatgatgccttggggtggggagtggtagggggaagagctcccaccctaaggggcacacactgagttgcttatgccacttccttgttcaaaataaagtaactgccttaatcttatactcatggcttggagttaccttatattcaggtatatgtgatattttgcctggtttgttaaaattgccccatttagattccttctataattgttcttatagataagtaatttatatatgagctgtgttagtattttttcagtgtgagatctctggattctttcacaataaagctgttgaatttt

SEQ ID NO: 819 - DNA, 3277 bp, Homo sapiens
atgaaaatatgttagcagctgcgaatctgtacaggtctgcagcaacctcaatttttgcctcctcagaagaaagaatctgactgaggggcataaagcagagtaagagaccgaagcaaattttagaacaggagtaaaagttttattaaaaagctttacagcaggaacaaaataaagtaaagccaacttggaagggggccaagcaggcaacttgagagatcaagtgcgtggttttgaccttgacttagggttttatatgttggcagggttccagggtcccttctcccctgaatcttcccttggggtgggctgtctgcatgtacagtggcctgctagtgcttgggaggggctgcatgcacggtatgtttactggagtagtatgcatgctgacttgaggcattcttcccttaccagggagtgttcctataaggttataaaccagttaaatgctgtcatttctcccttagtgcccatgcatgagcccacttgcccaactcctgagatcttagtttcaggtttttctatttattgggagactgtttttccctggcacaggctgtgaccaatgattattttagagagacagcttaacaaccgcctatcacctgatggttgcctgacattcctggtggggaaggaggccctttcctgccctgctcgtgtctgactaactattgtaacatgggtttttaaaggcaggggtaaggcagtgtgcagtggctcacgcctgtgatcccagcactttgagaggctgaggcaggaagatcacttgaacctaggagttcaagaacagcctgggcagcaaagtgagaccccaactctacaagaaataaaaaaattagccaaatatggtggcatgtgcctgtactcccagccactcagaaggctgaggtgggaggatcccttgaatccaggaggttgaggctgcactgagccatgattatgccactgcactccagcctggacaacacggcaagaccctgtctcaaaaaacaggaaacaaaaaaaggcaggggtaaatttcagaaaagcagaagctacaaggaacattggaaatcagtgcatagaggttccacatttttttttgagatggagtcttgctcggttgcccaggctggagtgcagctgtgtgatcttggctcactgcaagctctgcctcccaggatcatgccattctcctgcctcagcctcccgagtggctgggactataggcacccaccaccacgcctggctaatttttttttttgtattttttgtagagatggggtttcaccgtgttggccaggatggtcttgatctgacctcatgatccgcccacattgcttcccaaagggctgggattacagccgtgagccaccgtgcccggcctccacattggttttgatctaaaagggtgggatatcttgaatcagggacttacaggttataggtagattcaaagatttttctggccgggtgtgggtcatgcttgtgatcccagcactttgggaggccaaggagagaggatcccttaaggccaagagtttgagaccagcctgcgaaacataacaagactctgtatctacacacacaaaattttttttaattagaggctgaggcaggagaattgcttgagcctgggtggttaagctgcagtgagctacgactgcaactgcattctggcctaagtaacagagcaaaagcctgtctcaaacaaaaacaaaaaaaccccaaatttgcaattagttaaggaagagaacctttgtttaaaaatttggggtccagtagaaaaatgttaactgcctagagggtgttactttctccaagctcctcaggaagaaacttagaacaaaggatgatggttataaagttcagtcattttcctgtcctctgaggtctatgccagcagattcatttggtggggttccgagtttctgagagacaacgcagagacatatgttaagaggttatctttagtttctatgaggaaagcaaacctattcagaacgcttaacttccttggctattgtcttaggctgctattaccttgttgcttttcaagttgctacttatttctcagagccagctaggtgcctggaattttccttgaagaaacacaggattttgctttatttccatgcttaggagtccccaagcccctaaaaagggggtctttgcatcatctcatttctacacagtcagcaaatacttcttattttgtttactcttctgtggttcaaacctctaagaggcttccatgatcactgccgctccaagcactcacacacattattctttaattctgtattcctgtagactcttatttgctccaattcagttgtgtaactgtcatgtatgctggcactatgtgcctgaccatccctattttcactggacattgtgggggttgtgactgagtaactttatattggattttctcacagagtatccaatagatgactgtcacatggaaacaatgaatttaggataagagatgttagtcctaagtcctatgttaaaccatttattcaacaaagcagattcttttagactgctttatttaattctctgttgcatttcccctagagtcagtctagaaacgattttactatatacaaacattatagcctctggctgtagggagatgataaacaggagaaaagtgtagacatttctaggtgccagtaagagaaagcagatagagggggtcatgaaaaaaaggtcttactacagtgatttgaaaagtggaattaagcttagccttacctgtagggctgagattatgattatgattatgattatttgagatagagtctcgctgtgtcgccctggctggagtgcggtggcatgatctcggctcgctgcaacctccgcctcccgggttctcctgccttagcctcctaggtggctgggattgcaggagcacgccaccacgccaggctggtttttttttttgtgtttttagtggggacagggtttcgccatgttggtcgggctggtctcgaactcctgacctcgtgatccgcccgccttggcctcctagggtgctgggattataggtgtgagccactgcgcctgactgattaggattattaaatataaaatgggggctctacattaagattagaatatgctctaataacgaggtcaaggagacaataagattaacacaaggatggctaggataaagattaggattataatagaattaatgttgctgttctgtgctgatgccaggataaatgttgaatcaaaatcattttatgttggaactagaaataaaactaagattttccttttt

SEQ ID NO: 820 - DNA, 3321 bp, Homo sapiens
ctattgtgtctgtacttcatgaccactccatctacacacttggtgcccgggatgacgatggctgtgagtctcccatggtgactgccaccggtgaggggcaggagggctgtctgcaggcagatgcgatggagcccagctcctgtcacgtctgctgccaccgacctgggcgtcccacccctcctgggaggaaggaagcctctcttccatcttgagagacctgccaggcagggcctagtgcccccactcagcaccccgccaccaaaacaggctccacatgctcatggcacaacaccgccctctgtcctctcccaccctccgccatccctgtcgccgcatgtgctgctgtctccatgccaccagttccaagtgctccatggtcacacatgttcacatgtgcacatacatgcgttggggctttctctgccacactgctcaagcctcacactaatgctgcctgtgtatgccctacctcccctaggtatgcgagaccacccacccatccccatcaccgacctggcggacaacatcgagcgcctcaaagccaacgatggcctcaagttctcccaggagtatgagtccatcgaccctggacagcagttcacgtgggagaattcaaacctggaggtgaacaagcccaagaaccgctatgcgaatgtcatcgcctacgaccactctcgagtcatccttacctctatcgatggcgtccccgggagtgactacatcaatgccaactacatcgatggctaccgcaagcagaatgcctacatcgccacgcagggccccctgcccgagaccatgggtgatttctggaggatggtgtgggaacagcgcacggccactgtggtcatgatgacacggctggaggagaagtcccgggtaaaatgtgatcagtactggccagcccgtggcaccgagacctgtggccttattcaggtgaccctgttggacacagtggagctggccacatacactgtgcgcaccttcgcactccacaagagtggctccagtgagaagcgcgagctgcgtcagtttcagttcatggcctggccagaccatggagttcctgagtacccaactcccatcctggccttcctacgacgggtcaaggcctgcaaccccctagacgcagggcccatggtggtgcactgcagcgcgggcgtgggccgcaccggctgcttcatcgtgattgatgccatgttggagcggatgaagcacgagaagacggtggacatctatggccacgtgacctgcatgcgatcacagaggaactacatggtgcagacggaggaccagtacgtgttcatccatgaggcgctgctggaggctgccacgtgcggccacacagaggtgcctgcccgcaacctgtatgcccacatccagaagctgggccaagtgcctccaggggagagtgtgaccgccatggagctcgagttcaagttgctggccagctccaaggcccacacgtcccgcttcatcagcgccaacctgccctgcaacaagttcaagaaccggctggtgaacatcatgccctacgaattgacccgtgtgtgtctgcagcccatccgtggtgtggagggctctgactacatcaatgccagcttcctggatggttatagacagcagaaggcctacatagctacacaggggcctctggcagagagcaccgaggacttctggcgcatgctatgggagcacaattccaccatcatcgtcatgctgaccaagcttcgggagatgggcagggtgagcccaccctttcccccagggcccctgtcatacctgggagaacaccagccacccttgggggagctgccgcctatgttactgtctcctttgacaccccagctgcttgtcagcatggcctcaggcgcccgttattactacctgaggcatctgtcccagaatcctgtgaagcctggcacccctcccctattccttctcacctgattatgggggcccgaccctctgtccacaggagaaatgccaccagtactggccagcagagcgctctgctcgctaccagtactttgttgttgacccgatggctgagtacaacatgccccagtatatcctgcgtgagttcaaggtcacggatgcccgggatgggcagtcaaggacaatccggcagttccagttcacagactggccagagcagggcgtgcccaagacaggcgagggattcattgacttcatcgggcaggtgcataagaccaaggagcagtttggacaggatgggcctatcacggtgcactgcagtgctggcgtgggccgcaccggggtgttcatcactctgagcatcgtcctggagcgcatgcgctacgagggcgtggtcgacatgtttcagaccgtgaagaccctgcgtacacagcgtcctgccatggtgcagacagaggaccagtatcagctgtgctaccgtgcggccctggagtacctcggcagctttgaccactatgcaacgtaactaccgctcccctctcctccgccacccccgccgtggggctccggaggggacccagctcctctgagccataccgaccatcgtccagccctcctacgcagatgctgtcactggcagagcacagcccacggggatcacagcgtttcaggaacgttgccacaccaatcagagagcctagaacatccctgggcaagtggatggcccagcaggcaggcactgtggcccttctgtccaccagacccacctggagcccgcttcaagctctctgttgcgctcccgcatttctcatgcttcttctcatggggtggggttggggcaaagcctcctttttaatacattaagtggggtagactgagggattttagcctcttccctctgatttttcctttcgcgaatccgtatctgcagaatgggccactgtaggggttggggtttattttgttttgtttttttttttcttgagttcactttggatccttattttgtatgacttctgctgaaggacagaacattgccttcctcgtgcagagctggggctgccagcctgagcggaggctcggccgtgggccgggaggcagtgctgatccggctgctcctccagcccttcagacgagatcctgtttcagctaaatgcagggaaactcaatgtttttttaagttttgttttccctttaaagcctttttttaggccacattgacagtggtgggcggggagaagatagggaacactcatccctggtcgtctatcccagtgtgtgtttaacattcacagcccagaaccacagatgtgtctgggagagcctggcaaggcattcctcatcaccatcgtgtttgcaaaggttaaaacaaaaacaaaaaaccac

SEQ ID NO: 821 - DNA, 3755 bp, Homo sapiens
ttttaaattcaaatagacataacacaaaacatactggaaagaaacctttcaaatgtaaaaaatgtggcaaatcattttgcatgcttttacacctatgtcagcataaaagaattcatattagagagaattcttaccgatgtgaagaatgtggcaaagcctttatctggttttcaacccttactagacacaggagagttcatactggagagaaatcctacaaatatgaatgtggcaaatcttttaaccaggactcaaaccttactacacataagagaattcatactggacagaaaccctacaaatgtgaagaatgtggcacatctttctaccaattctcataccttactaggcataagctaattcatactagagagaaaccctataaatgtgaacaatatggcaaaacttttaaccaatcttcaacccttactggacataagataattcataatggagaaaaaccctataaatttgaagaatgtggcaaagcctttagtattttctcaacccctactaaacataagataattcacactgaagagaaatcccacagatgtgaagaatattgcaaagcttataaggagtcctcacaccttactacacataaaagaattcatactggagagaaaccctacaaatgtgaagaatgtggcaaagcctttagtattttctcaacccttactaaacataagataattcacactgaagagaaatcccacagatgtgaagaatgtggcaaagcttataaggagtcttcacaccttactacacataaaagaattcatactggagagaaaccctacaaatgtgaagaatgtggcaaaacctttagtgtattctcaattcttactaaacataaaataattcatacagaagagaaaccctacaaatgtgaagaatgtggcaaagcttttaaacgatcttcaacccttactaaacataggataattcatactgaagagaaaccctacaaatgtgaagaatgtggcaaagcttttaaccaatcttcaacccttagtatacataaaataattcatactggagaaaaaccctacaaatgtgaagaatgtggcaaagcttttaaacgatcttcaacccttactatacataaaatgattcacactggagaaaaaccctacaaatgtgaagaatgtggcaaagcttttaatcggtcctcacaccttactacacataagagaattcatactggacacaaaccctacaaatgtaaagaatgtggcaaatcctttagtgtattctcaacccttactaaacacaagataattcatactgataagaaaccctacaaatgtgaagaatgtggcaaagcttttaaccgatcttcaatccttagtatacataagaaaattcatactggagaaaaaccctacaaatgtgaagaatgtggcaaagcttttaagcggtcctcacacctcgctgggcacaagcaaattcatagtgtacaaaaaccctacaaatgtgaagaatgtggcaaagcctttagtatattctcaacccttactaaatataagataattcatactgaagagaaaccctacaaatgtgaaaaatgtggcaaaactttctaccgattctcaaaccttaatacgcataagataattcatactggagagaaaccttgcaaatgtgaagaatgtggcaaagcttttaaccattcctcaaaccttattaaacataagctaattcatactggagacaaaccctacaaatgtgaagcatgtggcaaagcttttaggcggtcttcacatcttagtagacataagataattcatattggaattcatactgaagagactgtacaaaagtgaagaatgtggcaaaggcctttactgctcctattcccttactaaagaatgtggcaaagcttttcaccagtactttacccttaatacacataagataattaatgctggagagaaaccctacaaatgtgaagaatgtggcaaagatttctattgattctcataccttactaaatataagataattcatattggagagaaattctacagatgtgaagaatgtggcaaaggctttaattagttctcatcccttactaaacataagagaattcataccatagagaaatcctacaaatatgaagaatgtgacaaagcttttaaccacttctcaaccctgcctacacgtaagataattcatactggaaggaaaccctacaaatatgaggaatgtctcaaagctttttactgattcttataccttactaaacataaaataattcataaaggagataaattatacaaatgtgaagaatgtggcaaagcttttaacaaatcctcatccattagtaaacataagataattcttactgcagagaaactctacaaaccagtaagatgtgacagtgcttctgacaacatctcaaacttttctaatcataaaagaaatcatattggtgagaaatcctagaaatgtggagaatgtaacaaagtatttaaatggttgtcacacttgattataggtaatattcatattggaaaaatttcctacaagtaagaacaatgtggcaaagtttttaactaatacaccttattgcacagaaaatcatttatatttgagaaaaattgtagaaatatagactgtgaaaaagacgtcaatatctgctcacatcttactaaacaccagagagttcatgcttaataaaagcatgataagtgcaattactgccaaaagatctttcagaaaatattatcctttaaagtgaaggagagtatttatattaaagatgaacattacaaccataaagagggttgaagtacctttacttgtatcagatcttattgtccacattttgtactacagaaaaactctgaagaggtcactcaaactttgttcaacatcagggaatttatattggagagctgtcttgcaaatgtaataaatttgggaaaacaaattttcaaaaactacagcttagaaaacaccagagtttatacgaaaatatattttcaaaggtgtagtaaaaataaaaaaaattttaatccaaatttgtctatgtaaataccagaatttatagtagaaatatatgaggaagcgacacttcgaatattctactaaatgagagttctgagtatagaaaataaaactaaagttggtagaaaaattatttgtatataatgttaagaggagtaaaagattttttgtagaataataactatattcagattatactttgtttcttgaaaaaattacagattttttgaaaagcaaatgatgtaactcaactcattattttctgctgtttcttcattcttattcacttgtgaaagcttgtgatcatttgttgctgcatcagaggtatgagagattcttcttcattagatgggcattatttatgatcttttctatggatgagtaagaatattaaaatgtaagatgcatggtgaaaatctaagtggagaggttctttgtggttaacttatactattgagtgatgcacaaggtaggtgttaagagtaatattcttttgcattatgagaaaactagtatattattcatatattttactaattgtacttttttattatactttaagttttagggtacatgtgcacaatgtgcaggttagttacatatgtatacatgtgccatgctggtgcgctgcacccactaactcgtcatctagcattgggtatatctcccaatgctatccgtcccccctccccccaattgtacttttatataataaaatgcagtacattttaaaaaatttt

SEQ ID NO: 822 - DNA, 3900 bp, Homo sapiens
ttgcatttgtgtttgattactaacactttccgaaaattatcaaaatcaaagttttttaagactgaaaatccagttataattgtaaagtcaggtggttttagaagcatggtagaaatccaccccatcttttgctccatttagtgtcctcttgataaggtccgtagtgaatctgcatcatagtgacatagtaacaaacatctctatgatgtaaattcactgtagagcttactgaggattccttctttccctataagatagtttgttctttgcagacatgatcttgtgttgtcctcattttacagataaagaaactgaggctcagagaggctacgttaatcacggtcacacacaaataggacgtggagctcccatctgtggagctctgaagccatgcttatggccatcttcaaaacagggatctgcaggctgggaacatgatgtggctggctttacacctcccacagttgccctccaatctttcctgaagaccagtgggactgctgaggacaccaagaacatgcccccagggtcaatccacaggcccaaggtaccactcaggcaggcagcaagaagcagttaatggtcatgccccatagaggcgcagtggaagtccctggcaaatacatgttgtattggaagtaattatttccacaacaaagttcagagatccagctaatattcaaagtagggtcaacctgaactaggaccttcaaggtaagtaaaatgagaatcaccaccaccttttactaatcaccctctatgtgtgccaagctctttcatgtatatctagtaagctcagcaactccaagaggtaggtgggtttagccctattttatatataaggacatggagattcagaaagggttgtaaaatacttcaagtcctacagttagaaagtggaggtgagactcaatctacttcagtctgatgtgagagcccatgccaatccaagggtgaatcctcagaaataaagtttaccaaaatcaaagcagtaaaacgataatgaaaacactgagtccagccaggctttaagaagactctgctgagtctctgagatgatctagaagggctttgaaccaggttaaatgtattcattcatccactccttccaacattcctgaattcagcagacttaaggagcattttcatgggtgctaggaatataaagatgaattccgtggggtcccttttcacaatctggtgggaagatagactaagagtaatgataataacagctaacacttattgggctctttctgtatatgggctggtgctaagcgtttcaattaatcctcacaccagctctctggggcaggttctgccgttatccctcattctctagatgaggaaactagagacaccaagactccagagctaccagttagagccagaattccaacccagtctaattctagaacttaacactgagctgcctcccaattataatcagcagcaggccacttccccagcatttggcaaggtggaagcaatttttcattcatgatcttttgatactcagtgtagataagcccagcattaactttcatgaccaatttacagatgaggtccacgtggctctgagagtatcaatgctacagggtgtcagggtcattcagcaaaaaagcctgaacttaaacccacccactctggctgaaaagcatatgcttttcccaccaggcactactgccccctaaatacagttctagtaaatgcataatacaggaagtggaagttggaagatcaaattgatacaagaaggggtgtataatggttgcctgtgtttgacaaaagcatatataagtatctcatgatttgcagaagatagattgctaaagaaggcaggcatgccaaatttgtgaaagtctaatcatatttgaaatgcccagtgcactttgtgtgtattaacccctttaatcttcataaccacccatcagaggtgggcactgtcataattcctcactggcagatgcagcaccatccacataaagacttgaaatcacccacccagggtcacacagccagctggtggaggagctgagattcaacccaggccatctggctgcaagccctggctcttggccatcaccctattgccttctaaagtactagtttctaatgagagcaggcagcttttctgggagctagctgtgggccatgcactgtgccagtgcttcatgtgcatggctcattcaccttcacaagagcctaaaagtaggtgttgttatccctgcttctcaaatgaaaatgtgtcttgaattcaagtctgtctgattctaatagcccatgtccttaacccctactcagcagtgcctcctttttttttgagaaatattgaagaaaatgttaaaagaatagaaatgtactaatttccctgccttcacccatgtcacatggagagtagtggactgtcttggacaggactctccatgaagacccacatggctttctgtcccagctcctggcaatgcctgccacagagtaggccctcaacagatatttgtggaatgagtgaactaaagtagataaaagcaggctgagacaaaatctgaaaatccctgggtggctttgagggctggaggacagacataccctgagcccatatgtttacaacacaggcatcatcacagcaaactgctcagatctccaccccagatggaaggcccagaccatggcaaggcactcttctcgacccctgcagctgtgcctgagctgaagcttctctgtggggcagacgtcttgaagaccttccagacccccaacctctggaaggatgcgcacatccaggaaatagtggagaagtttggcttggtgtgcgtgggccgagtaggtcacgacccaaaaggttacatcgcagaatctcccatcctacggatgcaccagcacaacattcacctggccaaggagcctgtgcagaatgagatcagtgccacatacatcaggcgagccttgggccaagggcagagcgtaaagtacctgattcccgatgctgtcatcacgtacatcaaggaccatggcctctacaccaagggcagtacctggaaaggcaaaagcacccagagcactgagggcaagacaagctagggaggggggactcagcacccacacctcctccaacaagctcctgctggggagagggctgttaaggtttctgttttactttggtttttgcttctccatttttcatttgctttatttctacagtgattctacttctgaggagtcttctgtcccaggaagagataccttctttacaggagaggaaaggtctaaatcacaaggatagacatttatcaaagaagttaaaatggtgtggcaggtcattaggattaggcagaatctctcagagctgctggacaaggaggtctacttattttgtgtggatggtaattatggcatgcacgctgaatgcagttctgagcatggcagcggcccctgagggtcagatcagaattgcccacaatgtgttttttaactaggaccaggtgcagcatgctagtcttgattggaaagatttgacaggatgctaattactgaacagtgggttttgtcaacgccctggtttcagaatatgaactgaggagtcaaacagttggaaacagcacattgctgatttacactggatcttgccttagaaaccattgtctgcctgcctaaccagcctttcataaaatttaaacaaaactctttctacgtagtgatcctcaagcaatatttttgatacagcaagtgtcaaacttgctatagcataaaagccggggctcctgatttccaggtttctaaaaaggaactgaggtaaaacagatgcctgaccgttttaaaggatctttttttaatgttttatgactgcctgtctgtttgaatactggcaaagggataaataataaattgacatcaaaaagt

SEQ ID NO: 823 - DNA, 3598 bp, Homo sapiens
gtttgcagttgcacagaggattacctgtcctcaggtcctgatacagaaacatctggttcgtcttctatcagttgttcttcctaacataaaatcagaagatacaccatgccttctgtctatagatctgtttcatgttttggtgggtgctgtgttagcattcccatccttgtattgggatgaccctgttgacctgcagccttcttcagttagttcttcctataaccacctttatctcttccatttgatcaccatggcacacatgcttcagacactacttacagtagacacaggcctaccccttgctcaggttcaagaagacagtgaagaggctcattccgcatcttctttctttgcagaaatttctcaatatacaagtggctccattgggtgtgatattcctggctggtatttgtgggtctcactgaagaatggcatcaccccttatcttcgctgtgctgcattgtttttccactatttacttggggtaactccgcctgaggaactgcataccaattctgcagaaggagagtacagtgcactctgtagctatctatctttacctacaaatttgttcctgctcttccaggaatattgggatactgtaaggcccttgctccagaggtggtgtgcagatcctgccttactaaactgtttgaagcaaaaaaacaccgtggtcaggtaccctagaaaaagaaatagtttgatagagcttcctgatgactatagctgcctcctgaatcaagcttctcatttcaggtgcccacggtctgcagatgatgagcgaaagcatcctgtcctctgccttttctgtggggctatactatgttctcagaacatttgctgccaggaaattgtgaacggggaagaggttggagcttgcatttttcacgcacttcactgtggagccggagtctgcattttcctaaaaatcagagaatgccgagtggtcctggttgaaggtaaagccagaggctgtgcctatccagctccttacttggatgaatatggagaaacagaccctggcctgaagaggggcaacccccttcatttatctcgtgagcggtatcggaagctccatttggtctggcaacaacactgcattatagaagagattgctaggagccaagagactaatcagatgttatttggattcaactggcagttactgtgagctccaactctgcctcaagacaatcacaaatgacgacagtagtaaaggctgattcaaaattatggaaaactttctgagggctgggaaagtattggagggtcttttgctccatgtccaggttcacttacatcaataaaatatttcttaatggagtattgctttcaattagcaaacatatgcttcacaggaaaaaaggacatagatcaatctgttttatgtgctagtatttccaggaatttattccccttcataatttgtctcatttcattttatttcatccacttggtagatgaagtcacgtcaaacagttgtagacattttatatgttggttaactcttctgcaattttgtatttggtgttttccccccaagtttagttcaactgacattggatcactgacaaaattctaataatctgtgatagtcttccttgcagttaaagaagaattgcagaaaccatgcaatatacttgggaaagattccaaaaataaattttttattatttctcttttaaggaaatacccctaatgtgccacctgctgctatcaccacaaattaaactcaatctctatgtggacagaggatgatttctgccaatatggaaaagcttttttctcactgtaggcctcaagaaaagttagggcaatgtatttgttattcattcctgacggtacaaagagcttgcagttctcacctctgactaccagtagctttgttgagttttgaaataatacttgacattttccaaaggcaaatctcattctgcaaggagattgtggcaccatcctgtttgactctcagaaacctcttgtaattctgatgtaaaaactgtagaatgaagatgagaaaattctcgcaatgagtggatcatgacaactgtaaattagaacaatcagatttaaaccaattccgcagtcttctatatctttgtaaaagacaaatccttgatgttgtctgtgtgcaaccttttcataaactctggttttatgactagtacaaaccaccaaaaaagccatgtgatcaatagtctgtgtcctgttataacatgctgtggttgagccatcttgtttataaataatagagctctcctgaatttgtgcatagacttcttggttcctggcttttgttttttgtatcaagagattgtgatataaaacagcagaagataaatggaaaccttccattttaacttacgttgtttctggggtaatgttagaaccttgaaagatgcattcaaagactgtaccttattttgcccttggctattagtgtctcacatatgtgtgtaaatgttttcctaccttctttttgctcagcaaaggcaagcaagtaaaatatatttgctaagtgattagtgatgcacatttggggctagatttttttggtacttttatgtaaagaaaagtggattttgcagtaagggattggcatgagcaggcgtcagaatcacaatcatgattttctacttgaataattacaattcagaaggtatctggataaatagatacatgtctagtgaacaatttgtaacaataacaggtaaggatcaggaaattcagtattcagtttgtcagatttgccagaatgatgaaagtatttgaacatgtgtgtttgtttcttatataattgtattgagtggattgtttgactgggaaatctgggctagaataggaaacagaagatactgacttctaccctaatagatgggccccaatttagcaaagataaactgactttatttttagtcctttttatattaacttaataaattctggagttaggctctcaagaggacagagggactgtctggcaatggccagccagacctttactgccaaagaacccatttcatattgcgttccactgattgagattgattcagatttttgcactgtagatgagcgtatgtctcagtgctgccccaagccccagggatttctcattatgttcaaatgtcctagtgatttaccttaatcattgcaaacaattatgcttatgaagtttacttacaaacaagcaactgagtcactttattttctttagtgtagtatgtgaaggcactggttcaacaggatggctccagaactgtgtttttctaatgtttggtaaggggctagtgagaattttaatgatatggtgaagaaaaatatatctgtataattaatttattatattggtgtatgggctgtgagttcaccttttagtggtcatttgtcatttcataacaactatgcattttggttcactgtgatgatgatctatatttagtgactgcaacatgtttataccactgattcaaattccatccatgatgaagttatacaaataatgcatatattgataacttttattgcaaaaatgtaaatttaaaacttgtataatgttcttgtgctttttaaaataaaatatatgtgtatatttaaaaag

SEQ ID NO: 824 - DNA, 3810 bp, Homo sapiens
caagatgtgtgttagcttgctttgtagtgctggcggctgctgccccattcctcctttatggtttaaggactctgcatcgggcgcctggggtgagtggtcccgatgcactaccaggtagcaaatgcaccctcggggcagacctcaggccatggactctgggaggctgctgtggagggggtactgcaccgcacccctgctggaggatgggactcccccggcagctgctacccaccgagtgcactgtagctcagcagctgttgggccggctggcttgcagagtgctggggcgttagggtggtcactttccagctttgctaggcctggagtcctgtgcctgtcctggctttgctctgcctggctccctgtttatcctctgctagcccccccacacaccagctctggtttccatcttgttggagaggaacatgtccccctcactgtattagaaagtgtgaacaagaccgtgttccctataatattaggagctgtggcaggcttggtttctataggaaccctgaggtggcggcagggccaccacatccagcactctcagtgtgtgcgtagagcccattagggctggggtgacgtggcagagccggccatggaaggggctacacaccccttcttaaaggcgtgtccacactcctcagtgggcccttccagacccagacccagctgggcctgtgtcctgtgtccggcccagcctccctaacacagatgtttgtgtttcagctcccagaaggcaggattctgaagaccactccagcgatatgttcaactatgaaggtaaaactccaaagaggccaggtgcggtggctcacgcctgtaatcccagcgctttgggaggctgaggtgggcggatcgcgaggtcaggatatcgagaccatcctaacatggtgaagccctgtctctactaaaaatacgaaaaattagctggacgtggtggcatgcacctgtagtcccagctactcaggagactgaggcaggagaattgctcaaagcctgggaggcggagggtgcaatgagccaaggttgcgccactgcactccagcctgggcgacagagtgagactctgtctcaaaaaaaaaaaaaaaaaaaaaaaaaaaaaaaactccgaagaaacttatatatggggcaaaacatgtattcttagttgggtattgagagacacttgcggattttcactgaggaagttgtagagcagggctctcccctccccaggtggtggcagccccctgaggttggggtcaaggtgacaggccccacgtggatgccgccagcagtgggaaggaggctgcgcctgtggagatgtgcgttagaggcgtagcctggcacgtggctctgcaatttacattgtccctgaacctctcgccagcggcttggctgtgggcaagtgactgttgccccgcctcagagttcccatgtataaaatgaagggtcccagataggtctcgtagagactcagccactgcatgtaaaaggcctagaacagggcttggcagagagcagccttcaaagctccgaagccgtcacctggacccaaggagcagcgcgtcagagccgctgcactggtcttgggtgtaatttacaggcttctttaccagagagatgtttctccgtctgctggagccgcaagcctcctcaggcactttctggcttgcttcccctccttgcgggccctactaatttgtattccctgggctgtcttactcctagaatactgcaccgccaacgcagtcactgggccttgccgtgcatccttcccacgctggtactttgacgtggagaggaactcctgcaataacttcatctatggaggctgccggggcaataagaacagctaccgctctgaggaggcctgcatgctccgctgcttccgccagcaggagaatcctcccctgccccttggctcaaagggtaagtggccccttaccctcctcctgccatcagcctgcctcctcccttccttgactgagctcagccctgcccagctgtggtttacattatccttcactgtgaacatcatcttggcagaaagtcatgtttctgcgtgagaatggcgaggtggtggtttgtcccaccgttcagtgtacacagttggggctggagtgagtcagtcacaaggcaggccctgcccaggcggcgtgggtgactggggatgaggtcttcctgttgagcatttgaggactgctgcacacgggcctgaggctggcctgaggtgtggagggagcgctgctatgtggggcataagagttggtcacgggtgacaggacggaggaccacgggccagggtgtttcccaacacagtctggtctgagcgggaggccaggcctctggcctgtgtttctgagcttgagttgcaggtgataatgttggcacaaaagacctgccatgccagtctggcctctttctccacctgtttcccggtgaaggagccaggacctggcctgcgagtctgtcctgttctagcagtgaagcctggtttgccaggcacggggctgggaagcaagcagtctgggtctggagggtggccccaaaaaggccaactctgcagctccacagccacatgggggaggctgccacaggtcacactccttagccggatcccctcctgaagaaaagcatctgagctgaccagcgagactgcagtggggcagacactattaaatttgctggcacagctctgagtaccccctcgcttccaccctgacttcatcccgcagtagctctcagccctcccagcccctgcagggccacgtctttctctattgccggtcagcgtgtgtgtgcacaaagcccctaaggtttcatgtgtacacaccggtgctaagagttttttacacccttgtgcatctctcggcctggggctcctgtgcaggttgccctgagagttgggtttttagttcaaaaagaaggaacacagatgactactctgctggcgacacggccactctgctggcacgcacatagcatggcgcctccttttttgggggactctccttggtggcatctctggcaggctgtgtcctctccagctgcagttctggaccctgtctgggttggggaggggcatttggtcctcaggctgagcccacctggattccccaggcccttggtgagcgccactctggctgcaactccccttgcctggcccgtcctgaggcccctctctcgtcctcagtggtggttctggcggggctgttcgtgatggtgttgatcctcttcctgggagcctccatggtctacctgatccgggtggcacggaggaaccaggagcgtgccctgcgcaccgtctggagctccggagatgacaaggagcagctggtgaagaacacatatgtcctgtgaccgccctgtcgccaagaggactggggaagggaggggagactatgtgtgagctttttttaaatagagggattgactcggatttgagtgatcattagggctgaggtctgtttctctgggaggtaggacggctgcttcctggtctggcagggatgggtttgctttggaaatcctctaggaggctcctcctcgcatggcctgcagtctggcagcagccccgagttgtttcctcgctgatcgatttctttcctccaggtagagttttctttgcttatgttgaattccattgcctcttttctcatcacagaagtgatgttggaatcgtttcttttgtttgtctgatttatggtttttttaagtataaacaaaagttttttattagcattctgaaagaaggaaagtaaaatgtacaagtttaataaaaaggggccttcccctttagaataaatttcagcatgtgctttc

SEQ ID NO: 825 - DNA, 3439 bp, Homo sapiens
tccgcgccgcatcgctcgggtgcagcgcagctcagcgcagcgctgcggcctttcggcagccgaacggccgcggcagcatttcctttacaggctgcacttccttccctgctgccagccaggagtttcggaaggtttcctggaggaagtgtgatacagcagttcaggacaaagaggtgtgggcaggccactgggccagctggtaacatcatggcagagaaagtgaacaacttcccaccattgcccaaattcatcccgctgaagccatgtttctaccaagacttcgaggcagatattcctccccagcatgtcagcatgaccaagcgcctctactacctctggatgttgaacagcgtcacgctggccgtgaacctggtgggctgtctcgcgtggctgatcggaggcgggggagccaccaactttggcctcgcctttctctggctcatcctcttcacaccctgctcctacgtctgctggtttcggcccatttacaaggccttcaagactgacagctccttcagtttcatggcattcttctttaccttcatggctcagttggtcatcagcatcatccaggccgtgggcatcccaggctggggcgtctgcggctggattgctaccatctccttcttcggaacgaacattggctcggcggtggtgatgctaattcccactgtcatgttcacagtgatggccgtcttttccttcatcgccctcagcatggttcataaattttaccggggaagtggggggagtttcagcaaagctcaggaggagtggaccacaggggcctggaagaatccacatgtgcagcaggcagcccagaacgcagccatgggggcagcccagggtgccatgaatcagcctcagactcagtattccgccacccccaattacacgtactccaatgagatgtgaaccagccacgcctaccaggtggcagagctggggccattgggacagggggctcaagccacatcgtcatttgtggttaccaagcagggttcccccttcccttttctccttccctactttgtacaaaggaccagagttatatatatatatatatgtatatgtctgtaccccagcccccacctttcagattctgctcttggcactcagctgtgggctgcacgtggagctgtcccgtgcggtagtagctgtgtctgtgtcccctcgtgaaatagtgtgcagtggaggtctcttgtggtgctagatgtgtgtttagagctaaaccagcccccacccccaccctccacctgcccctcttgcctctggcccctctgaccctggcccagggacccctcacggggccaggggaggcatagcagaaagactggccccttcctagggttatgagctggaactgtttctactttcagtcttcctgggaagtaacagtacttagcactcttggtggtgggtgggagggtgggtacaggccagggatattcccttgctcttttgatccctccaggcctcgcctccttcagcctcctcctccctcatctgttccctgatgtcacattccctgtgcaatcttcccttgcccatggtctgtctatctctttcctatgtggcttttctttgtcttccccaaggctgagtgtcccagttttatctgctcctgagactgagcccagatccccaaatctaatctgatttacagttcaaggaagctgatggggagctgggccttacccctgatgtaggaggggcacacagctgggggtgcagagcccacctgggtacctgacccccaggggatgaaaatgcaaggatgagtctgcttgggcctgagagtttgatctgcaggggcaggctcatcttttctctcccctgccttctcctccttctctccccagagcccccttgagcccctctgcctatgtccctctgcctcctccccatgcccccagttgctgtggcttgattctgctaccctgaccccaccatgtgccaggtggcatctgccttactgccttccctgaggagctgggacatgctgggcagttgtcagatgtaaaggcacagctggagcagagggcatgtcagtaatgattggtccctggggaaggtctggctggctccagcacagtgaggcatttaggtatctctcggtgaccgttggattcctggaagcagtagctgttctgtttggatctggtaggacagggctcagagggctaggcacggagggaaggtcagaggagaaggcaggcagggcccagtgagaggggagcatgccttcccccaccctggcttgctcttggtcacagggcggttctgggcacttgaactcagggcccaagcagaagcacaggcccagtcctggctgcaagcacaatagcctgaatgggatttcaggttaggcagggtgggaggggaggctctctggctttagttttgttttgttttccaaatcaaggtaacttgctcccttctgcctacaggccttggtcttggcttgtcctcacccagtcggaactccctaccactttcaggagagtggttttaggcccgtggggctgttctgttccaagcagtgtgagaacatggctggtagaggctctagctgtgtgcggggcctgaaggggagtgggttctcgcccaaagagcatctgcccatttcccaccttcccttctcccaccagaagcttgcctgagctgtttggacaaaaatccaaaccccacttggctactctggcctggcttcagcttggaacccaatacctaggcttacaggccatcctgagccaggggcctctggaaattctcttcctgatggtcctttaggtttgggcacaaaatataattgcctctcccctctcccattttctctcttgggagcaatggtcacagtccctggtacctgaaaaggtacctaggtctaggcccttcttccctttcccttcctctcccctaccccagaactttggctccctttcccttctctctctggtagctccaggaggcctgtgatccagctccctgcctagcatccatgacctgttggatgttacctccaatcagtttcctgtcctacctgcctctttggcttggacctatatggccatgctctggctctacccttgggaagcctgatcccggtgtgtggcccagcttgttcaggccctgggatgctgcatctccaggcaactatgcactttcccggggagagagccagtatgagaagtgggggcagggcacacattcatctttgtaggaaggtctggcctggggtcgggtgaaggagggcccaggtcagttctggggtcccagtgacctgctttgccattctcctggtgccgctgctgctccctgtttctggagctggatgttccccagctggcagttgagctgcctgagccaatgtgtctgtctttggtaactgagtgaaccataataaaggggaacatttggccctgtgaaaaaaaaaaag

SEQ ID NO: 826 - DNA, 4047 bp, Homo sapiens
aagccgcaggggccgccgtcgtctcctccgcgtccccgcccgccggctgctgtcggaggttgacaggtcgaggcggggaggcggcggcggcggctgcagagccaggcgcccaagacggagaccccatggggaacgctccgagtcacagcagtgaagacgaagcggcagctgccggtggcgagggctggggcccacaccaggactgggccgcggcctcgggcacgacccccggcccgggcgtcgcggctccagcgctaccacccgccgcggcgctgctggagccggccaggctgcgagaggctgctgcagcgttgctgcccacacccccctgcgagtcgctggtgtcgaggcatcgcggcgcgttgtttcgctggctggaagagcggctgggccgcggcgaagagtctgtcactctggagcagttccgggagctgctggaggctcgcggcgccggctgctctagcgagcagttcgaggaggcctttgcccagtttgatgctgagggtgatgggacagttgatgccgagaacatgttggaggccctcaagaattccagtggagctaatcttcagggggagctgagccacatcatcagacaactacaggcctgctctctggttccaggtttcacagacatattttcagagtcgaaggagggccttgatattcactcgtcaatgatactgcgcttcctgcaccgcaatcggctctccagcgcggtgatgccctacccgatgctggagcactgcaataacatgtgcaccatgcggtcttccgtcctgaaggagtctctggatcagctggtacaaaaggaaaaggaaagccctggagatctaactagaagtccagagatggataaactcaagtcagtagcaaagtgctatgcttatatagaaacatcctccaactcggcagacattgacaagatgacaaatggagaaacctcatcctactggcagtcagatggcagtgcctgttcacactggattcgtttaaaaatgaagccagatgttgtgcttaggcacctgtccattgcagtggctgccactgaccagagctacatgccacagcaggtgacagtagctgtagggaggaatgccagcgatcttcaggaagtccgagatgtgcacatccccagcaatgtcactggctatgtgacgctgctggaaaatgccaacgtcagtcagctctatgtccagattaacataaagcgttgtcttagcgatggctgcgacactagaattcatggtctcagggctgttggctttcagagagttaagaagtctggggtctcagtctcagatgcttctgcaatatggtattggtctctgctgacatctctggtgacggcttctatggagacaaatcccgcctttgtccagacagtgctgcacaatactcagaaggcgctgcggcacatgcctccactctctctctcaccaggatctacagatttctcaactttcctctcccctaatgtgctggaagaagtggacagtttcctcataaggataactagctgctgttctaccccagaggtagaactgactcttctggcttttgctctcgcaagaggaagtgttgccaaagtcatgagctctctatgcaccatcactgaccatctggacacgcagtatgatgcctcatccctcatcttgtccatggcgtcagtcagacagaacctgctcctcaaatatggtaaacctctccagttgactcttcaggcatgtgatgtcaaaggaaaagaagataagtctggacccgaaaacctccttgttgaaccgtggacaagggatggttttcttacggaaactggaaaaaccagagccagcactattttctctaccggaactgaatctgccttccaagttacacagataagaattatggttcgacgtggtggcattggtgcccagtgtgggttggtgtttgcctataactcatcttcagataaattttgtgcggaagaacacttcaaaaggtttgaaaaatatgacaaatggaagcttcaggagctcaggcaatttgtaaaaagcaggattggttgctcatctgatgaccttggagaggatgatcctattggctggtttgaactggaagaagaatgggatgaagcagatgtgaagctgcaacagtgcagagttgccaaatatttgatggtgaagttcctctgcacccgtcaggagtcagcagagcgcttgggagtgcaaggcttgaccatcagtgggtacctccggcctgcaagagcagaagcagaacagagcgtcacctgtgcacactgcagaaaggacacagaggagagtgtctgtggggccacgttgctcctcaggacccttcagtttatccagcagctcgcccatgacctggtgcagcagaaggaaagtggcttaaaatataaatcttttctggacttcgcgggtcttgatttgcagatcttctggaatttttacagtaaattaaagcaaaacccgagggaagaatgcgtctctgcccaaaccctgcttctgcagctactccagagctgcttctctgtgctgcagggagatgtactggctgcttctgaggaggaaaaggctccaatccaaagccctaaaggagtagaggctgccaaggagctgtacacacacttgtgtgatgtggtggacaaggtggatggagactctgtgcccatggagatactaaaacaagaagtcaggaatacccttctcaatggggctgccatcttctttcctaatcgacagacccgacggaaccatctcttcaccatgatgaagaatgtcaccgagcaggagcacaagcagtccctgcagctcactttccgttcactgtgcacgtattttagtgacaaggatccaggcggccttcttcttttacctgagaagaacgacctggccaagatgaacatcagtgaagtcctggcggtcatggacactctcgtctctgttgctgctcgagagtgcgagctgttaatgctcagtggggccccaggggaggtgggctctgtgctcttctccctgttctggtccgtccaaggcagcctgctatcctggtgctacctgcagctgaagagcacggactctggagccaaagatcttgccgtggaccttattgaaaaatatgtgggccagtttctggcaagcatgagagcgattttggaatcccttttctcacagtacagtggaaaaaccatagtagaaagattatgtaactcagtgttttcaatggcagctcgtcaactggttatcttcctgctggacttctgcactttagacatcccacactgcgtgctcttgagagagttcagcgtcctcacagaactcctgaagaagctctgtagtggccccgaaggaggactgaggaaggtaactcgagtcagcacttgagccgccccgtgttctctctcaggagtgatgggacacacttagtgaagtggaccacggactgcagataggcacagctgagcagcctctagaaggctcccttgattttatcagtgggcttgccaacaagggtgaatgtcagtccaagtcgatgtggcctggtcagcattagaaaggagacgcagaggccgggcgcagtggctcacgcttgtaatcccagcactttgggaggccgaggcgggcggatcacgaggtcaggagatcgagaccatcctggctaacacggtgaaaccccgtctctactaaaaatacaaaaaaaattagccgggcgtgatggtgggcgcctgtagtcccagctactcgggaggctgaggcaggagaatggcgtgaacccgggaggcggagcttgcagtgagccgagattgcgccactgcactcccgcctgggccacagagcgagactccgtctcaaaaaaaaaaaagaaaggagacgcagaaaaagctgtagagatgaatctcatcattttatagttgatgaagttatataaaaaccatgtaagtgagtgacaaaattgaagtctagaagagaaaatgtatgttgaaaggcaaattacattttgtctttagaagaaatttctcccttacttaattatacatacataacgttt

SEQ ID NO: 827 - DNA, 2485 bp, Homo sapiens
agttttgtgtgttgtacttggagcttagtcattgtcatacgtagcaggacctgattaagaaggctgtgccgcctctaagccttgctagattgtagccactagcaaccaggctgcaataatttccctttgatgacatcatccactgtggaagaacccagttgcttcagcgagtcgaactacagttttaacctcatcaaatatggcatctcccttgcttgctacagcagggatggaagaaatgtcactttctttttaagctagcaagctttttctttttctttttcttcttctatttaaaaattctaatcatggatgcttcttccgacccttatttgccttatgacgggggaggagacaatattcccctgagggaattacataaaagaggaactcattatacaatgacaaatggaggcagcattaacagttctacacatttactggatcttttggatgaaccaattccaggtgttggtacatatgatgatttccatactattgattgggtgcgagaaaaatgtaaagacagagaaaggcatagacggatcaacagcaaaaagaaagaatcagcatgggaaatgacaaaaagtttgtatgatgcgtggtcaggatggctagtagtaacactaacaggattggcatcaggggcactggccggattaatagacattgctgccgattggatgactgacctaaaggagggcatttgccttagtgcgttgtggtacaaccacgaacagtgctgttggggatctaatgaaacaacatttgaagagagggataaatgtccacagtggaaaacatgggcagaattaatcataggtcaagcagagggtcctggttcttatatcatgaactacataatgtacatcttctgggccttgagttttgcctttcttgcagtttccctggtaaaggtatttgctccatatgcctgtggctctggaattccagagattaaaactattttaagtggattcatcatcagaggttacttgggaaaatggactttaatgattaaaaccatcacattagtcctggctgtggcatcaggtttgagtttaggaaaagaaggtcccctggtacatgttgcctgttgctgcggaaatatcttttcctacctctttccaaagtatagcacaaacgaagctaaaaaaagggaggtgctatcagctgcctcagctgcaggggtttctgtagcttttggtgcaccaattggaggagttctttttagcctggaagaggttagctattattttcctctcaaaactttatggagatcattttttgctgctttagtggctgcatttgttttgaggtccatcaatccatttggtaacagccgtctggtccttttttatgtggagtatcatacaccatggtacctttttgaactgtttccttttattcttctaggggtatttggagggctttggggagcctttttcattagggcaaatattgcctggtgtcgtcgacgcaagtccacgaaatttggaaagtatcccgttctggaagtcattattgttgcagccattactgctgtgatagccttccctaatccatacactaggctaaacaccagtgaactgatcaaagagctttttacagactgtggtcccctggaatcctcttctctttgtgactacagaaatgacatgaatgccagtaaaattgtcgatgacattcctgatcgtccagcaggcattggagtatattcagctatatggcagttatgcctggcactcatatttaaaatcataatgacagtattcacttttggcatcaaggttccatcaggcttgttcatccccagcatggccattggagcgatcgcaggaaggattgtggggattgcggtggagcagcttgcctactatcaccacgactggtttatctttaaggagtggtgtgaggtcggggctgattgcattacacctggcctttatgccatggttggtgctgctgcatgcttaggtggtgtgacaagaatgactgtctccctggtggttattgtttttgagcttactggaggcttggaatatattgttccccttatggctgcagtcatgaccagtaaatgggttggagatgcctttggcagggaaggcatttatgaagcacacatccgattaaatggataccctttcttggatgcaaaagaagaattcactcataccaccctggctgctgacgttatgagacctcgaaggaatgatcctcccttagctgtcctgacacaggacaatatgacagtggatgatatagaaaacatgattaatgaaaccagctacaatggatttcctgtcataatgtcaaaagaatctcagagattagtgggatttgccctcagaagagacctgacaattgcaatagaaagtgccaggaaaaaacaagaaggtatcgttggcagttctcgggtgtgttttgcacagcacaccccatctcttccagcagaaagtcctcggccattgaagcttcgaag

SEQ ID NO: 828 - DNA, 3162 bp, Homo sapiens
tagagggcacctgcagcattttaagtgtaagagtgacaagatttgccatttgttttagaacgttccctgctgctgattgtggagggaggtctgttgcagagacttagggcggagacagtggtggacaggatgagtggtgggctcaggatggccatgagacgatgatattggagaaatattagacctcctgggttttttaactggatgtcaagtgaaagcgagggtgataacgacccctccccgtttccagtttgggtgagtgagggggtagtgctgctcactgggaatgggtcctcatgcgtgggcatgtttgggagggaaaatgctgagctccacattggacaaattgaatggattgtgcctgtgagcctctcagcaggagatgccagcatacccacctggaatgatggaccatggaccgggggagctatggagtcttgggtgggcctgcttagccaacccaaggtgggttgggtaagcagagcatctagcagagccttgtggacactgacagttcaggggcaggctgcggaaggcgttggaggagatggtgggggagggatggcaggggcgcctgaggggcaccatctgggaagctggggaggacatatttccagggaaggaggaggatgagccaagtgcagtagagaggttcttgtaaaataataactggtgagacaataagtcttaggacaagacttaggggtctgccccctaatcctacatggaaatcctagtgatgccttccttggcaagaaggtccctggtagccttggcagggtagcttttgggatatgatagggacagaggccagagatatgtgggcagaaagtgaagaagaacaagacctggggactcttgctcttccaaagtggggctttggtataggctgaggaggtgatgccaggagagtggaccaggagacgagggcagcagggtcaggagaggagggaggagagccagcggaagggacatctcttgctgtaacaggagcaggaggggaatggatgtagataacgatgttcagtgggttaagggggattacctttaattctctcaatacacagtgaagggcctgggttgagtaggggactcaggagaacagtggcggtttggaagtatcccagggcatggggctgcctaggggctttatggaagtcaaagctttagaggagtcagagagggaggtgccagccacacgaggctctgttggactgaggctgaagcctgtgggtatgttccagcatgctcagcttggtggctgctccagtcccactccgcacccaggatccacaggccacagctctgaccagagactgggcattgccagacagtgaggaggaaggagaggtgtttatggatcagggacgggagtcctagggatgataagccctgggctccagctgggaactatcagagtctgggggtgtcaggcaagctcggaggactgagagggaggccaccaagccctgtgagagagaaggtggaggtgaggacttgagaacagtggaaagaaggcagcctctgagggccccagggtggagcagatctgagtgatgaaaatccccttgggaccctgagagtgaggggaaggtcacggaagccgagagatccaggaatgtgaggtcagaggctgacctggttgtccacgcggatgttcgaaactcccaggatggagagaaaaacagagcaggaggaatgaggaaggtgggtgctgacagccacaggaggactgaggctgcaggaggccggcggcacctcagaggccgagctcaggcttggaggggtctgggatgtgggcaacaactggctccatcagagaggcctcaggaaagtgtgtcccgggggagggtcaagttcctttactgcatgagcagaagaaagtgggaagaacaaggatagggagtttatccccagaggaaaaagggagccatggcaggtgagggaagggtgggagcagcagtgaaagcggctggggcagggagagagggcgggggaggctggggaggctctttagcatcagacctggcctagggaccctggcagcacctgacctggtcgtcagggcactgtgtgccacccagaagcagggtgaggcctgtgcttctgagtgctgctggcctcagctctggtgctccaggccatgcgcagaagtgagaaaacagtagtagaaacccaagaccacccagcctggtcctctgacaccccctatgccctgcagatgtggacgagtgtgaggctggggacgtgtgtgacaatggcatctgcagcaacacgccaggatctttccagtgtcagtgcctctctggctaccatctgtccagggaccggagccactgcgaggacattgatgagtgtgacttccctgcagcctgcattgggggtgactgcatcaataccaatggctcctacagatgtctttgcccccaggggcatcggctggtgggtggcaggaaatgccaaggtatgggggactggctgagggttcctgagggatgtggcagggagcagtaattccctagacacactgtggcctttctccatccatccatccacccatccaaccatccttcatccatccatccatccatctatccatccatccatccatccatccatccatccatccatccatccttctatccatccatccttccattcatccttccactcacccacccatccatctgctcagccttccagtctttcacctagaataacaatgatcacagtaaacatgacagttagtgctatcgtggtgcttactatgtgccaggcactctgttaagctctttacagatattaatgtattggtcttccccatcaactcacccatacacatgcattcatccaacaaaagtttaggctgagtgcagtggctcaggctgggggcggtggctcatgcctgtaatcccagcactttgggaggctgaggcgggcggatcatgaggttaggagttcaagaccagcctggccaatatggtgaaaccccatctctactaaaaatacaaaaattagccgggcgtgatggcgcacgcctgtagtcccagctactcgggaggctgaggcagaagaatcgtttgaagatgggaagcggaggttgcagtgagccgagatcacgccactgtactccagcctgggcagagagtgagattccatctc

SEQ ID NO: 829 - DNA, 3905 bp, Homo sapiens
gaaccgttctggatcaggtacctgtaaatccctctctgtatcttatcaaatatgatggatttgactgtgtttatggattggaacttcacagagatgaaagagtgtcatcacttgaagtccttcctaatagagttgcatcatctagaatcagtgatacacacttggcagaaataatggttggcaaagcagtggaacatatttttgagacagaggaaggttccaaaaatgaatggagggggatggtcttagctcaggcacctgtcatgaacacatggttttacattacctatgagaaagatcctgtattatatatgtaccagctcttagatgattataaagatggtgacctccgcatccttcaagattccaatgattctcctctggcagagagggagccaggagaagtcatagacagcctggtaggcaaacaggtggaatacgccaaagacgatggctccaagagaactggcatggtcattcatcaggtagaagcaaaaccctctgtgtacttcatcaaatttgatgatgatttccatatctatgtctacgatttggtaaaaacatcttagaggtcatcttgaaatttgccaaatatatgagactctaaatctgtagacacagaaagtcttgattgctttccagtttgtaagaaccatcttctccctttttgcacgttttgcttggcaaaaaaattggaacttctgccctctcatacgtttttggaagaaaccttttgcccatctgtccaaccttttcactggttcctctccgcaatttaactgattagtgagaagggtaaagtctgacatccattggctcatacttttttttatcttgggtggtgttaatagattaaaggtagctgaacacctctcacctcactctttttggcacttggactctacactcattgaggtgtgaagcttgctgagatatcccatgtgactggctgggtaagtgtctttgcaatctcaaatctcccccaagtggcttcaaaaatctaacttgggaaagagtgggaagcccattttggtctcttgttcaagttgcattctcaattctaactgtactaaaagtaaggctaataattttgctctctttccggttctttcacctattgctcaactgttttagaattaagaaggtaattactttgcattttagtacctaaccataggctgagaaaccttgcaaaactgataagaagacaagcatttggggaccaaactccaagtggagagatcaagatttctggtggagcttaagtgaaaggttttagtcctcagtggcattagggtctctcttgtctccaatagctctggctggtatctgcagacatggagtaggttttaactgatagaagctgtgcaggcagactttagcacaaatggtctttgccagcccagaggagcattaagccaggctctagctagagccctcagtcacaggcaaaggctgggtttggctgggtttggacagatctgtccagaacctcaaaatgaaagaggagaaacctagaatcaaactgagatacagatttctttgctgtgctaagagagactcaagttttagatttgattcttaggagactgaattcagagtcccagcatgtgaggtgggcaaggcacttgtgagaaccaagaatggctgaaagcaggctatacttccttgcagggactggtgggctcatctattatggtatcccagcaggacttggaacacagtcagtggtaggtaatctgtaggcttaatgatgttttaagtgctggcattggtagatagaaatctaatagatttttgttagtgtttggatttttaactatcctgtttcttggctggccctaagaaacttatatgcagataagggtgagttctactgtggcagaaaagtaaacaatggaagggcctttgagctttccattattaaagagccattggcggaggttaaccaaagcctaggaaagaaaagttgaagtacaagcatggtttttgagagaagcacctggccaaaaccaaagctttctcattgaggttctcacagaagctccattagcagtaacagcctaataaggccatggagttctgcacatttggggctgggactcaaggcagtacaatcatattgggactgtactgcaagatatcttccaaattagtttaagttcacaggtcatggagtccagactaccggcacagattggcatcctgctgaggatgaaacaaagaagatgttctcttttctcctatgttttatctgtctacttttgctttttgatgccactaagtctctactatgatgtttgactgacaacagcaatgtgggtctgtattgccctatgttctaagtcctggggtcatatatttgcttaaaaaaactgttctagtggctggggactagtgtgctttctaatttttttgatgtgaggttgatattgtgataatcttatgtcttcttgaccctttggactctttaatatgtatgacatgcaattgtggggttagattaattcaactcctgaggtcctgaaggaacttcacccagtcaagaggaagacagccaaggctgcagctgctgaaggaaccccatatctgggcagacatctttgtgagatctatatggctgaaatgagaaaaacgagaaattgggaaaggcagaattttggactttaattattttggactttgaattagaaatttaattttgggcagtcctttttcccttggagtttaatagttgatggggtgggggtgaggtcatatagttcaaactaaggcatttttattatgttgttgatattgtattatttggagtattttaatgctatctttgggagtcattgtataattgttgtcagctatgtcaggaaatatggctggacataattgtaaattagggctgcaattgtgatcaaattttcagtctagggtgtaatgtagccttagagttaatttaattactgttctattttgacttatttcagagcctcttgggggcaaaaacaactgctcaccaatcttacattgatgggagcagaacttttctaagatactgttggtctccctggaaggggacagccacagccctgtttgttgaccagagtcttgagcattaaccattgtggcttaagagaatgaaaatgtacaagggtatgatgggatctatcctcttcctctctccatgctcctgactcaagaaaaggaaaagacttgcatctctcaaaaatgtttggaagaaagttctacccatcttctcttacactcattcaatcttatgcttgggaggaggaataacttgatgagattgagaaaatggttataatggataggcagcttaggccactcttggatcttgagttcgttccacacagcaagatgtgggaaagactgcagtccttcactacatggctgggtaaacatctgctttctagacccaactatctctccttggggtgggggaatcccaaagtcgttagacttatgatagaagttcatttcagcctcaggtccaagccatgttctccaatccagctctatcagctataaagctggtatctattttgattcttttttacagttttaatatataaattgttttttagaaaaataacacatgcctatggtaaaagtcaaacagtataaaagggtatactattaaaaagtaagtctctcttcctccttctcacccctggcctcagttccctggtcccattttcaaaaagtaacaactgttaccagttactgatgtatcattccagagatattccatgtatttacaagcatattgtgtgtgggtatgtgtgtatcaggtttttttttttttttacacaaatggtggcatactatacatgctgttctgaattttgcttttttcactgaacaatatattaaagctgatatcttaatcc

SEQ ID NO: 830 - DNA, 3487 bp, Homo sapiens
ttttaaatggccttttgattttatttatttttatgttttgattatttttttcttttttaactaataaggcgagaagagggaagttggagagggaaaagttagcccagaaggaaagcattttctgcagatcagcctgaatccaccgtggctaggtaagcaagtgccaaggcgttgaattgttcccaccatagctaccgatgtctaggaaggagttttccccttgaactcagagcctccctactgtggcctggccttgtgcttcccttaaagtctaagtgacttgagtttagcattccccagcagggtttaagtttttcttactgatttctttttgaaaccaaagaaatctcctgaaatggagaaaggttcagtcatttctctaccatctccaagctatgggatcagtagaggtgagctcagaaggaactcctctaaccattgctttctcagcctgtggcctggctcaagggaaccaaaactcaaggtagctgggagctccagccagagccagctccccagagcaattgaagacccagccaggatcttaggcatacaaacaactaaaactgctgctgttgccaaggccctgacaccagtagctagtttctatgctggaaaagcagccctcaggtggacgatggcaagaagggggttatggccaaatgctgccctgttatccagcttagctccctgttcctcactaactggggccaatccttggtatcacacaacccagccaaggcctggcatctcttctagttactgctgagttcctcagggtccttgaaggtcaactgtagcagcagggatgtctcattcaaccaaagaatttgccaaggaacttttgctgctgttacaaatacttgtcactagcttccatttcctcttcattgtatttgaaaacaatgggagaatcttggccagcagggtgtcctggggtagggggtggggtaagcctttctgtggagctctgggtttgctcttagtactgctgccagaaacactgttagaatggcaaccctgccattctcccctccagtggaagattctactttattcaggaaggctggtggcttgcaggggctaggcttacacaagccagccaagattgagaaggtaggggagtgctttcaatggaggccatagttgtcatcttttcttctgagcaggctctaggacaaacaatgagcaaattgagatgtcctgtattgggaggatgaggctgatatgtttcatcattctcagaatttgtgggctagagcacctttttgggaatatgggcctagggaaaagaacggtcacttacctggacactatggccatagtcttgagtttttctagtcagcatgtgattggttgtaccttaagtttatgacaccaaaaatactattaactctgttatttttgttcttaatcccatctcaaattagtttctagagttagaatcagaacacaaggatgctcattttcacatggagggaaagttgccaaagcatttaaaaaataaccccaaaagtatatctagcagtgaagcttggtagataaaggtgaactgctaaacagacactggcgtgccacactcctgccagggcagtctcattgtgtgtgacggtgctgcaacactgccagtattacttgagatgcagtctctctcccctgttctcagttcctgggctcagccctcctccaaggcctgccagtgagtagcagtttggaaggcaggccaagggagatccccaaagacagttatcagtcttaacttctgctgtctcccgtcaaatacttatacaggcccccatgggtaataggcaagcatgatggctgatagagaagtcagtgcatgagttactatcacatgtccccccaacccctcctgccacctcccagggctctggataattgaatcttcctgagtcccacagctggagactcaaccaggatatagctgtaaatgcccaagtagaatctgacagaataagacagagacactgaaaataaagccctagaaaggaagaaattggaagcaaagaaaaggagaggtgaaaagataaaaagcctcctccaaggttaggttcaggttctgttttccatttaacctcatgtgccataaagctgcccaggcacaccagagccacatcctgaacccgaccctccctgacagtgctgctctgccagtagcaagccccagatggaggaagctgggcccatttctggccacttccacccatttggagctttgccagaggagtcgtctatgccaataatatttctgcaacagcatattatattatttgaagattagtagatctttttggggggggtggggcaggggacagtttctatagatgaagaaccagtgttggttgtacagctgttgggggtcatctatcccatgtgaagctattctttttccaaatcttgttgtttctgcatttgtgtcctccaccactcccttcttggctgacatagatatgcctgccagattgtcatcaagggtcatatttcaataaaaggtgctaaggacaaaaaaaaaatctcatgtgttttaactcaggtgatggaagtctaaagattctgctgaaaagtactggaaaggaatttggtcacctatccatagtccttcacagataaacatatgaccagacccttacccacatccctaaacccttaccctggcctctgagggatggtattgatgctataccattcatcatccccagttaaatagcaggatctgccatagcctttttaggggaacagcttttagacatctatttcaaggccatcctgagtagggggtacagagtttaagccattggttatttctgtagttatcacagtattgaagcatggtatttttctactcagaaggatctcaggatcacagccctgccctttagctcactgatatatttcttcctctctggttactcagtggcaacatcacatccagtctaaccccatgtttagaatgcagaaaaagtcaacaataggtgtaatctcaggtatagacctaagcagtatacagagtctagttctggagtctagcctgatcgaaggtaagccattctttctagacttcttccaatcttgaattctgtctagtattttcatcttacttctagctgatagtccaatctcacaccttcatgctcagctccctggaaagcaagggccttggtgatctgctctccaaggcaacctcaaagattagactcaaatgtattccaggaagcaactctgacattgaaaagctttcttttttcgtgatccatattctgttcacattccaactatcctccttctactcaagatatccattgtggtagagtagaaagagtccagctttggcattagaatgaactgtgttcaaatcctggttctgccacttattcaatgaacctgggctactagctcaacttctgaggtcattttcttatctgtaaaatgggaacagtattatcttgcttgcagttattgtaacttg

SEQ ID NO: 831 - DNA, 4897 bp, Homo sapiens
gcttctccggctgctacctaccgcgccggacgctcgggctgcggaacagggcggcactggccggccacagcgacgccggcgccgagggacaccgcagtatgaggcagagattaacgtgacagtgtcaggtggacccacagccatcccacctccccctctggggagtgctgagagtgaggcagcatggaggagaggaagcatgagaccatgaacccagctcatgtcctctttgaccggtttgtccaggccaccacctgcaagggaaccctcaaggctttccaggagctctgtgaccacctggaactaaagccaaaggactaccgctccttctatcacaagctcaagtccaagcttaactactggaaagccaaagccctctgggcaaaattggacaaacggggcagtcacaaagactacaaaaagggaaaagcgtgcactaacaccaagtgtctcatcattggggctggcccctgtggtctccgtacagccatcgacttatccttactgggggccaaggtggttgttattgagaaacgagatgccttctcccgcaacaacgtcttgcatctctggccattcaccatacatgatctacgaggtctgggtgccaagaagttctatggcaagttctgtgctggagccatcgaccatatcagtatccgtcagctccaactaatacttttgaaagtagccttgatcctaggcattgaaatccacgtcaatgtggaattccaaggacttatacagcctcctgaggaccaagagaatgaacggataggctggcgggcactggtgcaccccaagactcatcctgtgtcagagtatgaatttgaagtgatcatcggtggggatggtcggaggaacaccttggaagggtttcgtcggaaagaattccgtggcaaactggccatcgccatcacggcaaattttatcaaccgaaatacaacagcagaagctaaagtggaagagatcagtggtgtggcttttatattcaaccaaaaatttttccaggaactgagggaagccacaggactacgccgacacagagctcctgctttcccgagaaaacgtggaccaggaggctctgctcagctatgccagggaggcggcagacttctctacccagcagcagctgccgtctctggattttgccatcaatcactatgggcagcccgatgtggccatgtttgacttcacttgtatgtatgcctccgagaacgccgccttggtgcgggagcagaacggacaccagttactagtggctctggtcggggacagcctcctagagcctttctggccaatgggaacaggaatagcccggggctttctagctgctatggactctgcctggatggtccgaagttggtctctaggaacgagccctttggaagtgctggcagagaggggaagtatttacaggttgctgcctcagaccacccctgagaatgtgagtaagaacttcagccagtacagtatcgaccctgtcactcggtatcccaatatcaacgtcaacttcctccggccaagccaggtgcgccatttatatgatactggcgaaacaaaagatattcacctggaaatggagagcctggtgaattcccgaaccacccccaaattgactcgcaatgagtctgtagctcgttcaagcaaactgctgggttggtgccagaggcagacagatggctatgcaggggtaaacgtgacagatctcaccatgtcctggaaaagtggcttggccctttgtgcaattatccatagataccgccctgacctgatagattttgattctttggatgagcaaaatgtggagaagaataaccaactggcctttgacattgctgagaaggaattgggcatttctcccatcatgacaggcaaagaaatggcctccgtgggggagcctgataagctgtccatggtgatgtacctgactcagttctacgagatgtttaaggactccctcccctctagcgacaccttggacctaaatgccgaggagaaagcagtcctgatagccagcaccagatcccctatctccttcctaagcaaacttggccagaccatctctcggaagcgttctcccaaggataaaaaggaaaaggacttggatggtgctgggaagaggagaaagaccagtcaatcagaggaggaggaagctcctcggggccacagaggagaaagaccgaccctggtgagcactctgacagacaggaggatggacgttgccgttgggaaccagaacaaagtgaagtacatggcgacccagctgctggccaaatttgaagagaatgcgcccgcacagtccatcggcatacggagacagggctccatgaagaaggagttcccgcagaacctgggaggcagcgacacatgctacttctgccagaagcgggtctacgtgatggagaggctgagtgccgagggcaagttcttccaccggagctgcttcaagtgcgagtactgcgccaccaccctgcgcctctcggcctacgcctacgacatcgaggatggtaaattctactgtaagccacactactgctatcgactctctggctacgcacaaaggaagagaccggcagtggctcccctgtctggaaaggaggccaaaggacccctgcaggatggcgccaccacagatgcaaacggacgggccaacgccgtggccagctccactgagagaaccccaggttcaggcgtgaacggcctggaggagcccagcatcgccaagcgactgaggggcaccccagagcggatcgagctggagaactaccgcctgtccctgaggcaggctgaggcactgcaggaggtaccggaggagactcaggccgagcacaacctgagcagcgtgctggacacgggcgccgaggaggacgtcgccagcaggtcagcacgcagggctgcagggcacccacccgccacacggccctaagagcctcctcacctctgtgtgtctcggtttcttctcagtgaagggaggcctcctgtctttcctgctgcccgcagtccattctccccagtcccttttaggttcttagcctcatcttctagtcagtgaggactcctccatcagactcaattcagagattcaggaagtatttattccttgaggacctgacatgtccccagctccaagtctgtcattgggaaggaaagtggcaggctctgcccctgggttattcacagattcagcagagggaaggacgggcacacggggtgggactctgggtgattcagccaccagtgcaccgggccgtcttgagggaggcctagtccgtcccccaggcatctttttttctcctgtaggtaaagaaagggactgaaaatgtgtgccccaggggccgcatgcagcaccagtggatgcatgcttaggcagttccagagctgtaatcacatccagctgggtgacacctttggggatgtgcatgctataaccctaggactccctatatccactgccctgcaccccagggcttccagtatcagcgaaggcttcaaagtgttcagccgattacagatgatcaagagagccaagaatcaaaagggggtccggtgtcctgtggggcttcaggacagaaacacaggctgcaaacccgaggggcagaggcctcaagtggccttggagagcatttgaatcacacaccttgatttagccatgatgaagggaacatgtggggataaggagagcagagcagtttttttaaggtccaagaacgctttccagaaggtgtttgctgggccgagctgctttcagctgcgcccgccacctcagccctcatgtcagacaccctctgcctagattcattcttgggctgcctcacagaccgctcctccgtgcatgccgggggcagcctctgccttggtatctgcagttccaaagctgtcactgatggtgcatcctcatccagaactctgcttccctatccagagcacccatggaggccccactctccccactgtgcccagatgagggggagcccactctctctctacactgaccctgcagtgagggtgagagatgctgtgtgtcaaaacgcatttataaacccttgagcagagctactggcttgaccttgggctgagtgtgggtcagcaccattttctccactgtaatttataaattgtgagtggcagtggggcagcaagttcatgtaatgtagcaaggacattccaggaaggctaacccctggcatttatggcaggtatgacaggagggcagcacagaaaacatgaaatcagtcagcatctatgcaatgcaatacatgcctcatcttactcagattgaagttaaaaaaagattttaaaactagcattcatgctgggcgcagtggctcatgcctgtaatcccagcactttgggaggccaaggtgggcacatcacttgaggtcaggagttcaagaccagcctggccaacataatgaaaccctgtctctactaaaaatacaaaaacttgccaggtgtggtggcacgcacctgtaatcccagctactcaggaggctgaggcaggagaatcgcttgaacccaggaggcagaggttgccgtcagccaagattgtgccactgcactccagcctgggcaacagagggagacttcgtctcaaaaaaaaaaaaaaaaaaaaaaatgaagagcccggcctggtgcggtagctcatgcctgtaatcccagtactccgggaggccaaagcaggcagatcacctgagcccaggagtttgagagcagcagtaacatgatgaaaccccgtctctacaaaaaatatgaaaattatccggacctgcctgtaatcccaactactcaggaggctgaggcaggagaaccacttgaaccagggaggcagaagttacagtgagccaggatcatgccattgcaatccagcctgtgagacagagcaagaccctgtctc

SEQ ID NO: 832 - DNA, 4343 bp, Homo sapiens
atgttgcttatactcttgtggtttaaaatgtgttgcagctgctgctaaattgaaatgatttgggggatcatttggagaagagaggttatcctctggaaatctataggaagttgcaaggattaataaccactaaggagcagaacattgctgggtcagaaaatagctgcaggacttagaggttttctgcaacacaggactttcagcttcaaaactgggacattctcatggcaaactatggcgattggtcacctggcagtgagccagactgggaggatctgatgtacccatggaagttaggccgaaacacttattgaaatctggggtcaatttgaggccttggccacagaccaatgcagaaaaggtgggcaaagcgtggtacaacgagtaccttggtactcagtccctagattaccaacctagagcacctgctgtaggccttgcatgcagaattagttggccccagttctgagggagggctcaggcagaggacaagaatgatcacagaatcaggccactctgtgcttcagcttccttatctgcaaaattggataaatagcagcactttgtgcctaaaactgcatgtgagatctgttagttaatatgtgtaaagtgctcagaatggtgcctggtccatatgaatataggaagtatcaccatggaattctcaggaagagaaacaggtgtgtggccctggctggatcatgtctatgatagctcagttttccatctgtaaaatgaaaatcaaagtccctgccaaagctttcagaagaaacagaacaagacacagtcaacaaggaaagaagtcacagatagtaggtaggaacttgtgctctgaaatcaaaccccctggattacatccagctctgcctcttagatgttcatttatttatctgccataccccagccaccaccgcaagacccaagaaaccagggttgaaatgccaggcaccaaagctgctgcagccatcatccaaaccctccacacagaccagtcactggccccagtcactggcccaaggcagggtggagcatccagacaaggtggggaatggaatttgcccaataatggatgccaatgatttgaggaagacagcagccaagggagaaatggaaatgcaaaccaggtacaaacaccaatgggcccggcgctgtcctgagcactttatgcattagttcatctagttctcctggcagtcttatgaagtaggcactgttattcaccccattttacagatgaagagactggggcgcacagtggctataacttgctcaactcacagagcgagccagaactctgggcaagtttgttgacatttctagtccctagttcctctcaaaagaatgagggtaataagttatgacatctcctcatagatttgttatgcagattagatgggatagtctatacacagcacttagcaaaggatcagaaacattttaagcactcatacttaaacccaaagtcactcactaggtaattggcgtgataagatacatgggctataattaccaaaaatatagctggtaatttaagaaaatggccaaatgtgcaaggtagtaaaagtctagggtggggcaggggacataaaataccataggaactgaggaacagggggtcaggtctgaagaatctgttttgcatgagacactttgtaggcctttggagagaaattgtgaggaggacttgaaggacggacagttggcccccaaactccaggctttcactccctgaactaagagggaccttgagcaagccttcacctctgggaagaagccctcagcagcccagataggagagctgaggtgtctggaaaagcccacaccgaggcccagggctgggccagttatggaaggccatcagtgcagccccgtcttgactcctgctgcagaaagactgggcagggccgcagctccagcccatgttccagatttctgccatgaccaccctcctgcgtgccagcttgaaaccactgtttgttgacatgatctccctgacttcatccatttagatcatctttggctcactgacctcagcccactcccttcacctgctctattattttattgtgacccctgattccaggcaagacattccattcactccatcagccccaatctgggaaccttgtcagcaaagaggattggccagggatgaggaattgtggtgaggtgaaaggaatatctctgataagagatgtagcaatgctactcactaatagctctagattcttggcaaatgcctaggaactcaccccacatttttcagcagagggtgtattagctgcattttggaaacctattaagagttgtaattagcagcagggagagaacaagaactcttctctagggcaagtgataacagcagtaagcattgagtggacagtgatcatccagccaagccatgatacctttcctcctcttccacctcttaaaaagagactggagctgtgctctcaggctcagggaattctacctgactgtactgctttgcctccagatggattccctctcctgagccctttcaggtagacggctgcattggacagtacctggtttgcatttccatttctcccttggctgttgccttcctcaaatcactggcatccattatctggcaaattccattcccctcttgtctggatgctacaccctgccttgggccagtgcctagcggcccctggcctgtgtggagggtttggatgatggctgcagcagccttggtgccttgcatttcaaccctggtttcttgggtcttgaggttgtagctgggatgtggcaggtggaacccaacaaggagatttacctccaatggtaaggaggggtttctgtgcgaggaaatgagcacctgggaacccaggcggccaaaggtgattgaattgttccgcacaaactgggttacccctcagggctgatgtggcctggagagacacccctaaagtcatcatgtgcctctaagatttcgctaggaaagtttccaagaaaaggctagatttccattgggcttgaaaggtgagccacccacactgggcgctcaggtctgcatttctgctccagtgttccctcagtccaattttacacagcagtaacaccctcttcccctcatgttctgttgtgttctgcagatcctacaggggaacatcatgataatgaaacctttgtgttttccatggctgctacaaaaagaccagatcaaacattttatgacacttttgtttttgtgtttctgtatgctgcatgtgaaaatatctattacacaaatcaagcactctgctttccattgccaagcatctttggcacaagagctgtaataagaagtgtaatgaacataaaacagtttttagaatcactcctttggtagctggtatatgaagctgacaaggccccctctgccaaagctgcagaaggtcgggcatatccttcccttagctcatatggctgcagaggaaggaggtgtctttctttgggcttcatcgccaggcaacccacacactttgatgctcacctgtctgccttgggggactggagttgaatgactgcttgttttgctcctgggatctgtgggctccacagtcgtcccaggcctccttgcttaatcggactcccacccatggcatctgagtagttcctcttctggtcctgtcactatcatctccctttctctctctcaaggcctgtccttctgtagtacatctttttaataactggtaagagtctcctccgaccttccctttggagaccttttctcttcagtcaatccccgccccacccaatcccatcccttgttctcagcgtcctgctcacaatcccttttactatgccactgacttacccagactggctaggacatctctatttgcattgcattgcaatatggactgaggtgagcttgcctatgaaatcagctgtgaacttattttttgttaactgtgattttaaagggcagggaggagaaaatgaatactgagggaaggaaaggagacctaacatttattgagtccttggagttcttgagatagatgcctcatacacgttaacttatgcatcctcgcaatgatcttgggaggtgttatttactccattttacagaggaggaaatggaggttaaatcacttacacaggctgggcacggtgactcacgcctgtaatcccagcactctgggaagccaaggcaggaggattgcttgagcccaggggtttgagaccagcctgcctctacaaaaaaataataagtttttaaaaatcactgcccaaagttccaaagctagtcaacaaagaaaccggttacaaatttgctcttcatttagtgtaaaaatcaatgaaacttttctgaatgtttcagtctt

SEQ ID NO: 833 - DNA, 4052 bp, Homo sapiens
aacataaacagtcagttaacacattcatgttaaatgtattctatcctgaattctgacaataaagtaagctagagaaaagaaaatgttattgagaaaatgctaaggaagagaaaatacatttactagccactaagtggagtgtatcatcgtaacgggctcccctgattgtcttcacgttgagtaggctgtgagcaggaggagggggcggttgtcttgctgtctcaggagtggcagaggcaggagaaagtccacatataagtggaccacacgattcaaacccctgtccttcaagggtcaagtgtagtcctccgctggctggtaaatagctcacctcagcccttcctgggtccccaccaccccccacccagccctcccagccctcttctgaaacctgctgttaattcccatttctctgatgaggaaactgagtggccacagggtactgttcctagcggaaaattggcagcaccggggggtcggagcccaggtttctgcttttcctggcttccagccaggctccgagtcctatatgtcacttgctggtcacttgctgtgtgccaggccctacttgggcccccttgccacagccccatgcagcatcatcagagaggctgcagctggcccaaactggcacagccagggactggacgggagccgggtgggcggtgtgtccccagctcccctgctgccctgtgggtgtgaccagagcgaggcaccgcctgtgagtggagattggggctggggggcctgtggcagggacttttgcattctcttctccccgtaactgcttcccgccccacatcctcttctggcttttggaatttgaccccagatctataagaagagcctggctcctccctctccctcacctcctacaccgcctccaggttctgccacttttacaaatttgctttatctgttcactctttcccttctctccatccccgtggctccagccgcggcctcatcctctacccccggacccctggcgcagctcctccctggcctccagccgcgccgctccagtccactcagaggggtccttcacccaccagagctgagcctgcccctctgttgtcacagcccgttgtgagaggaaggagggcccccccgcccccggcccattgccacggcctctgtaacagctcgacattccctcctcccggcttccctcctggacgttccggggcccaccctgtgcccgccctctcacttagccctcggacggctcccccacccccacacttgcctccctagagacccagggctccttgcctcgggtgccagcagaggaactgccggtagggggcgctggctcgctcgttcctgcagcaaatactgaggctcggaggggccagcgccgttggccggccttgaggatgcagccgtggacgccgcggcaaagccctcaggggctcccctcttagcaggaaggcaggcaatgaacgcaggaacaaatcaccgagcatcaggtgctgggtggccgtgacacgagctgtgaagaaaaggaagtgcaagggatacggacggtagggggagctcaaagaagacctcctggaggtgtcgtgggaacgcagagccccccctgaccccaggaagagcacccccggctggccgagggcacagcaggggcaaagtcccctcaggggaacgggtctggtgtggatgggaagagcctgggtgggaggcgcctggtgggtgggaggagcctgggggagagcggcgtggctgcacgggaaaggacagcccccctccaagcaagtcaccacctcacccccacccactgcacctcacccccaccccgactgcacccccactgcacgggccgcctgttggtcctgctgcccagtggccagtggcccgggaaattcgtgagctgagccaagcccctagtcctgcttcctcatcagcagctcctagggggcctggactgccctttccctaaggttcttctacctccagacatagaagcctgacaattctcggcgctgtggggctgcttttattttgaaagcattcaggacatggattggctcagaacgccaacgctgcctgtcccctcccccagaacccgggtctctcccataggaccggcttccagggacagaagggctcatccctccccggcttcaatccctctccaccctctgggctccaggctccacttctgccccagtccctcgcagtggggaagttcttctctagctctaacctccaggcctcttgctgcaatggtagtcaatttcctatcttccctctggccgtctgaatttagccccccaccccaccccaaaaaatgagtgcgcctgacaggaacgttccctgcctcccatttctcctcaccccgcctctcctgggtccccgagtttccgatctgccatctgcctgaatcctcccaggcacagtgcccgagatctctcagagctggggctggggaggatggcgaagccggtgaggactcagcttcacgcctcgagtgcccgggccctcccagcctctgccttcgcctggatctcagctccatctcggggcctcctgtcctcctgcccctttcatgcccctttgtatgcctgtgtctgtctccctgtgactctgccactctctgcccctcgtacttctcctctttggggtccttctgtgtctgcacctctggcttgttccttgcaccaggtgagggaggagaacaggtgtacccttgtgatgggtcctctcccggggcagctgcggtgggagaggcaaccgtggtgacctggctaagttctgggactggggttccaatgccggctgtgctgctggagggctgtgtaacctttggcaagtgccgctcacctctgaatctgtaaaatgggcacaagaaccatcccttcctcccagggccgtggggagaagccagcagcttgaggagtggatagcatggcacccacatgtaatcagtatttcccatcactactaggggtgcgtgggggcagagggcagtccatggagcctctgccagccgggcgtgaagccgtggtggggtgtcgggcgtgtgatatcctgtgcagtgcgggtgactgcaggggctgaggaagggtggctgttcagcatgcctgtggccttgcctgcaccctgccccccacacacaggcagcctccatgggaattgttgctgctgtcaggccacacttgggggtctttggggcccctggactctggcaaggctgacctaggaggggccacttcctagccgtgtgtttcgcattaggcaactaacagtacctctgtgtgtctcagctttgctagctgggaactgggtgtaatagcagtcttctctcagagggttgatgtgaactgcggtggctaatgcaagtaaagctcccagaatggtgcccagtcagtgccagatgtgtgttggacgttaccacctttggtggtgtcattattcagtgagttcacgcaagtcagatgtgtgtgcggaagagatgaggttagccagcattcctgttatccaggtcagagggctctatctggggacaactggggccaggtcccctctcagtatgcagctgtatccaggagtgtagctcacgcaggtggtatctgaggtttgggcagagtggtagctttcctctgggtgcacggagctgcgctggggacctcctgtttggaacctgaggtgtagtatctgggacttagccatccgggtggtgctggggcacggagggtgacccagggcatggagggtgacccgggacattggtgtccagctgacgtgagatgtgtgcttcctcggccaggtacggtggcccacacctgtcatcccagcactttgggaggccaaggcaggtggatcactggaggtcaggagttcaagaccagcctggcccacatggtgaaacccccgattctaacttaaaatacaaaaattagccggggtggtggtgagcgcctgtagtctcagctactcaggaggctggggcaggagaattgcttgaacccaggaggtagaggttgccatgagctgagatcgcgccactgcactccagcctgggcaacagagtgagactctgtctc

SEQ ID NO: 834 - DNA, 3812 bp, Homo sapiens
ctcttctggaggggtgtatgctctcgtctctgcccatctggccaacattgtcatgaactggtcaggcatgaagtgccagttcaagctgctgcggatggctgtggcccttatctgtatgagcatggagtttgggcgggccgtgtggctccgcttccacccgtcggcctatcccccgtgccctcacccaagctttgtggcgcacttgggtggcgtggccgtgggcgtcaccctgggcgtggtggtcctgaggaactacgagcagaggctccaggaccagtcactgtggtggatttttgtggccatgtacaccgtcttcgtgctgttcgctgtcttctggaacatctttgcctacaccctgctggacttaaagctgccgcctcccccctgagggctggaggcccaaggtcggggaggggagggaaaagcagcacccacagggagcgcctgcgaggtttcttctcatcaccagctcagctaggccgggcagacaaggacagaagactctgggccactgtaatgtttgtgtttagatttggacacacagtggagacccttttctgaaaggcatctggcggaggagttgatgtggctgctgtcgtttttctcggctgctctgatgacatcgggccagggtgaaggtctggggtggggtgtgagagtggccctccctcacctgggctgggcttcttccatggggccagggggtgccccctcactgctgcggattgagcagcagcttcttcctcctcctctaccctcagagaccctaagagacatgggaaggctcgaaggttgttgcgtccaggcatggcccctctctagctcagaaataattgcaggccatgtggtgtctccttgacacctgctgtgtctggggctccagtaagaagagggcctactggacatgtcagctgtgacctggctgaaaccagggtgccctcctgggctggttggtgtgcaccggggcatgatctgttgtgcctgggttgggcagagcagggagcctgtaggctctaggacccctcttgtgctgggggtacccagtgagagggacccatgcagggggaataaacttcattccaagttccaccctggagaagacagacccaggaccagcttcaggcttctccctccctttcttccaggatattggcatctcacacgggtgccccagcctccatgcccagccttgttttagggtctttttctttccttttgctgccctgacactactttgtgcctctctttggttatggagacagtgttttgaaacattcatgcgtgtgtgtgtgtgtgtgcgtatatgtgtgtatgtgatgggaaaggtaactgaggcacgacagcgcctgcagagaaggcatggaggatgcagggggcccatgtgggcatccgtgagaggtggcagaccgtggtgtgctgtggttgctgaatgtccttgctttgacaaagcctgcccccttccttcccatctcctgtcccttccacacctgcccctgagcatcactgaccggtggcagaatggccctgctggagggagagctcaagccctccaaggatccctggatgctgaggtttgccaggttcagctcttgtttccgtctgagatggccttcatatccaaaaaggttccatcctatctcccttaggagagaaagagctttgggggcgcaagagaggctggggtaggaatgttgaggccatgtgtccatttaagttagggggacaggaggctacaggaagaggaattccagtttagttggaaaactttgcctcaggagaattgttgggtgcatggatgaacctcagagggagggcagccagtagcctcggaggcttggatgcgggagagaacatggtggttatcaaatccaccccaccccattacacaggtgagaaaacaagatggagggaatgaccctcctaacaggagctggtgcaggccccgaatggagggcatgaggatgacctttgacaaaagatgacactccctttatcgtgctcttggaattctcaaccactgacagcccagaagaacaaagaacgccaggcctgggaggaggcaggggggctgggcgtgtccagaaacaggggcaggagtgtgggaacggtcttcctccagcctggtgcccatcctggcccttgagtgtagcagggtccagggtcagtcaggccaggcatttggggtcttgggccacagtggcttcccatcctggtgactacatgtaaatgggctcactcactcactggcaggcgaggcccagccataccgcatcttggcccactgctaaatagattgccctggcctcatccacatatgtagttccctaggtcctgctcccctgcaccagtgccatgctgagggccgcagcctgtggcactgtgggcccacgcctttggcggtgttgcgtcagcctggggcgtcttgtgtgtgccctgcccaccgttctctgccctagtgatagaaagatgtagatggaagtcagtgcctcagaggaggaggctctgaggctgtggagctgggctcagggaagaccaggggaggatgcagaaggagtcaggacattgctgcctctgcctgggctgcagccgcactaagctgagcgatgaggtcctttcctggagggatggagaatcccctccagattcctgtcctggcccctggggattctgtggtgtgggtggaatgagcagagtgccacctctgtctggtatgacctggagagggggcttcctctcttaggggtgagaaagcattgaactagaagattctagaaatccctcatagaagcactcagctccctcggggactcccagggaagcttgttactgagaaggacagtggaggcggaatcgtgtctcccaccatgttaagtgtgtcctctgctgccaaggaccctcgtctacaccttagaccaccagccccagctgttctctgtcagcacacccacctccatcccctctcccaaccatgacttccaagcggggccacagggtggggtcatagggtcacttcacctgacccaggcctctccccaggtcaggaggcagctgtctggtcagaggggttctctttgtggcatctggctttctcctcagcaggtcccaccaccctctcagcagcacttccccatggccaaggctggccgtgtcctctgtgcctctttccttgtctgaggtggctgccagcccagggggtggtgtgtaaatcttcaggctggtggaggtaggttggccttttatccacaggatacagaaactgaaagctggggaatccccaaacagcagccatagactcactggctctcattaaacgggagaggaatcacagaaactggggaagggaaaacaaaccttcaaaggagaaatttcgctttaatgacaccattcatcattcgtttttaattaggaaaagctccctaatgaggctcttttgccagctaataggactctcgatttccatgagaaccattcttgcccagaggattaggggagctgttgctcaccacaccaggatcttcccccagcgtccaatttaatttgcaaatacgtaatgcagattccctgggtgccgtgaaagcctttcctggcatcattcatgttgctccccgtgctggctggaaagcacggttctcctctgccttaaaaacagtgcccaacagtgaactgcccctccgaggacttgagtaagtggaaaaaacaaaacacagactgcaatgtttgtttctaagtatttttgtattgtgtacattctgtatatttttgttgtaacatattatttgagcacagattccattaaatattttttttctttt

SEQ ID NO: 835 - DNA, 4063 bp, Homo sapiens
agggaagaccacatagcaccaaaggtctaggggtctgtggactcgtgagcgtacagggttcagaatctgggagttaacaaacgaggccctaccacatactggcccggggaccttgggcaagttaggttctctcagcctcagtttcctcctttgtaaaacaggagtgatggtccctaccctatggggtggtgctgaggattcagactggatgggataacttaggcaaagatcccggcacaccatgggggcctggctggtccctgtgggctggtgaaggacttggctgccctccccactcacacccttgggttctgcctccttcctggctcctcggcaggttccccaccccggtgtcgcctgtggtctcacagtggaaggacatgataggcacagccttctccctagccatcgtgagctacgtcatcaacctggctatgggccggaccctggccaacaagcacggctacgacgtggattcgaaccaggagatgatcgctctcggctgcagcaacttctttggctccttctttaaaattcatgtcatttgctgtgcgctttctgtcactctggctgtggatggagctggaggaaaatcccaggtggccagcctgtgtgtgtctctggtggtgatgatcaccatgctggtcctggggatctatctgtatcctctccctaagtctgtgctaggagccctgatcgctgtcaatctcaagaactccctcaagcaactcaccgacccctactacctgtggaggaagagcaagctgggctgttgcatctgggtagtgagcttcctctcctccttcttcctcagcctgccctatggtgtggcagtgggtgtcgccttctccgtcctggtcgtggtcttccagactcagtttcgaaatggctatgcactggcccaggtcatggacactgacatttatgtgaatcccaagacctataatagggcccaggatatccaggggattaaaatcatcacgtactgctcccctctctactttgccaactcagagatcttcaggcaaaaggtcatcgccaagacaggcatggacccccagaaagtattactagccaagcaaaaatacctcaagaagcaggagaagcggagaatgaggcccacacaacagaggaggtctctattcatgaaaaccaagactgtctccctgcaggagctgcagcaggactttgagaatgcgccccccaccgaccccaacaacaaccagaccccggctaacggcaccagcgtgtcctatatcaccttcagccctgacagctcctcacctgcccagagtgagccaccagcctccgctgaggcccccggcgagcccagtgacatgctggccagcgtcccacccttcgtcaccttccacaccctcatcctggacatgagtggagtcagcttcgtggacttgatgggcatcaaggccctggccaagctgagctccacctatgggaagatcggcgtgaaggtcttcttggtgaacatccatgcccaggtgtacaatgacattagccatggaggcgtctttgaggatgggagtctagaatgcaagcacgtctttcccagcatacatgacgcagtcctctttgcccaggcaaatgctagagacgtgaccccaggacacaacttccaaggggctccaggggatgctgagctctccttgtacgactcagaggaggacattcgcagctactgggacttagagcaggagatgttcgggagcatgtttcacgcagagaccctgaccgccctgtgagggctcagccagtcctcatgctgcctacagagtgcctggcacttgggacttccataaaggatgagcctggggtcacagggggtgtcgggcggaggaaagtgcatcccccagagcttgggttcctctctcctctccccctctctcctcccttccttccctccccgcatctccagagagagcctctcagcagcaggggggtgctacccttacaggagtgagagtctggtgagcccactcttcacccgtcaggccctggccgcaatggacaagcctcctgctcactccaccccacccacctctgccctgtccttggcagctgaaggacaccttgacttccagcttttacgagtgagccaaaaacagaaggacaagtacaactgtgctggcctgctgtacaagcttcaaaaagtgtcccagagcccacacggctcggtgtcagatggtgtcaggctgtcacggacatagggataaacttggttaggactctggcttgccttccccagctgcctcaactctgtctctggcagctctgcacccagggaccatgtgctctccacacccaggagtctaggccttggtaactatgcgccccccctccatcatccccaaggctgcccaaaccaccactgctgtcagcaagcacatcagactctagcctggacagtggccaggaccgtcgagaccaccagagctacctccccggggacagcccactaaggttctgcctcagcctcctgaaacatcactgccctcagaggctgctcccttcccctggaggctggctagaaaccccaaagagggggatgggtagctggcagaatcatctggcatcctagtaatagataccagttattctgcacaaaacttttgggaattcctctttgcacccagagactcagaggggaagagggtgctagtaccaacacagggaaaacggatgggacctgggcccagacagtcccccttgaccccagggcccatcagggaaatgcctccctttggtaaatctgccttatccttctttacctggcaaagagccaatcatgttaactcttccttatcagcctgtggcccagagacacaatggggtccttctgtaggcaaaggtggaagtcctccagggatccgctacatcccctaactgcatgcagatgtggaaaggggctgatccagattgggtcttcctgcacaggaagactctttaacacccttaggacctcaggccatcttctcctatgaagatgaaaataggggttaagttttccatatgtacaaggaggtattgagaggaaccctactgttgacttgaaaataaataggttccatgtgtaagtgttttgtaaaatttcagtggaaatgcacagaaaatcttctggcctctcatcactgcttttctcaagcttcttcagcttaacaaccccttccctaacaggttgggctggcccagcctaggaaaacatccccatttctaacttcagccagacctgcgttgtgtgtctgtgtgttgagtgagctggtcagctaacaagtcttcttagagttaaaggagggggtgctggccaagagccaacacattcttggcccaggagcattgcttttctgtgaattcattatgccatctggctgccaatggaactcaaaacttggaaggcgaaggacaatgttatctgggattcaccgtgcccagcacccgaagtgccaaattccaggaggacaagagccttagccaatgacaactcactctcccctactccacctccttccaagtccagctcaggcccaggaggtgggagaaggtcacagagcctcaggaatttccaagtcagagtcccctttgaaccaagtatctagatcccctgaggacttgatgaagtgatccttaacccccaagtaatcattaacccccagaccagcctcagaactgaaggagattgttgacccggtgacctggagttgaggctcagggagagatctgccacatgtctgagggttgcagagcccgctgtggaggtaagattggaaacacatgaggcagagggaagacattgaagaaaacatctctgctggaatatttggaaaagaacactcttctggacctggttgaagcaggaaagatggaggcaaagtagtgaaataatccagaatttcaatgcttttgaatgttcttagtgatactgacctgtgataatataattcccagggaggactgggaaccttatctcttgagatatttgcataatttatttaatttaagcctcattctccttttgttcattttggtaataaactggatttgaattgtg

SEQ ID NO: 836 - DNA, 3349 bp, Homo sapiens
aggtcgcgacggcagccacaggtggcagtcgggggtggctgtaattgatcctcgccccaatggggatccggcagcagctgcgcttgcccacgaggactgcccagccattgaccagcctgccatgtccccggaagacaagagccccatcacgcctggaagccgtggccgctatagccgggaccgagcctgcttcctcctcaccgactatgccccttcccctgatggctccatccgaaaagctcttgtcaccgcctgagacctcgcgagactttcggtcccccccgccccttccccccaggttacgagaaatcccgcagcctcagcagcatcgcgggcctgagcggggtgtccctgcgcctcgcgccccttgccaccccccctggctctccccgggccgcccgccgcgctcccccgaccctgccctccatcctttagcgctcccctcccccctgtggggggactcgggggtgaccgggaagaaggtcaaaggagctgggggtggggggtggggaaaagggtttttttaaaaaaaatcaaaaagtcattaataatatgcaaccgagatgacgatgccagcagacacccccgggcccctcacccccaacctgggcccccaggatggagagaggggccacagcccgtccccccaactcttccctccccaaaaaaagccttctcaggtctccacgagccataggacatccccctgccatcaacttgtgtaaataagtccaaattatgccagttacatcttggggcacctccccccacacactgcatgccttccctaacctggagcccccactccaagtccacctcagcaataagccgccaggggccgcatgcgcgggtttgaggggcaggcactctgggaagggggtggcacctcccgggggtcgggctggcctttaaggtctccagccttcccatccttcaccccaggaggacaaccaaccctgtgcgttgattaggagaaaacaaaccagaaactagaaacagtgtaggggaaggaggaacagttacccaagccccagatcggagttgagctcaggtggcgggagggcggggccgagttgagctcaggtggtgggagggcggggcgggctttggacctgctccctcagcctttaggagaattcctctggtgaatttcaccctctcatccgccccttcccccagggacctgctcgcctctattcttgctgcatggactcagacctcctatcccagaattcctgggatgatctggccctagcacacgaaattccccgactatctccctccattcccaggacatgagacctgcacccagaattctgagactgaccctggcacgccacatctcccaatccccacacactcctgcgacttaacctctgcacacagaggctccctgaaccaccctccctccccactcctgccaccccaaacacccccaccaaattccctgaactgcgtcccagcacttctcaaacctccaagacttgacccagctcttttcagctcaaattcagcctttgggatgctccaaatccttcccacaactgacatttcttggacacccccaaagcctcaggcctgttccgcacccatatccccaaagccctaacagacttgtccagcccaggttcccttgatgctagaacttccaagataggcgcaacctgtctgcaattccagggaaccagaccctccccaagcaccctctttgtcttacgcctaaccctgagtcccttccctgagatggtgccccaagggtaccctcttcacagacaccagtgtttcccagagggttgtatttgtacctttggtggtgtgctaaggtttgaggcagtatgaggacaaacacttgttttaaaagtgttgtctctaatacgcattttgtacagaagccgataagtgcaggcatcgctgcttggctaggacacggtttatttaggttaagagtgtttccatttaaagtagtccacagatgatcacagaggctgttcccgaagggaggaacactggagtatcagaagattgggaaccgacaacacccagctcggctgggatcccagccccccttccccagcggtcctcaccgcgtcacgctcgcgggtggaaaatcatttcccacctcctatcctggctcaaggatgcgctacctcccccaagcccagagaccacaccggtcccagactctttagcggaccccccttttggagccggggtcccacggaattagccacctccctccctctgctcccacggcctcaggaaccccccacccgagggtggatggggggcgtcactgagcacgattctcgatgcaacgattcctatgcaaggggcattttgagtcccccccatccttccctcggaccctaaaccctggtgaagcaggggtgaggggtggggcgggttttggtgggggcggggcaaagggctaggggctccagacaccagggtacggggtggggactgattatattgccaaagggttcaacttctttaacaagcccccccgtttcccctgaccttcacgaaagccgaaggaggcggggaaagggggtgagggtcttttccaaagggtactgacctcttcccaacgtctccccctgctcgccagtccgccacacgtacccagcttttgagttcagcttttcaaaataaccacaatcatgataaacttctacaaaacgtgattctcctccccccccaccccatcccccaagtcaatagtgtgggattcggggagggagagagcgagctaaagggactctttccaagtccggctcccccttttccccccggccgccagggtgcctgcacctacacgcatgcgctgcatgacgcgccccccacacgcatgtcgcacccctcctgcgctccgggaacgcacggacacgggccagggggcggggcgattggggaggaatgaatggcggggggtcttcctgagctccgcggctcaccctccccaacacacacacacacacacacacagagcaataagtttctctcactcaaatgtgggcggggcgggcctagcctgtcgctggtggggggagtggtgagggggcgctctcagggatgggggcggggttcggagacagtgtggggaggggaggtctgcaaatcgtccaactctggtgctaatggcgggtcttctcagcccacccgcagggcagggagggaggggtcggcgtggccccttccccaagcctcccccacgcccaccctgggtgcatgaaccgcccaatgcagaagctgccgcatgtcacccccctctccccaaagaaaaagtgtcatgcccccttcccacccaccctcactccccaccaaaataaacgtttccttttcattt

SEQ ID NO: 837 - DNA, 3813 bp, Homo sapiens
ctggatcttcctgccttgacagccccacagaaaatgctaagagcccaggaaggttgtgaagggtgtgtgtgtgtttgtgtgtgtgtctgtgtgctgtgtgtgtctgtgtgtgtttgtgtgtgtctgtgtgtttgtgtgtgtgtatgtgtgtgtctgtgtttgtgtgtgttgtctgtgtctgtgtgtctgtgtgtctgtgtgtctgtgtgtctgtgtgtgtgtcttgtgtctgtgtgtttgtgtgtgtgtctgtgtgtttgtgtgtctgtgtgtttgtgtgtgtgtttgcatctgtgtgtttgtgtgtgtgggtttgtgtgtttgtgtttgtgtgtctgtgtgtgtttgtgtgtctgtgtgtgtttgcatctgtgtgtgtgtgtgggtttgtgtgtgtctgtgtgtttctgtgtgtctgtgtgtgtgtgtctgtgtgtgtgtgtttgcatctgtgtgtttgtgtgtgtgtgggtttgtgtgtgtctgtgtgtttgtgtgtgtctgtgtgtgtgtctgtgtttgtgtgtgtttctgtgtgtctgtgtgtttgtgtcggtgtgtgtctctgtgtgtgtttgtgtgtgtatgtgtattgggaggacagtggtcccagctcctcaggggcatcaggctctgtagcagggccaccgtctcggcaggagggtgcaatggcctcacccacactgtccaggcagttctcttgggaccccttttagccagcacaggtgccttctccctcggcaggagggtgcgatggtctcacccacacggtccaggcgggtctcttgggtctccttttccagcacaggtgccttctccctaggaaacggcaaagatgtaatgaccacactcaggtgtaaactctgtagccgggtttctaaactagaacctactgatcgtgggataaaaatcaggaaacggtgaagatgtaataaccacactcaggtgtaaactctgcagccggatttctaaactagaagctactgatcatgggataaaaatcaggaaacggtgaagatgtaatcaccacactcaggtgtaaactctgcagccgggttctaaactagaacctactgatcatgggattcaggtgtccctgaacttggatggaaaaacgttgcatctttactttcaccagcctctaggctaaagtgagtgttcctcaatagtgaatgtggccaaaggacctagcggtctccacagaacctgggactccaccgtcagcaaagtcctgtgtattttcccatcgtgtttcagttgcttcggcgtcttgaagcctcatttttgttcctgcttcaacactgttggtcatgagagctgctgctagatctggatcagtaggttttttttaatctgttgcccaggctgtagtgcagtggtgcaatctcggttcactgcaacctccgcctcccaggttcaagtgattctcctgcctcagcctcccaagtagctgggagtacaggtgcacgccaccacacccagctgatttttgtatttttagtagagatggtggcggggggggaggggtctcaccatgttggccagcctggtcttgaacccctgacctcaggtgatccacccgcctcggcctcccaaagtgctgagattacaggcgtgagccaccatgcctggcctgaatcagtagattaacaagaaatccaataacaattactttattattttggtaaccgtatttcaatatagtgggtgtatgagttggttctcacactgctataaagatactacaagagactgggtaatttataatcaaaggaggttttatttatttactgagacagagtcttgttttgtcccccaggctggagtgcagtggtgcaatctcagctcactgcaacctccgcctcctggtttcaagtgagtctcctgcctcagcctcccaagtaactgggattacaggtgcgtgccaccatgcccggctaatttttgtatttttagtaggacggggtttcaccacgttggccaggctggtctcgaactcctgacctcaagtgatccacccacctcagcctcccaaagtgctggtatcacaggtgtgagccacctcgcccagcccacaaaggaggtttaattgactcacagttctgcatggctggggaggcctcagaaaacttacaatcatggtggaagggaagcaggtgccttctcacaaggcggcacgagaaagaagttcaagcaggggaaatgccagctgaagcctgggcgcaggtgaccacgcaggccgagaggtcccacgcccgcgaagacccagggaagctggtggtgcagtgcggtctgagtccgaagccctgagagccggagggctaatggcgttaatctcagtgtcagggccagagaaggtgaggtgagtgtcccagctcaagcagcgtggcaggaagaggggggcaaattcacctttctctgccttccgcgctattcgggtcctcagcggattgggtgacaccacccaccctggggagggcggcctgctttacagagcccactgattcaaatgctaatctcatccagaacaccctcggacatccccagaaataacgttcaacccggcaccccacggccaggggagctgacacataaagttaaccgtcactccgcccgcatggagagggagcccacaggaaggagctggtgctgctgtctcgaccctgaccctgggccgtgtgggtcgttctggcccttgcccctgcttgtctgtagctcccaccccacagtgaggaacctgccccaccacccaccatccatggacctaatcgctaagctgcagtgtgcagggggagcagtgtagggactgctcacctgtaccccgcggcagaagcgtgtgtctgccagggtacagggctcatgtgcgggtccatttgcttttggcttcacagacttcgtcgtttgtgagggtacccaggtcagccccatcccccagcccctccctacgtctgtaatacagctgctccctgggtctgtgatacagccagaggctctcgccacacacggcccgccttccgtcctagacccccagcctcttgactgagctttaaaatttgcatacattaaggctcactcttgctgtgaagttctgtgggttttgacagatgcacagtgtcgtgtctctgccattacaatgtcgttcacgttagtttcacagccctaaaaacccccctgtgctccaccgatccaaccatttcctctttcccgaactcctggcaacaactgtttccataaatgtatttttctggtgggtttttggtgaacaattttatcaaattagaaatatttcatttgtttcaatttctaatttgcccagaaatttttaaaaagtcaccgatggcatcacttgagacattgggacactttttgccctgtcatctattcagatggtatttgcacggatcagattctgatattaaaccttccttgaattcctgggagaaacccttagatctatcagggtcccagcaggaaagagacccacatttagagcaggttacttgcagcagtgtttaacaaaggggctctttataaaggtagggcagagtactggaaacctcaaggggcagtacatgtcccagggctggccaaaggcatgcctggtggagagaattttctggaatgtgaaggagagtgctgtggagaggagccatgacattcccaaggccacctcacacagtcatctgccatcatttgcagatcacatgtcagcttacttagcaagcctaacagaacggacaggaaaacgtaatgttataaacacataattctccccagagaattatggggacataataaattcaatgcaattct

SEQ ID NO: 838 - DNA, 3864 bp, Homo sapiens
gtacaagaccaaccatgtggcccatggtagtgagaaccttttctaccaacagccaccacttggcgtccacagcgggctgaaccacaactatgggaatgcagttacagggggcggaatggatgcccctcaggcctcgccaatctccccccacttccctcaagatacacgggatggtctgggcttgcctgttggctccaaaaaccttggccaaatggatacctcgaggcagggagggtggggaagtcatgcagggcctggaaaccatgtccagctacgtggaaacctggccaactcaaacatgatgtggggggcaccagcccaggctgagcccactgatggctaccaatacacctactcccaggccagcgagatccggacccagaagcttaccagcggtgtcttacacaagctggactctttcacccaggtgtttgccaaccaaaacctgcgaattcaggtcaacaatatggcccaggtgctgcacactcagtcagcagtgatggatggagcccctgacagtgctctccgccagctgctgtctcagaagcccatggagcccccagcaccggctatcccttcccgctaccagcaggtgccccagcagcctcaccctggtttcactggtgggctgtccaaaccagctcttcaggtcgggcagcaccctacccaagggcacctgtattatgactaccagcagcctctggctcaggtgccagtgcagggaggacagccactgcaggccccacagatgctgtcacagcacatgcaacagatgcagcagcaccagtattacccaccgcagcaacagcagcaagccgggcaacagcgtatctccatgcaagaaatacagacgcagccgcaacaaattcgcccatcacagccacagccgccgccacagcagcagcagccgcagcagctacagctgcagcagcggcagggttcaatgcagatacctcagtattatcagccccaacccatgatgcagcacttgcaagagcagcagcagcaacagatgcacctgcagcctccttcttatcacagggaccctcaccagtataccccagagcaggcacacactgtccagctgattcccctgggctccatgtcccagtactactaccaggagccccagcagccctacagccaccccctctaccagcagagccacctgtcccagcaccagcagcgtgaggacagtcagctgaagacctactctagtgacagacaggcccaggccatgctgagctcccatggggacctggggcctcctgacacaggaatgggagacccagcgagctcagatctgacccgggtcagcagcaccctcccccatcgccccctcctatcccccagtgggatccacctcaacaacatggggcctcagcatcagcagctgtctcccagtgccatgtggccccagatgcacctacctgatgggggagcccagccagggtcccctgagtcaagtggccaacccaaaggagcgtttggggagcagtttgatgccaagaacaagctgacatgctccatctgcctgaaggagttcaagaacctgcctgccctgaatggccacatgcggtcccacgggggaatgagggcctcccccaacctcaaacaggaggaaggagagaaggtcctgccgcctcagccccagccaccactgccgcctccgcctccgcctccgccgccaccacagctccctcccgaggcagaaagcctcacgcctatggtcatgcccgtgtctgtccctgtcaagcttctcccgcccaagcccagctctcaggggttcaccaacagcaccgttgccgccccctccgccagagacaagccagccagctcgatgtcggacgacgagatgcctgtgctcgtgaggatgaccctctctcccccacactcaccccaaggggctgccccccgcacgcctgctgaaatccccaggaagcatcagccgagtgtgcccaaagccgaggagcccctcaagaccgtgcaggagaagaaaaagttccggcaccggccggaacctctcttcatcccgccgccgccctcctacaacccgaaccccgctgcctcctactcgggcgccaccctgtaccagagccagctgcgctccccgcgcgtcctcggggaccacctgctcctggaccccacccacgagctgcccccttacacgcccccacccatgctgagcccggtgcgccagggctcggggctcttcagcaatgtcctcatctccggccacggccctggcgcccacccgcagctgcccctgacgcccctgacgcccacaccacgggtgctgctgtgtcgctccaacagcatcgatggcagcaacgtgacggtcaccccagggcctggagagcagactgtagatgttgaaccacgcatcaacattggcttgagattccaagcagaaatccctgaactccaagatatctctgccctggcccaggacacacacaaggccacactggtatggaagccctggccagaactagaaaaccatgacctccagcaaagagtggagaatcttctgaatttgtgctgttccagtgcattgccaggtggagggaccaattctgaatttgctttgcactctctgtttgaggccaaaggtgatgtgatggttgctctggaaatgctgctactgcggaagcctgtcaggttaaaatgtcatcctttagcaaattaccactatgccggttcggacaagtggacctccctagaaagaaaactgtttaacaaagcactagccacttacagcaaagactttatttttgtacagaagatggtgaagtccaagacggtggctcagtgcgtggagtactactacacgtggaaaaagatcatgcggctggggcggaaacaccggacacgcctggcagaaatcatcgacgattgtgtgacaagtgaagaagaagaagagttagaggaggaggaggaggaggacccggaagaagataggaaatccacaaaagaagaagagagtgaggtgccgaagtccccggagccaccacccgtccccgtcctggctcccacggaggggccgcccctgcaggccctgggccagccctcaggctccttcatctgtgaaatgcccaactgtggggctgtgttcagctcccgacaggcactgaatggccatgcccgcatccacgggggcaccaaccaggtgaccaaggcccgaggtgccatcccctctgggaagcagaagcctggtggcacccagagtgggtactgttcggtaaagagctcaccctctcacagcaccaccagcggcgagacagaccccaccaccatcttcccctgcaaggagtgtggcaaagtcttcttcaagatcaaaagccgaaatgcacacatgaaaactcacaggcagcaggaggaacaacagaggcaaaaggctcagaaggcggcttttgcagctgagatggcagccacgattgagaggactacggggcccgtgggggcgccggggctgctgcccctggaccagctgagtctgatcaaacccatcaaggatgtggacatcctcgacgacgacgtcgtccagcagttgggaggtgtcatggaagaggctgaagttgtggacaccgatcttctcttggatgatcaagattcagtcttgcttcagggtgacgcagaactataaagccctgtgtgtcacttagagacagtgaaaacccacggcctccatcttcattaatcaggaaacctggactgcctgcttgttttgtaacccttttaaactacctgttttaaaagtggtcattttattcaggtttagaaaaaaaaatcctatttcttttccttttatttaaaaaaatttgtttttgtggggggttgggggaataaataattggcacaact

SEQ ID NO: 839 - DNA, 3378 bp, Homo sapiens
acccgacctcggctcctcccacgcagcctcggttaccctctccgccacccgctggacctcggcttccagggccctgcctcggttcgcccgccctcaaccccgcacttgctctcggcttccgctctttctgcccagctcgactctcccgcccgccctcaccccaggtgctaccctcccttcgccctctctgccccgcgacctcccgcgcttggcgccggtgccaccgcttttcggtccagctcggatcctcccgcccggcctcggctcttccgccgagcctcggcttcccccgcccagcttcggcttccttcgcgcctggcttcggctctttccgcccagcttcggcttccccatccgtcctcgcctggcgtcctaccatggcgctgcctgtccctctctgtctccgacctgaaacttcccctccctccgtcctggccatggctcggcttctccgccgcccttcccgctgcttttcggccctgctcggctcctcccgcctggcctcggctcctcccattggccttggcttttccggttcctctcggccgacctcggctcccaccacccgtctttggctcccctcgcccagccttggcttctccgccgctcctcggctcagttcgttcagttcggctttccccgcccggcttcagttttctccgatttcgccgcttcagttcggctctttccgcgtctccccatggcaccctgggctcggcgtggctctgggtctggttgggtccttgtcttagtccgggggagttgcactaattgagttcccgtcattatgatatggaggtgccagtgtctccacatcctggtcaatctgttatctttttaaaagaaaaaaattcctgatcaatgaaaaagggaatctcaatgtattacttcccatttttcttaggagagccacttgtatttctgtgaactgttgttagcatttgctcctttctctaattaactcttggtctttctcttactgcttcgtaggagttcttgaatactaacaaattattatgagcaatgttcaagcatggaaataatttttgaaaaaatgtacaggaacattcatcagtaacattttactatactttgtcatatacatctctgtatcatccatcaattcatccttttaaatgcattttgaagtaggttgcagatagcttacatatcattaattagagttcaaaatttggggctggaagatctaaggtggctcatcccctggctagcaatgtggtgctggtgagttggttactggttacggggctgcttgagtctcctcatggcatggcggatggcttctcctagagaaagagcaatagaagagaccaaggaggaagcttcagtgtgtcttatgacctagcctcagatgtcacatgcaacagtgctgtattgatcatatgggtcgtgtatgattcaatattggaggtggggtacacaggacaggaatatcaggtggcaagggtctttggtgagcattctgaaggctagtcaacacacccacctttccttcagaccacctcttttcatcagcccggaatctctttttttgtgctggagtgcctgatctgattgtagctgtttgaggcatctggaattcatggccgggtttagaacaacttggaaggtctcctttccccctcttctctttcttttacccttctcccctctctcttcctctcagccttacccccaactctagtctttctttgcttctagtgagcgagcaggagatgctctgagagtcaactgggaatgcagctgataagggtctgctgggtgcaggaaatgttggaaggtttgcttgctgggctgtatcacctcctgtattatgggagcttagagtatttgccagcttgtcaggactaccatcgtcttccatgttctgagactggagtacccaacattcccctagcaggggacacttggcttgatagggctctatcaatctatattgtgagggtagagatactcatattgcaaggggaggctgcaggagttgcctgctggggctaagattattccttgtgtttgggataaaggaggggtcaccgcaggggcagtcaactcatgttgggggagacgggatttgcattctgggctcccctcctcgtttatgttaagggtgttgcttgctgatgcttctattaactcttactttgggataatgggaagagagatagttttctggggtgtgagtttgtcacttatgttgtagaatctggggggctgcctgttgagattctgaccattgcttgttttgggtgtcattgctggggatacttatttatagtcttgggaagacaagggatgcatgttgcagcggtagtgggtaagaatggtggcatttgctggagttcttttttttttttttttttttgagacagaatcttgctctgtctcccaggcttgagcgcagtggtgtgatcttggctcactgcaaactctgcctcccgggttcaagagattctcctgcctcagtctcctgagtagctaggactacaggcacgtgtcaccacgcctggctaatttttgtatttttagtagagacggtttcaccatattggtcaggctggtctcgaactcctgatctcgtgatccacccgccttggcctcccaaagtgctgggattacaggcgtgagccaccatacccggcctggagttcctttcttgagtgtgtagaggattgagggttgattggtttttggagtttccatcattaatgtaggagcgatacggggaatcacttggcgaagctttcattgtctctgatgttggaggtaactggagggccagtgcctggggcttccatttttttctagtgttgaagggtcaagagcatttatcagatagaggccttactgtgtattgtttggggagaggatggagggattattggatggggttccacttatctctagttggggagggtcatattctgggtctccgcttgcctgtactgttggtatagactgggtaggccattgggcttggagtccccattctttagtgttgaggggcatctgaaggggtcatttcagggacttctgttatagttttggacgtgactgaggggtgcttgctggagtagtttcgcgatgacggaggtcttcatgtttggactccatcttttgtgtttgtaagtgattgaggggtggagatctggcatcctgttgcctcttgttttgagggtgactggtggttacctgctagggcttctgtcagctctactgctgtatgcagattgtgagaatcacttgctggggcttccataatctctagtcttagggggactgggaaatggcttgccatgctttctattatctctagttttaagggaccagttcaatgtgatttaaaactctttttatttg

SEQ ID NO: 840 - DNA, 3054 bp, Homo sapiens
agtggcagcagcagccatggggaagccgggcgtggaggcagcaccgggctcggagctggccagggttccctagcctatggagcacgcagccaccacaggccccaggcctggacctccctctcggcgggtggagaatgttgtgctacgagccaaggactggctgccaggagctcctgggggcaccgcagtgtgggccaccagcttggaagcagaggtcccaccagatctagcgctcaataaggagcagcagctgcagatctccaaggagctggtcgacattcagatcacaacccaccacctacatgagcagcatgaggctgaaatcttccagctgaagagtgaggtgcagcccaagaacaccatgaaccccgagaatgagcagcacaggctggggagcggcgtgagtgtgcagccacctagctcaggggagagggcagcaccagagaccccaagcctagggtctcatccagccagccctgtgtgccccacagctgcagggggaagtgaagtgggcgctggagcatcaggaggcccggcagcaggcactggtgacgcgtgtgtgagtggccatctcacctggggccccatcctggagcagagagaacccctgatcgtgggcctgctgagcctcacccccgtgtcttcagggcaaccctgggccggcagctgcagggagcccgagaggaggccagggcagccgggcagcgactggccacacaggctgtggtgaggctctgccctgactgcttggagacctggagggtgggggccccagaagctcagccggggtccactctcagggcacaggtggagggctgcttccaccccaggtgctgtgcagctgccaaggccagctccgtcaggcagaggctgaaaatgcccggctgcagctgcagctcaagaaactgaaggatgagtacgtcctacggctgcaacactgcgcccggcaggcagtggtgagccctgcaggagcaccctgaggcctagggagcccaagcctggcctgggtgtgctggatagcttcagggagaccccagggccccggcactgctcagcctgctggggtggggggatggttggaaaagatggggggtgggccccatgcggacccagcccaccgcctccaggagcacgcagatggtgcaggccaagcgccagccaccacggccctccggacattcctggaggcgactctggaggacatccgggcagcgcaccgcagccgtgagcagcagctggcccgggctgcccgcagctaccacaagaggctggtggatctgagccgcaggcatgaagagctactggttgcctacaggtgggccccgctgggatgggaggtgtcaggcatctgtgggtctctaagcctctgtgcctcaaaggcttggtgtgcagcaggagtggccccagacagacactagcctaccctgacagggcacctgggaacccccaagctatttttgacatagccagcttggacctggaaccattgcccgtgcccctggtcactgacttcagccatcgggaggaccaggtgaggctagagacccccagaagctccaggcccgggtgccccccacccacccactgccccacactggccccaggcctcatcctgggctcaacagagacctcagccccgggcctctgaggggcttgccttgttcagccaactgaaacgtccccaccacaaacctctgtagcacggcgggcctggggcactgctctcatccccaaaaaagagacccggtggagcctcccaggggggaacatcagagccacagtgagtgccctcatgggtgtgggggaggcctgtgggggatgagcagagagcacaacgcctgcaccctggggcccccagttgctccaccaagcccccgccagacagggtctggtcacagcaatgcactcagtggcacatccccaccctggggtccctccgtgggtcccggcgacactgataatcacaggaaagggaagaggggctgctgcaggtggagctggccttgaacacggaggatcagggagagcacacctgagggaggtttccgctgagacctggaggacgcgaggggtgggagcagggcgcctggtgaccgggccagcccttgcctctgggcctccatgttcccagctgtacaatgggcagggctccccaaggaccatttcctggggtttagggcacacccgtgtgggggtggcatccctgttgatgctggagtcactgtctgggctggccttgtggtttagccctcccccagcagccagcagaacccctgggcccgggctgtccctatatacggatggctccaaggcctgggggggggcgccacaggagcacgggggggcccatgcctccctcactcactcccaggtgtcccctcccggctctgggaacctgactcagcacggtcacgtctgtccctgtgtcaccatgccagctctcaaaaccactcctcctttcctctcccctcacaggggcctggacgctgcatcctgggcccagatccaccagaagctccgggacttctcccgcagcacccaggtaggaggcaagggctggcccaggcccatcctcacgccatgccccagctcatggcttacatccccatgccaggcagagctggaacgggagcgggcacagctgctggtccgggccacgatggctgaagagcaactttctgagctacaggagtacgtggaccagcacctgggcaggtgggcagagggagctgggtgtgaccccagggccctggtctggttggaatgaaggatgatggctgcctcaggcgctaaaggcagacctgtccacagctgggcaagtcacttaagcatggttcctctgagcaggtacaagcacgaaatcctgaggctgaggaagctggcaggtgcaggggacccctggaaagtgggggctgtgcctccagccaagccccagcatccaaggaccggcagccactaggccgtctcccaaggagcagagcagagcagagctcctcagccagcacagaaccctcccacccagccccccataaaacatgagtcaggatagaaccc

SEQ ID NO: 841 - DNA, 4265 bp, Homo sapiens
caggagaaaagtaactgctgcaatagtgctgtcaatgcaccatcacttgtaatgaattctgggaataatgctagtggtgtctctggaaagggagctgcctggggtgtgttgttggtaggagggcctggcagtggcaagacggccctatgtactgaactcttatggccaagttcacctgcaagtttgcagagaggtttacaccgccaagctttggcctttcatttctgcaaagcccaggactctgatactttgtgtgttggagggtttattagaggtctagtagcccagatctgccgcagtggactactccaaggatatgaggacaagctaagggatccagcagtccaaagcctcttacagcctggggagtgcgagagaaacccagccgaagcatttaaaaggtgtgttctactccctcttctgggaatgaagcctccccagcaaagcctatacctgcttgttgattctgttgatgaagggtgtaacattactgaaggtgaacaaacgtctaccagcttatctgggactgttgcagcacttttagctggtcaccatgagttctttccaccatggctattgcttctctgttctgcccgaaagcagagtaaggctgttactaaaatgtttactggttttcgaaaaataagtttagatgaccttcggaaggcatatatcgtcaaggatgttcagcagtacattcttcatcgtttagatcaagaagaagctttgcgacaacacctcacaaaagaaactgcagagatgttaaatcaactgcacattaaaagcagtggatgctttctttacctagaacgagttttagatggagttgtagaaaattttattatgttaagagaaattcgtgacatcccaggaactctaaatggtttatatctctggctgtgccaaagactttttgtaagaaaacaatttgcaaaggttcagcctattttgaatgtgattcttgcagcctgccgacctttgaccataacggaattatatcacgcagtatggaccaaaaacatgtcgttaactttggaagattttcaacgcaagttagatatcctctccaaacttcttgttgatggactaggaaatacaaaaatactgtttcattatagttttgccgagtggcttctggatgtgaaacactgtactcagaagtatttatgtaatgcagcagaaggacacagaatgttggctatgagttatacctgtcaagccaagaatttaacaccattggaagcacaagaatttgcattgcacttaattaactcaaacttacaattagagacagcggagttagctctgtggatgatatggaatggtacacctgtcagagattccctttctactttgatacccaaggaacaagaagtgctacagctgttggttaaagctggggctcatgtcaacagtgaagacgatcgcacatcatgcatagttcgacaagccttagaaagagaggattccattcggacattattagataatggagcttcagtaaatcagtgtgattcaaatgggagaacattattggctaatgctgcatatagtggcagtcttgatgtagtcaatttacttgtctctaggggagcagatttagagatagaagatgctcatggacatacaccactcactctagcggctagacagggacataccaaggtggttaattgtttgattgggtgtggagcaaatattaatcatactgatcaagatggttggacagcattaagatctgctgcttggggtggccatactgaggtagtttctgcactactttatgctggcgtaaaagtggattgtgcagatgctgatagccgaacagctttgagagcagcagcatggggaggacgcgaggatattgtactgaatttgctacaacatggcgctgaagtgaacaaagctgataatgaaggtagaactgctttgatagcagcagcatacatgggacatagagagattgtggaacacctactggaccatggagcagaagtaaatcatgaggatgttgatggcaggactgcactctctgtagctgcactttgtgtgcctgcaagtaaagggcacgcatcagttgttagccttttaattgatcgaggtgctgaagtagatcattgtgataaagatggcatgactccactgctggtagctgcctatgaaggacatgttgatgtggttgacttgcttctagaagggggagcagatgtagatcacacagataacaatggccgtacacccctcttagcagcagcgtctatgggtcatgcatcagttgtaaatacacttttgttttggggtgcagctgtggatagtattgatagtgaaggtaggacagtcctcagtatagcttcagcacaaggaaatgttgaggtggtacgtactctactggatagagggttagatgaaaatcacagagatgatgctggatggacacctttgcacatggcagcttttgaagggcacagattgatatgtgaagcacttattgaacaaggtgctagaacaaatgagattgacaatgatggacgaatccctttcatattagcttcacaagagggtcattatgattgtgttcaaatattactggaaaacaaatccaacattgatcaaagaggttatgatggaagaaatgcactgcgggttgctgcattagaagggcacagggacattgttgaattgctttttagccatggtgctgatgttaactgcaaagatgctgatggtcggcctacactttatatcttggccttagaaaatcagcttacaatggccgaatattttttagaaaatggtgcaaacgtagaagcaagtgatgctgaaggaaggacagcacttcatgtgtcttgttggcaaggccatatggaaatggtgcaggtcctgatagcataccatgctgacgtcaatgctgcagacaatgaaaagcgctctgctttgcagtctgcagcctggcagggccatgtaaaagtggttcagcttctgattgagcatggtgctgtagttgaccatacatgtaaccaaggtgcaactgcactctgtattgcagcccaggaagggcacattgatgttgttcaggtcttattagagcatggtgctgatccaaaccatgctgatcaatttggacgcactgctatgcgtgttgcagccaaaaatggacattctcagataattaaattattagaaaaatatggtgcatctagtttgaatggctgttccccatctcctgttcacacaatggagcaaaaacctctacagtcattgtcttcaaaagtgcagtcattaacaattaaatcaaatagctctggtagtactggtggaggggatatgcagccttcgttacgtggtttacctaatgggcctactcatgcttttagttctccttcagaatctccagattctacagttgaccggcagaagtcatcactgtcaaataattccctgaaaagctcaaaaaattcatctttgagaactacttcatctacggcaacggctcaaacagtgccaattgatagctttcataacttgtcatttacagaacaaattcagcagcattcattgccacgcagtagaagtcgacagtcaattgtttccccatcttccacaacacagtccttaggacagagtcataattcaccaagtagtgaatttgagtggagtcaagtaaagcccagtttgaagtcaactaaagcaagtaaaggggggaaatcagaaaattctgccaagtctggatcagctgggaaaaaagcgaaacaaagtaattcttcacagccaaaggttttagaatatgaaatgactcagtttgatagaagaggacctatagccaaatccgggactgctgcaccacctaaacaaatgccagcagaatctcaatgcaaaattatgataccttcagctcagcaggaaattggtcgatctcaacagcagtttcttattcaccaacaaagtggggaacagaagaagagaaatggaataatgacaaatccaaattatcatcttcagagcaaccaggtttttcttggtagggtttcagtcccacgaacaatgcaagatagagggcatcaggaagtgttggagggatacccttcctcagagacagaattaagccttaaacaagctctgaagcttcagattgaaggttctgaccctagcttcaactataaaaaggaaacaccattataaaagtttcctattctgtgaaacagaagacattgtgatggagtggttcttcagctactggatggaaacatatgcctgttgatttgctg

SEQ ID NO: 842 - DNA, 3733 bp, Homo sapiens
ggggtggtcagtggaattgggaaaaagtctacaaaagtacaaattttcagtttaattttaactttgcgcttcactcacacccaggacttggcaggggaagtgggccttggttttttttttttctttttaaagcagaacacaccctgggtggaaaagggatgttctctttgcatggaagggttagaaccaagtacagaggaaatgggttggtattgtagcaagagttcaggggtgggtctaggctttgaaactagagcactaggaaagtgtggccctcatggaggcaggcagggaagggaatgggatgtctttcacaggcagctgttgggctgacatttttgttttgtcctgtttggtgcatttcagatacttcacagctcacctgctgctctcactgggacccctcttcatctcatgacaaagcagtgggtctttcccccatgtggtttgggctttttggtggtatcagcaacctcaggtctaagccctgtcccctccttcccctctgtgatctcaccctgcatggtgctgaaaccaaccagggaggaaatgcagaaacagtggggattctgaagacaccacctttaaaacgatggggatttcccaagggagtggaagcaacctcttgctatttggggaagagcagggtcccaggcccctctctgtatccttgccccctcctgcagcgtcatctgagccagggcagggttaggctctgtgctttggttgctaaggatatgtaaccagagcagagacctctaggggtggtgcccacctggctggtggaacagttagaagaggagctgaaaagaaacagttacagctgtaggggcgggaaggtgtgatccctttccttacccgtcgtaagagtcatggccaacacttataacaaaagaaaggctaacaaaagaagagcgtaacaaatttatttaatcaaagttgtaagtgacatgagaaccttcagagaagaagaaccaaagacccagggaaactgcctatttttatacttaggtttgatgaagaatagacagccatgaagaaatgggactggacaaaggggtgtaggctgagagggaacccagcaaggcctgtctgttcagattctttgtggcctctctgtgtagcattccttcctcctagatatggggcaggacttccctggcatgagggtcttcaagggagaagggacaggagagagtaacctttctcggctttgctttgggagagaggaattctagtttctgtgacccgccttggggaagagaagttctggattctgtgacttctggggagagagggtgagagacaggagggcaagagaaattcacagagcttgcttctgaggccttccaatctcctttagttcaaagtacccagcacgccaaagccccttacatttgggtattgtgttctgagccccagcacagccaagaacttgtagaattgacttgggggtctggggagagtcccaagaagccaacaggggcccctcctcatcttgtggctaacactagccacctgagtgcagtagacacccaccctcctgtgaccttcttttgggattttaggataagcagttcggacgtgcctttaaaacggagagaacacaccccaaggagtggttatggggattaaacgagactgtgtatgaagcacctagagtgtgcctagcgagtgcttgagaaagatatgacgattatttttaatcaaagcattaatagtgattgcttgagtattgtcctccagaggagcagccaccagttttggtgttgtggtaggagccagggactggcctcgtcagggctccgaaacctatgtctatctgtagcattcctaggcagcctaccccagcagcagccccttgggctgtgggcaggggtggcaggcagcactgttcctctccaggaaggagaccgacttcctggacgaattccctgggctccccagcactgctctctgaggccctcctctcctcggccaacggcagtaaggagaagccattgacccgtctagaaaaaccgcatgtctgcagtctttgagggtagactggaatctcttctcatatttgccttgctttggtggagcttcaagaattcccaggccttccaaggaaaccaattactaaagaagactgtgggccacgtgactccagtgtttactgcaaacgaaggagatggctcccctcccccaacacagttactctccctccatctgcactggccccctaaggcctggcttcctggctctgcgatgctttcctgccctagggcagaaggcctcacaggatttattcccaggcactcttgccatgaccttgagaaggtggcttgacctggacatctggatctcagggactgagggggtgggaaaggactgagcctccccctcccagacccaacaggaaggtgggctttggtgaccatttcctaggctgagagctccttagctccaggagagggctgcgctccctggttctcctgctctgtgggctgtgctagatgaaacccacaaattgctgctgtcccgggcggagtggcatgcctccacccaccagtgaagaatgaaggcagggcagttgcagggccctgcaggactctgagatccagatgtgtaccccagtgctcccctgctctgcccactggcaagagggggctgaggaggggcatagcaggcctcatgtggactctgtttccacctcctttcccccatatctctacttggcccagagatgcctgagtaagaggggcacctagtcattctgggcccagaaagaagaagctaggcatgttggcctgctcaaaggagcaggagcagccctggacagggacaggttagaaagcctggctgcttatccaagagaagaaaaggccctgaggggcaggagcaaccctttgaacaatgctggactgctgttgagaaggaaggcttgtgccatgtgacccattggtgagaaatcagggcctgtgcatggaagttccagggagggaggcaacaaatccagttgacattggtgaaagaacttgtcctggacaacagtcggtcgaatgaaggcaaactcgaaggcctcacagatgaatttgaagaactggaattcttaagtacaatcaacgtaggcctcacctcaatcgcaaacttaccaaagttaaacaaacttaagaagcttgaactaagcgataacagagtctcagggggcctggaagtattggcagaaaagtgtccgaacctcacgcatctaaatttaagtggcaacaaaattaaagacctcagcacaatagagccactgaaaaagttagaaaacctcaagagcttagaccttttcaattgcgaggtaaccaacctgaacgactaccgagaaaatgtgttcaagctcctcccgcaactcacatatctcgacggctatgaccgggacgacaaggaggcccctgactcggatgctgagggctacgtggagggcctggatgatgaggaggaggatgaggatgaggaggagtatgatgaagatgctcaggtagtggaagacgaggaggacgaggatgaggaggaggaaggtgaagaggaggacgtgagtggagaggaggaggaggatgaagaaggttataacgatggagaggtagatgacgaggaagatgaagaagagcttggtgaagaagaaaggggtcagaagcgaaaacgagaacctgaagatgagggagaagatgatgactaagtggaataaaatactatttttactgcc

SEQ ID NO: 843 - DNA, 4659 bp, Homo sapiens
atttggggatgaagacaaccccggaagctcccaaggctgactgtcatgcggatgttgcctgtcctttgcatgggcagacaggccatccttcctgctctgttccccaaaggtgttggattagacatttcttttgcctcctctggactcagaaagaatagatgacagctggtcagagtctgccctcatgcagttcatggaggagggtggctgtgggaaggttcaggtggctcatgtcccatctacatactgctggatcctatatatatgtgccaaagcagccctaagaagtttaggaccaagggcaacctcctggctaggggctccactgtcccagacaggcctttttttctcccttgctcttcattcttccgtctctttgcatttctccctctctcccttgcaccactgtctctctctctctctctctctctctctctctctctcgcctaggaggcttaccaggcttaccttcctcttcctactctggggttcgagccccacttctggctgcatgctccggccaccacgctctggtggtttcagtctgctgactttctcaactgctccagcctctcctgctctctcagaacctcaccctgccaccacccccatctgtgtcttcctcctaactaaggaccactgcaaagagagacgggctggctaacccttttcagcaagaaaaacctcaacttgctgaatggtaaggacatacttaggtagttggttcctacttttctcttggtttctgtctcattcctgtctgctccctggagacccagagaccctcaccagtggttagtagttaggaatacgccaagaggaccttgatatttgtggttctaatggcttaaaggatgacagctgccacttgggagagaagtcagactggaggtggcagtgttaaacaaaggtggctggtattcaacagagccaaagttcccttggtttaaaaggatgtctatccctggagcctgagtccttccaagaatggggtgttgcggggggatgcttctctacttaacagataggaacatttgggcgagggacacggactgagcagcagaaggcaccagggattctggctggttccttccaggatggacacaggcccctgatattcagccaggccagcagcatcttcctcactgggcttctcccccaaacacttggttttggggaccaggtggcaaagggattaaggaacagtttgccccaacagattgagagttcttcctacggtcaaagaaaagggagcaaggccctggggaagagggtcttggtagtcacgaactgggcctggtttctgggaaggctggatttggttcaggcatctcccctaaatttgggttctatggcccagcctgcctggggcggggtggatgaatttcgattgcagaacaagctgccttggtgggggaagggatagttgccaccctggtgctcaaaattattggtctcctgtgcccctcaattgaggtggaggtacctgtacaagagcttcccagttcccactggacaccccatgcatggggtatcccagtgggatagccatcggcctgcccatggatggttgctagggaataggaatctgggccaaaaggattaggggtgacggagtagacctttacaacagcagagatgggagggcccccaggaatacctgtcaaggcccctcgttgttctaaaggggaaactgaagaccagaacagagaagtgacatgcttaaggcgacatgatgagtcaagtacagacagagtctggcaggctccaagtccgctattcttcctgcagtccacaggtgctgggtctagtgcttgacacagcagcatgcaccagcccagacccctccccttccctccccagcttggcctgagttggtgcagaagaggcactcatgcttccttaagggcccagttttcaaagctgaggttcagagagggaacgtgatttgcccaaagtcatacagttggctaatgacagagcctgggatagaacccaagtctctcttcccccagtcaaggccttccctaggctgagctgatgtccctgggcaaataggctcatgtcctttggcactagttcccagagtcctgttcccaccccccatcagcatgatgtgactcatgtcagtttgcatatgggcccctcttaggctacttatctccctcccatcttgcaagggtggaacgtagtatcaaatcatcttcaggtgacagcagcctgggatagtgtctgatgggtgcaggctgggcaactggacacagaactggacacagaacaactggcaggtccctactaggtctcctggccttcttcattggttctttgggggctcagaaggtccgcacgggaagggctctgcaggaactcttctcagaaagtcctggtagcactgctgcccccgactcttcctacagaatcacaccccaaaacccaccatgttttagtcactcctggctgcctgctaccaagctgatgtccagagtgccagctactccttaggacaggctccagcagcccagtggatgagggctccggagggcctggggaaggaagccccgctgagaaccacatcctggcatcctgacatggcacatggatgtcgtggggggcggtcagtggagcctagcctaggagaaaagggagcaaggccctggggaagaggtgatgggaatagatgagttgggatgggggagtcggtggcctggtatggcaactttgtcttttctctggcaataatgaccttcaggtctaggaggtgctggggaaggaagggcaagtgggtgccaggcattcagcttggctactttggatcccatgggaggggctttcccctatggccctggcaaagtcacctctatcccaaccacagttgcctctgcttctcaagtgggacacattcccagtaaacacgtggcaaagggactaggaacggttagccccaacagattcagagttcttcctgtgggcaaatgggcagaagagtagggtgtgttcagccaggaggggaagttgaccgatagcgtggctgttgactgatagagtggcccaggctgtagcctcagggacagggattagacttgtcccattctgtcccaaggcaagacattaggactggcagggagagacagatattcatccagtgtaaatcagagctgtgcagagggtcgagtttttgaggtaatgaaatccccatcccagaaggtatttaagcataacttaggggtgttgttgagaaagttcctatatcagggcatacttttagatagcctttaagtctactgataatggccctctgcagtcttctttttaggactcaaatcatagaagtgggataaaagtcttgcttgcctgaagataagtataacacatacaccggcaaacatgcacacgtgtctggccctctgctttcttactcagttgtggtcttccccaggtcccctctatacccctgtaccgctttacctggttcttctgtatctgatctatcagtggtggggacgtggggggtgtgggtgaacctctatgtacagtgagaaatacgctgggagagggtgggaaatttgaagacaggtgaccttggggagcttctttccaaagatgaggccaagtctagcttgccttcctaggcccaccagccaggtcagaaactcctgtctttccagtcaagactgtagatggaagatacaagtcctccctgcctccctatccctgagtgctcccagctttgccaaatctgtcaacatctccctcaactccccccatagcttgctcatacccgtgcaggctgtccactggagctgagcctgctggaagggctaaggggtggatttcatggccatcttgaacttgaagggcattgaaggaggaaggtatgggactcttggctagatcaataagaagagccactgtttactgagtacctactctgtgcctggtgctgatctaggtatttgatgtatatcagcttacttcatccttagggcaaggccccgtccaaatgcattcttttctcatttttacacatgaggaaacaaagttctgcagtattataagtatgtgtacaaacaaggtggcacagctaggaaacagcagagccaaattcacactcaaggcctgatgaaccaaagccattacatgacaccaggagaaaggacagtgaactgggctctcgcagaccgaacacttgtgggtgagggaagggtggcttggaaccaaccctaaaatgaccatggacaacagcataagggcaaaagtgtgagcagaggccacgctttcccggcgggcccctcctgcccacccctacatggcctggcccttggccccacagctctgtgcaaacagctgcagcatctgctggccaccttctcctcccctggcttctcgctccactcccttcctgccaaaagcctgtgtatcctctgcttcacctactaaacaattgtctccctgtccccacccgtccccttcagcctgagccacattccaactttaagttgccctcgactcaggaagactctcctctgctcccaggcctcctctcttcctctcctctgccccccaccttctctgccgcatttcctctccaggtccacatcctccctctcccctcactttgcaagacccactgctcccacattaaaatgctcctaatgcatg

SEQ ID NO: 844 - DNA, 3334 bp, Homo sapiens
gtttatagtatagactactgaatcttatcttaaatatgcaaaatatatgcataactaacctcccaagctgcgttccctgctctatattacacccaacaatgtagcctgttcttaaatggttctcctaaaagtcttagaatggagcttattatttgcttttaaagtgtaagcacagagactgtgtgttagatgtgtggccttctgggtgacatgttctgctcctagatactctaagggtgaagtcagcaaacctttggcagtgcaggtggggagtgaaaccaatagtcttgcatagataactccccagagtccagaatgagccaaaagtaattgatatgccagtctttgccagcatgtttggtgaatcagagcagcaggtgtctgttacggtattggggaaggttaaatcaccgactgcattgctgatgtggctcttgcttgtgcccatcagcttcccagtccccagaacccccagagtcctagactctcatcattctattcctcaggacaacataaatattatcaggagcactgtgagcacagtcctgcttctgctacttaaagttgaagggaaacgagtatccttacatctctgtatcccatgttcccctgtcttcatgaataagtggtttgattgttttgaggccaacttgagtttatagagcttgtctaataaaaagatggatgtccttggggaaaaaaagctgaggctaataaggtgagagagaaacggaatcctttcaatgagctaagaaattacttcaattgaaaagcctgggaagtgaccctatcttggtcaacatatttcatgggcaaggtctggggatgtctggtgtcttcccaacccatgaaggcacccatcccacctgggtttgccctttctagatggtggcccatctcaaggatatttttctttctttctctgatccaaatccaaggactatgttctagtccttcagaaatctatactaacaaactggataagtgattctgcctcaaagttgcataactacagaatcattggtcaagttcttactgcctgctcacttattcatcaggaacttattgtgtacctgccatgtatcaggtactctactaggtgtgggggttacaaagatgaatgtagtgcagtccctgaactgaagaacatagtctcatcatggatgaaagtactccactaacataagatacattattattgtctaacatatgtgatgttattatgggtatggtacaagatacagtggaaacagagatgagaaagctgatcttttacttggagtggttggctaagaattctcatttcagtatggctttaaagaattcaagatacggctgggtgtggtggctcacacctgtaatcccagcactttgtgaggctgaggcaggacgatagggataaattgtttctataaaaaaagtaaaaatgttagctgggattatgggtgtgtgccaccatgcttggctaatttttctatttttagtagagatggggtttcaccaagttggccaggctaatcttgaactcttgacctcaggtgatctgcctgcctcggcctcccaaagtgttgggattacaggcatgagccgccacaccctgccaaaagacccatctttcaatactgccacatttgggattaagtttcaacatgaagtttggagaggacaaacatcatcatagtgggagatctaaatacacctttctaaggaactgatgaatgaaggaaacatagaagtctataaagacatagaaaatttaccaacaagcttacttaatgaccatatataatataattgtgaaatacagattcttttcaactgcacacatggaatatttatgagagtcttaaagcaagccaacaaattttagattagtaacgtagaaataatcttctttaaccgtaaagcaattaattcaggaatcaatagcgagagataaccagaaaaaccctatactttcaggaattttagaatatactgctagatacattatgagtcaaaaaaagaaaactaatgggagttagataatatttagagctgaatgataacaaaaatactagataccaatatttggaccatgcagctaaaggggtgcttagaaaaaattttgtagcataaatccttacattaagaaaggaaaaggtgacttggcatggtggcttatgcctgtaatcccagcactttgcaaggctgaggtgggaggatcgcttgaggctaggaattcaatactagcctggagaaaagaaaagaaaaagagaaagaaagcaaaagaagaagagaaaaagaaagaaaggaaggagaggtgcaagttaaggagttaattatccaatttaagaagacagaaaaaggggaagacaatacaaagatatgagcaaaaataaatgaagaaaaacaagcatataaaagagagaaggcacagcaaatgatttaggagtaaaaaagagaccacaactatagatgctgcagagattaaaccagcaaaaacaaatattgataaataattataaaaaattggaaaattttgatggaattgatatattccaagaaaaatgtcatcaaaattgaaccaagaaaatatttaaaaatctaagcagtcctttgctcattaaaggataaatcagtagttaacactttttctacaaagaaatggtgtgcctggatggtcgtgtaggtgagttttaccaaggattatggtaacaaatgagtgagacctctatggagaaaatattgaaggacattaaagaagacctcataaatggagagagatatatcattaatggataggaagcctcaatggcataagtatgtcagtttctttcaaaactcacctatggattcaatgtgattccaaaccaaatcccaacaaggtctttcctggaattggaagccagattctgaaatgtatttggaaaagtaaagaggcagggttagctatttcattaacaaagaaggaacatcaggcagggagacttgtgttattattaaggcttattataaattattattgtgatcaagatagtgtatttttggtgtagagatagttaaattggccaatggattgagccaaatttccaaaacagacccacaaataaatgaaactctaatttacaacagagacagtactgcagatcatggggggaaaggatgaactattgagggattggcaaacttttttggtaagggctagacagccttacgtggtgttcacagtgtctgttgtagttagtcacctctgctgtggtattgtaagagcagctatagacaatactgtacgtgaacaaatgatcatggatatgttctaataaaactttatgtgcattgagatttaaatttc

SEQ ID NO: 845 - DNA, 3198 bp, Homo sapiens
cttctacagattcattctgcaacgtgtttcagagcctatgggcccattcggagttcattttaactcttgaccaataaataggttactcctctgagagttgtatccatccaaagcccttcctcccccattgccttgagtcctatgtcttgacaaacccagcacaaggtgaaatggttgactgtctccttttccttccttgttcggttaaatctatttatttttggttcttggaagcagaaaattgcatgccttttttcttttttcttttttttttttcattttctttccctaaatgcttcatctccctacccctcctgcagtgaacctaatgtcctcgatgactcccagggcctggccgccgagggcagcctctctaggtacagtgtcaatgctacctgtctattggtgtctgtgctgggaaactagctgttccctgtctcctctgtctctctgtcttctctgtctcttctcgccccgtcttaatatctatttccattccttgccctttgttgttcatgaacatatgagcctggaagtcaaaggtgtagcaaaccctccttcattttcagcttcagagctcaatgtcaatcaagtaagcctgaaaagcttactttaaaaaaattatagaattctttatggggcatttccacggatgtctaaaaagtctggtatgccaaatgttaaatttatcccatctaattattccctcccacactgatatttattaagaattgtttttcagaggccctttaatacatcatcaagaagccccttattaaatcaagacaggtcttttagctaataccattgattgtaagaaaatagacaatgatgttataaaaagaatagtaatgtggatacaatttatatactataattccttctctttgatgcatgctattgggcagacttctatagtagcttgttgcagcaacacttatacaaagaatgtctgttctagcacaaaggtgactccaaaacttgcatgaaatatcagacacaaacagttcttggtaagtaagagaaatcttatgatgcaaataatgtaatgtcttggctattggtttaaagcttcagaaaaggggactgcacctttaacactcagataaaccacgtcaaacattcctaatcttgtgctgttgattcacacctctcaactaatcctcattaggggtaaggcttcttgttcatccttagagtatctttgtgccatctcaagagataacattccctttcaggtttgcactatctagtgagtacaatacacccgtgtttattgctttatcacaaagatgaggaaatgttgagaggctgttcctgtgaaaggttgtcttttgttttctttgcatcttgttcagatttcacattttcttttgcaattgaaaatgggaaatttagtccatcatcgggtgtattttttttttaaccagacccataattcatgacattcgtgtttgccagcccttgccttgacagatcagtctcttattggtggtaaatgtggaagtgctgcagaatgcagacttaattccattagcaggagctttgggggcaaggaggaagttgagaaacaaaacagtcctcaagagggcttccctttattcacggtgttggaagagatctgaaccaagtctagcagagtgttcattctttcaaagaaagcaggtatttaatgtttaaaattacatgtgtgatgggaaccttgattagaagacaatttcagtggcctactgagagtagagagtattgaatcagacttccacttagctagctttgtgctggggcttttctaattaggccaaattctactcttgatgagtaaggattggtgagagaaggcaggagtttgagattgtttttatgaactctcccaagtatttggccctctctggtaggctcagggttcagaggacctatttgtagttttctaaaccaattcagtgtgtcctggttccagtgtcaatggaaatatacacaaagtttttggtaggtgagactggttcagagccaaagctattgatttgtctacagctgaattagtcagtcatggtagtactttgatgactgtcttagatcaactgccgttgatccgttgtttctgtgaccattgtgttttagttctgggtgtgagtcacccagacccagttgtggtcattaagaaatgggaagatgaggcattcactttggcttctgaaataattctaatagcacagaggctttctaccaaccagtagcacatccacctttgccataccctgcaaattgtatctcttgaactacatcacgtcaccaagttctctttggaggagaggaacttttggcatttactaggaggttggtttacaaaataggatatatactttttatatttagtttccagactttcttatttttggcatgaacttcctttaagctgcagactcttaaaatcctgaagtagtatggcattaaccaggtaatgacgcttaacatacactccaacactgaggacctaaaatacacccaaagtagtcctgatgaaaatctggccttaaagcttagagaatatcaggaagcatatctaagggaaaataataaactctgctgctcccatgctcttacaacattttaccaaacttgcatgagaatttccttttgaaaggacatttgttttagacaaaaggggtaagttggatggagtgggctaaataaggaagagaccaagataacctgatgaataggtggaaatcaataaaaatttgccatacctatagaaaattacttctaggatttttttttaaatgtgctaactggtttcttttagattcatccccagaaatagcctattagaaacactatgctttgcagaaaagattctttgtattggaaattaataagatgaaatcatattccatgggagaattctcttctctagagactgttgctcttagagatatagaaattcattgtagatgttccttctctgtctctgccgtgaaacacgcacacatatccatggacatgttttctctccagaagaatagagacatacagaggctattcaagaacttatggccagatgtttacaccaaagaattagattttggttggacatgttagaacattttgaaaggcagaaattgacagtcaactctaatttttttttaaaaaaagattataatgctacttgaatttgcaaggatacttttaatcacagtg

SEQ ID NO: 846 - DNA, 4157 bp, Homo sapiens
ccgggcctgctatggctgggccattgagcagctgccggctctcagcccgccccgagggaggcagtgggcggggtcggcgagcagagagggtcagcccctcacgctccaatgaggtcatcagcccagagatcctgaagatgcgagctgccctcttctgcatcttcacctacctggacacgcgcacactgctgcatgctgccgaggtctgccgggactggcgcttcgtggcccgccaccccgcagtctggacaagggtgctgcttgagaatgcccgtgtctgctccaagttcctggcaatgctggctcagtggtgcacccaggcccactctctgacgctgcagaacttgaagccccggcagcggggaaagaaggagagcaaggaggagtatgcccggagcacccggggctgcctggaagctgggctggagtccctgctgaaggcagctggggggaacctgctgatcctgcgcatctcccactgtccaaacatcctcaccgaccgctcgctctggctggccagctgctactgccgtgccctgcaggctgtcacgtacaggagtgccacagaccccgtgggccacgaggtcatttgggccctgggcgcaggctgcagagagatcgtctccctccaagtggcaccacttcacccctgccagcagcccacacgcttcagtaaccgctgcctgcagatgattggtcgctgttggccccacctgcgggccctgggggtcgggggtgccggctgtggggtgcagggcctggcatcactcgcgagaaactgcatgcggctgcaggtcctggagcttgaccacgtgtcagagatcacccaggaggtggcagcagaggtctgccgggaaggcctgaagggactggagatgctggtgctcacggcgactcccgtcacccctaaggccctactgcacttcaacagcatctgccggaacctcaagtccattgtggtccagattgggattgcggattatttcaaagagcccagcagccctgaggcccagaagctgtttgaggacatggtgacaaaactccaggctctgcgacggaggcccggcttctctaagattctgcacatcaaggtggaaggcggctgctaacccgggtagggggcggcagggcccctgccagccccacaccagggcactctctttggacctcagagggaccctggtttggactagacctttggaggccgagtgttatccctggcttctggagggggactgtcaagtctcctgtcctcctcctggagcagcagagcaacaggcctgacccagggcactgcctccccagtacaggggcttggacagaagctgccctccgacccccaccctaccccggctggagtagcctctggcacagccagtgaggagctgtcaccaccagcgcctggtgtcatcacctggaggatctgcaataaccacccagtggctcctcagctgttctggctggcctctccttcctgaggcccagcctcctggtcaggagcatctggggccccaagccaatgggggctccacaaggcagctcagacttggcaaggagggctcttctcctcaaccttgctgcagccttctgggggcaccccttcagacagcctgcccaggctgtggatccacatttcctgggggtaccacagccagacctaggggcctgggcacgtggtcagccaaaagctgggggcagcagtacagtggggtagtgggggtgggtttggaaaggaaacagtcacccagaacttctccccaggatgagaccacccttccaaggtgggggattgccagggggagaaaacttatttattgctgtaagacaggacccctcctcccaacctcataccccaccgcacaccagagctaaattcaaagctgaaaggcgcacgtttctatacctacattcattcctgagggaccctccagagggtcaaggtcccagccccaggcagccctgtcacagtgagaagtagttcctgtccttaaggaatttccttctaatccaggtgcttgggcaggaacccgatggccttcgggtcaccaaggctgtctgggagggaggcacagggccgccctctgtgctgaggccgtggaggaagccaggaggagggtggcttgctttgcttccttgtctaattagcttgcttgaagatgtggccttggcagggagccagacccatggggccaaggaagaggaagagcatcctcaatagactcactcccccttccttggtctccacgggccccgtggactgagggctgcattggggtcttctgcctaggggaagtgctggacctgagctggagccacttggcttagaagccacaggattcacttttcactggcctttgcagtccccaaaggatcaggtctcagaaccaaggctccaaaggctgaggtctccccagttcctcctctcagaactcccacagtagctcagaggccgggggtcctgccaactttcatttggaaagttctttcgaacatctaaactagatctatcttagggtttctttctctcctagataggatcagctcccagccctagccattaggctgctggtcctggcgggggatggggtcccctcgttacccagtccttcccagggacccaacttcctaacacaacctggcttggacatgaagaccctcccccaggttaccttgtaaagagtcctccagagctgggatcccatgggcgcagcagcacacccagctcccatggcgtcactccctagctctgtcccagcttttgctatcattgctgacttttcctcctgtggcccattctgtccctgccctttgaaaacctaaaataccaagggtgtcatgctggcaactccctgcccagtcctgcacaaagccttggctgtgtgtggcaccccttgcctcctaccccagagcagctggctccattggcttctccctgcaccagccctgtcctcaggggtcaggaaaaagcagcacagctttctttcctctcctccagaggcctggaagggaggtggaggtccagtaagggcctggctgccttggatttcttggtcctgccttgccaactgcaccctgtagctcctgctccctgtgaccccagaaccagaggtgctgccttccctgtctcctagacaaagcacaaagggatgccctgcttggcttgagcctgcccaactgaaggattttctctgccccagggaccttccatccctgaatacaaggctctaggcaacttctctctgggtggtacacactagaatgcctggcattagccctagaaaggaggttggggtgtatgggtagtgagctagggtgggagaaaggtggtgctgaaaggacagatgctagttgtagtttcactcactcattcattcattagtgcaacagtactgagcaccacctgcactagaggcagaggggtgaacaagatacccttctgcctggggggacgtccacttcccatggatttggctatttccaggaaagcccctcagtcctccaccctgttctggctgtgtgtgaaggatgtgtgtgagcaggcccaatcctttgcagcaagaatgagaggtcagagtattccattgcacacgcaccctggggctgacagacttgtgccccctagccttcatgcatgcccaagcactggcagctttgcagcccctgccccaccagccccttgacgctcttcttttgttctctcctcggggatgagctctgctgctgagtagggagcttttgcttgctgggaggctctatgcatggatttttttggtgaccatacagctagggctgaggatgggaacagggacagagggcctggctatccctagaagcacttcatccatctttacccacccaaacgggatcccttcacatctcatacccagtaagatgcaagaaaggaatatctgagagcaagcagccctgctccaggggccccaggtatgtgtagaggcccagtgggggtggccacttggtgtttctaccaccccctgccatccagtctggccccagtacctacctgggaggttggtgtacttggcttaagtacttcatgctttattcaggctgcttccccacagcaccggcaggaaatgaaggtgcacttatatgcatccctgcaggaataaagagtgggtggcctgcccagcccagcg

SEQ ID NO: 847 - DNA, 4931 bp, Homo sapiens
ctaaaagaaagaatggatgaacccaatgcagaacaggtctataatccctctcagtttgagaatttgagaaagttttgggacttagaagctaattcaaacagtaaggataatgacaagaatattaccaccacaagccaaaaaaattctgcaccttttaataggcagaaacacaaggaattcagcgacattaaattatcaggtaaaaatacccatgaagcagaggtgcttctaagcccaaaaaaagttatggcaagagaggaaatggagaaattaaattcaaagggcatactccaggtgctaccagatgaaatcacatttcctttgagtccacttagaaagtatacttatcagttgccaggaaatgagtcatcaaaggaaaatgtggaaaagaatacggaagggattgttactccagtgtttaaggaagaaaaggattactcagaacaagagattcaagaatccataataaaaaccaatgttttgtctaaagactgcaaagacacttttaatgacagcttgcagaaactgctttcagaaacctcaacaccagcaattcaaccctctggtggaaaagttcatggaaaacaagtgcttgaaccaagtgtttctgaaaataggacatggcctcaaaaaacagattttgctgatactgaggaagaagtcaaaggacctgagaagatcattaatgagcatgttgacaaaacagtagttcatccaaaggttaaacggaactctttgactgctagtctagacaaactcctgaaggaagcaactggaacttcaccctctcccttgcaagccaagttggcgcccgttatcactggaaccaactctaagctggaagaggggagattttttggaaaagggatagaacagagtcacaatacttcagctgataagagagaaatactagctccttttccagtgagagatgaaacttttggaaatacagctctcctcaagaaagctgaaagtggtgagtgccagctaagcacacagaatttgattcagatggctgcagaagattctcatccattggatccaacttcccagctttccagaaagggttcttttggggatgtggccagccctccccaagatatgctttttccccaggatgctcatcttgttccccaggctagggtacacccttctcaaacggaaatttcggagactgtagagaaagtcattcttccacccagacctgtattgaatgatgtaagtgctgcattacagaagctgtgtggggaagtatggttaagttatccagctggaagggaagtaggtcctggagaagtgaacccagaatttcctgaagcagtacagccagtatgtagccccctaaatcctccaggagtgatatcaccatgggctacgatggacaccatagttccagacaggaaggatttttattcctccaatgtagttcctgataaaactcatgaagttggatcttatttagctgcccaaatgtctccatcagaccagacgcttagctcatttgcttccattgttgctcaatatggcaaaggcctcccccaggaagtggaagaaattgtgagggaaacaattgttcaacccaaatcagagttcctcgaattcagtgctggcttagaaaaactactgaaggaagaaactgaaaccttcccctcaaaatatgaaagtgatacagggaatctttctccatcaaagttaataggtagtacagaggagcccaggcgagccacttctgaatgccatcctgaggaattaaaagaaacagtagaaaaggccgaggctccgttaataactgagagtgcttttgatgctggttttgagaaacttcttaaagaaataactgaagctcctccttatcagccccaggtgtcagtgagagaagaaactcacgagaaggagtcctcacagtcagagcagaccaggttcttggggacagtgccccatttttacagggcagcctcacagacctctgaaatgagggataaaagtaatggtttggaatctcaagtcaaccaatgtgataaaatgttggtaggagacgcacttgtgactgatttattggtagatttttgtggttccagaagtggagttgagatccctagaaccccacaactttatgtggctcatgaaatagggaccattaaaactgtaacccccccagaggacagggacagtgaaagtggggttgcagggggacaagggactcttcaggaacctggctttggagaggcttctgaagcaattagtgtgtccagaaataggcaacccattcctctcctgatgaacaaagaaaactctacaaaaacaagtaaagttgaattgactctagcatcgccatatatgaaacaagagaaagaggaagaaaaagaaggtttctctgagtctgatttttcagatggaaacaccagttctaatgcagagagctggagaaatccttccagttcagaagaagaacccagtcctgttttgaaaactttggaaaggagtgccgctaggaaaatgccttccaaaagtctagaagacatttcatcagattcatcaaatcaagcaaaagtagataatcagccagaagaattagtgcgtagtgctgaagatgatttttagttgaacaggagaccttaaagaggctaatgaagaagagtcacagtgaggaatggatgaaagcaagatgaaaacctgtcagatgtattctgctgtctcagttgtgaaactgacatttgagctttactttcatgtctctttaatccttctgttaaaatggtatttattctcaatgttgccctcctgagtagatgagaaaccagatcagaagccagttacaaatgaatgcgtaccaagaatttccacagtgcctacacaacctgataatccattttctcaccctgacaaactcaaaaggatgagcaagtctgttccagcatttctccaagatgagagtgatgacagagaaacagatacagcatcagaaagcagttaccagctcagcagacacaagaagagcccgagctctttaaccaatcttagcagctcctctggcatgacgtccttgtcttctgtgagtggcagtgtgatgagtgtttatagtggagactttggcaatctggaagttaaaggaaatattcagtttgcaattgaatatgtggagtcactgaaggagttgcatgtttttgtggcccagtgtaaggacttagcagcagcggatgtaaaaaaacagcgttcagacccatatgtaaaggcctatttgctaccagacaaaggcaaaatgggcaagaagaaaacactcgtagtgaagaaaaccttgaatcctgtgtataacgaaatactgcggtataaaattgaaaaacaaatcttaaagacacagaaattgaacctgtccatttggcatcgggatacatttaagcgcaatagtttcctaggggaggtggaacttgatttggaaacatgggactgggataacaacagaataaacaattgagatggtaccctctgaagcggaagacagcaccagttgcccttgaagcagaaaacagaggtgagatgaaactagctctccagtatgtcccagagccagtccctggtaaaaagcttcctacaactggagaagtgcacatctgggtgaaggaatgccttgatctaccactgctaaggggaagtcatctaaattcttttgttaaatgtaccatccttccagatacaagtaggaaaagtcgccagaagacaagagctgtagggaaaaccaccaaccctatcttcaaccacactatggtgtatgatgggttcaggcctgaagatctgatggaagcctgtgtagagcttactgtctgggaccattacaaattaaccaaccaatttttgggaggtcttcgtattggctttggaacaggtaaaagttatgggactgaagtggactggatggactctacttcagaggaagttgctctctgggagaagatggtaaactcccccaatacttggattgaagcaacactgcctctcagaatgcttttgattgccaagatttccaaatgagcccaaattccactggctcctccactgaaaactactaaaccggtggaatctgatcttgaaaatctgagtaggtggacaaatatcctcactttctatctattgcacctaaggaatactgcacagcatgtaaaagtcaatctgcatgtgcttctttgattacaaggcccaagggatttaaatataacaaaatgtgtaatttgtgactctaatattaaataagatatttgaacaagctaggaaaattgaatttctgctgctgcttcaaagaaaaagctgccccagagcattaaacatggggtattgttaagaagcaaaatgttcttgtttgccatcatgtgtttcacaccacaattctgtgccacagttaagagggtctggtacccttgcaggacctttgtaagttgtgggaaaaagtcgcagaaagatactcaaagtggagcagggaatggagacagacatcagtgatgataaaaaaaaaaaatggaccttaagaaactatttactctgtaatctctaataaaatatggaattccatattagggcaatgagactgaaactactggtgtttttctgccttgagaaaacaaacagttaaaacaagcctcaaatgtattttagtgccacccactggccataggtacaattcagttgttggcttgttttgacttaattctaaaataggtctcaagcctgtatttttatgagtttatttttttaaaaccctgcatatatatgattgtttttcttataactttactatatgaaagcagcataagagtagtcacaaacatgttttgcaacaaagttttaattagaatgtaagttgctcagttatactgttcttcttatgtatgtaaaattttcgtattttgtaaaaacccttagaataaattatcatttgattt

SEQ ID NO: 848 - DNA, 2225 bp, Homo sapiens
tttatgcttgtgtttctgcaactgctttctggccccccactctttctgtggctgctgagcctagtgccgctcacaggtctgccttctgcagtctggtcaggcttggcctccggactggagtccagggtgctcatggtattccgctcctggtggccatccctttcttccctgtgctcctcttggtgcctcctccccctgccagccacatgattcttcctgctgccctctgtagaaaagggcctggctcacttcctgcctctggtggactactggcctcacagggtccactacttgggttgctgagttccctgtattcagtctcctgccaacgtgtctgccatgctctggtctcttgtgcatacatgatgcagttggatgtggtcctgggcctgcagtgggagccccctaaaatgcactgtaattgctctatatgcttgccagggaaaaaatgcactgtaaccaggagttcaggacaggcgctgggacaggccctgggccccagtctgcaggtgcactgggtgttggcatggcatgtctgggcacctccagggtggcgtggaggaggccgtgtggctccctggcccaggtctcagcctccttcctccctctatagtcactccctggatacccagcaccgtcgtcttgggtgcctctgcaggtgctatccagagcccttgtcttattgccttgtttttctgtgactcctctctcccgccaacttgggatacttgtctgtgaagcccttccccagcacccccttctccgctctcctggagcatgtctctgtgcctggaggtcaccgcgcctgtgtcctcacccctgctgagtgctgggacacagggtaggcaagttttgtggcccaaatatatcaataaaatatgaagaggaatggtaggggtagtcctggtcccttccacctctgacatatgtagtcttctgcaggtcaggctgtttgtgtgtgtgtgtgtgtgtgtgtgtgtgtgtgtgtgtgtctgtcagagattcactcttgttgtttgtttgagacggagtctctctgtgtcgcccaggctggagtgcagtggcgtgatcttgactcactgcaacctccactcctgggttcaggcgattctcctgcctcagcctccctagtaactgggatgacaggcatgcgccaccactcctggctaatttttgtatttttagtagagacgaggtttcaccatgttacccaggctaatctcgaacttcggatcacctgaggtcaggagttggagaccagcctggccaacatggtgaaaccccatctctactaaaaatacaaagaaagttagccaggtctggtggtgcgtgcctgtaatcccacttactcgggaggctgaggcaggagaatcacttgaacccaggaggcagaggttacagtgagccgagatcgcgccactgcactccaccctgggcaacaagagcgaaaactgtctcaaaaaaaaaaaaaaaaaatttttcatttgaggtattcttccagtagaaggttagtaagtttttaatgaaaccattaaaaattacacttcccagaaaatagatgacatcagtgccccttgctactttctcagtcctcactattgctttgagggcccaggtactgaaactggttgtcttgagttttgtgtcagctttttctccagtccattatccccctcccttgcttctgaagcagtctaggttaaactagccaggcaggtagttgtggactggtgattttcaaaagccccactttagagatcaggccacagctttttatatcgcacaggacacatcagcctgagctgctgcctcatgcctgtttccccaggaacctcactcctttggtagaaccttgggattttagaaattgtggcttttccataactcatttactccaacagttgaagttacacacattgctcccaaatttggaaatagaccacagtaccttacctttcattccccatctggcctttaccttctttgcttcagtggttgaaaacagttgccatattcaaagtatagtagatttcaacctcacacaaatgacaagtcccattttacaatcctaggaaggcccaccaatttcatttcacgcgccagggcggctgcagttggaggccgagggcagccctctgctcactgaatgtcttgcatgtgctgactgctgcccgcagtgctgaacatgccccaccgcccaggcccagcactgcttgttgggtcag

SEQ ID NO: 849 - DNA, 4371 bp, Homo sapiens
aatttaatagtatcagctgtctggtcaagtatattttccagctataactaagggttagcttgtttgtgaacagtttttcttttaattgttttgattggaaatctacttgaaatgcattacacaaccttcttgcctttttaaacagggtactgactataatcttttctcaatgactcaggatcaccattgtgaccatgtctttccccagtggctgcatagtgacccactcccctccagggcctcccaagatataggggaggcttgcccctgccctcgatagtcccaaaccccagcggttggtgagtctgcatgtctggtgttgcagttgggcagcctcctccctcaccgtcaggcataaggaaaaatgatagctctctcttatctgcacagttttttcaaacaatccccctcttccctatttctgctccatcaagggatggaaaccaaacttgttggaattggttgggagtgggagcttgaggactccattatgagaaaactacacatgttttgtgctgaggctttatcatttttattttgacgttgcctcctctgaggcccccttttcttattggttctagagtagattctaaaggtaggtaaggctgtggaatggtataatattatgggggggggggaatcatagtaattcatgtttgtattacaatatatggctttcaaaacatttttacatacattattctagctgatgaccataacagtccgtggaggtaagtaggggagctgttagtaatcccattttatagatagcataactaaggcccagagaagttttttttttaactcttcttttacagaaaagtttaagtgatattcacaaattccaatttgtgggagatccagtaaaaatccatgcagtgtgactgaagagcttgaaaaaggaggagatggagaaaggatttgctcattcattcttgaatttgtccattcagcaaatatttactgggcccctactatatgctaggtaccattttgtatgctggggatgcaatagaaaacaggccaaacaaagttcctgggttcatggagcttatgttctagtgggataagagagaaaacaaatagtgtataatacaacatcagctattggtaagtgctattggaaaaagaagagtcaaaagggagcaaatcatggagtttcttaactacatgggtaagatgaaccacactgattttttaaaataccagagtttttaaaacttgaatgaagtgcccctttgaagacagtgaaacttcgtgaaaagagaaggagtggtgcaaatacgcatcattgtagattactgtttcttctaacattttgggttactgatagatctgccgcacttgactttgtaccttagctctaagatggttgcatgcgcccaggaaaaggccatattgccacaagcatcaccaggggagaaatagaaacaataataagtttctcaagtcccccaggtagagatccccatccctactgagaatgccctttgatgcacagttgccaaacggagagaaggagagaggtgcctgcttagaactgatagctatcacttacatctcattggagaacctctattgttttgtatcatagaactgcaacaattataggaccatcatggaacctgctcaatccattcgctgaaaattgtttgaaagtgtaacacttgactactgtggctttgggttgtcctcattgtttttcaaattaataccttgtcattgtttcagcaggtgttaagaaatgttactagcatcccaggggccaagcattggccctttgcatgataattgtttgctttgtatcaggaaaaaaaaatacagtcctactgtttctaaaccttcctcattttcaccctggaaattacacagaagtgttaactaacttcaatttacagtgcctgacagtcacgtctagtagagaaatgatactttgtgatctaaggtaaatcacagtaatgaaaactaatctttttagttattagcagacatatatatctactgtggaaatttgaggggtttgtggccactctcctaatgacctatattacagtgttttaataggtttctttggagataactttgattgtgacatctcaagcagagtgctttctgagtttcttttttttttacttccctacaataagtcatttcctaactgcaggatgaaccaccagcttacctttccagaaaatctgatttatttaaaaatcaaatcctctcctccttcccctgccttttgtttcttctcttcttcttcttctttttaatccttggactttaaggctgcactggaagcaaagacaaatggtttagtgtctcctctgagtgaactaattaattagcaaatactatatccactcaggttaagctatacacacacacacacacacacacacacacacacacacacacacaatgagacttgggtaggaagaggtatagattgaaacacaattttttttacttagtactttctcaatattttaaaagaggaaaaaggaatgggaagttccatcacccgtctgataatatattaaggacagtggaaaacagtatgtttggatattctttaatgcaggtttcaatccaaggcaaagtcagagaacatctatgggttatgcagtaaagatttatccattagataaatttgccaggaaaaaatttatcatagaaaaactatttataaaatcctacaatctcaatgcccttcttagccaggcttgatttctggaaagaggaagcagttctaatatcaattcctaccagcccaggctgtggacagcaatcccatgcctacaaagctgatccagcagaagcatctcagggtgtgtgagggcaagtagagggtacaagtgaatggtaaacaaggaagagtggctgtctgaaaattcgttttcatgttttcctgtttctttacagaaacccgggatggacgtggccgacgcctacgtgactttcgtccgccattctcaggatgtcctgcgtgataaggtcaatgaggagatgtacatagaaaggttatttgatcaatggtacaacagctccatgaacgtgatctgcacctggttgacggaccggatggacttacagcttcatatttatcagttgaaaacactaattaggatggtaaagaaaacctacagagatttccgattgcaaggggtcctggactccaccttaaacagcaagacctatgaaacgatccggaaccgtctcactgtggaggaagccacagcatcagtgagtgaaggtgggggactgcagggcatcagcatgaaggacagcgatgaggaagacgaagaagacgattagaccatttggtcctagagtctgctgggacagagtcctgtaatcagtgcatgtccttagtctgttagttaaacccattaggaattttctgtcaactaccatgcccatgagatgtttatcaatacaactgccattttagctatgtggtaccaagattagcaaatgaccttcatatccactgatttcctgatgtccatgtctatatgtttacaagcaatatggagcaccattctttaaatactgttcatggagaatacatagtctaaccactaggcgtgtccctgttatcagcaaagatcaatgatgcttcattcatgtactatgtatgcattggtggtaaatggatgtgagggcaagtacatcaagtacattcactctgtttcacgtatgtggatgccagttaattaaatgagtacgtaaataaattaattaaaacacatagatctgctttgtgtttttatttttattttttgaaaaacaaaaggcaagtctccaacaattaacttttgatgctttctgttcccctaaaaccaaaatatgaaccccttgtgtcgttgttaacccatcctttcatttactcatataattagccaaaaaaaaaaaaggatggctacataccaatggattgattctcttaattgccacggcaagggggcgatcctatcatgacttaacatcaagcgcgcagttcaaaactactgtcttctgtcaaagttttctcctcttaaatgttattttgcttttacgtctcaactgtgtatgtaaaaaaaacgaatatttaaattacaaccctagactaaaaatgtgtttataataagatgtggatatttccttcagtagattgtaaccataatttaaattattttgttccacactgttttttatatctgtcatgtacattgcattttgatctgtaactgcacaaccctggggtttgctgcagagctatttctttccatgtaaagtagtggatccatcttgcttttgccttatataaagcctacagttatggaagtgtggaaaactgtggcttctcaataaatattcagatgtcctaag

SEQ ID NO: 850 - DNA, 3199 bp, Homo sapiens
tgactcttccctcccctcctgttcacctgcagtcagtcactcggttctttcagctcagccttacaaaggtctattgaatctgttctctccatctcctctgccattatcttggtttagaccaccatctcctttttacttggatttcagtattttttttttttttttgagagacagtctcattatgttgcccatgctggagtgcagtggcgtgatcccagcataccataacctcaaactcctgggcccaagtgattctcctgcttcagcctcccgggtagctgggactgcgggtgtgcgccaccacacctggctaatttttgtttgtttttttgtagagatggaatgtcgctatgttgcccaggctggtctcaaactcctgggctcaagtgatcctcccatcttgggctcccaaagtgcttggattatagacatgagcaactgcatcggacctttcagtagctatttaaccagtgtctctctaccccattcatccatccatccatccatccatccatccatccatccatccttcatacagaccccgagtggcctctctcaaccaccacaattctgaccttccttgcttcctgaccttcttaagcttccttgcttaacaccctccaggtctgaagctctccatgactcctagatatcagcccaaactccttagcagagttcacaagaccctgctccctggccttgctgcatctccggacttggtttattctccctcaatgtgttgaggacaagcatgaccaaaagagtgtggggtaaataaaaggagccatgagttttgattcttttgtcaataatgattgctaaatctcctatgatggtgtgactttctgagggaaattaacaatgttcttttatccaacagatatttatagggttccaattatattccagactctgtgctagagaaatggctaaaaggcagatactggagatgaaaggattttaatatctaaaaataatgaaaaataaactaatttttgataggtccttatagatgtcagtttttagaactgcagttgtgtaggactttaccactgtgcgcagcagagaccatggataataactagcatccaagaaattgagttgttcaaccaatagatcaatagctatatttactattaatttaatgtaagactaaatagaagaagtaggctgtaaattcgaaatgtttattgacatgtagtgcttttccttgtaattaagaggtgaattatcttaaaagtaggaagttttaaatgttattttaatattcatacttttccagcttaatacatgtatgacatcaatatcacttccagaattggatttaataaaaagtttatttggccgggcgcggtggctcacatctgtgatcccagcactttgggaggctgaggtgggcggaccatgaggtcaggagttcgagaccatcctggccaacatagtgaaaccctgtctctactaaaaatacacaaaattagcccagtgtggtggtgtgcgcctgtagtcccggctactcaggagggtgaggcgggagaatcgtgtgagcccaggaggcagaggttgcagtgagccaatatcgcaccattgcactccagcccaggcgacagtgcgagactccatctcaacaaacaaacaaacaaaagtttattttacttttctacccttttcaatctgttcgtaccagggaactatttataagagtgtcgcctaagaatgtttatattctcttaacatgtcatcaggaacagtagaatatgtgagaaaaatctgatggtaaatgcagaactctttcacatcattcagaattttgaaaggctgggtgattttaaaatgtgtcatacttgtcctagaggtcctcaaaagacctacttttatcataaattacagttaagttcaggcagtgatcttatttcagttgtatcatcagtattttgcaatagtcctgggaaagtgaaaatataagctctagtagtctcgttcatgattttaagataccaatttgaagtatcatattattccaagaaacaacttaattccatgatttaaaaaaaaatccaaaacaatattgttagaacagtgcaacaaatatttacaagtcaatagtcttttctttgtagaatattacatttatggtttcaataaatgatttagcagttaaagctgagatgaagtgtggttctcatattcaatcttgaaaaactaaaccatctttaaaaagtagaacgtccatgtgaactcatgcctgaagccatgtttgaacgctagataaaattgccctgggacaaaactgtagttcacctttatgaaatcaattttaaacttgttattgtgagccacaataaatacagttcacattgcaaactatcacacactcatacaaatgttactaaaaaaaacttaccaagttatatcctctctacatgcaatgcattctggtattttctctttcatttgctttttttaaaaagatctcacaatccactaatgagtcacaacctgtggtttgtaaagtagtgttagaatgaacccattggccacatcagaaatatctaaggattttctttccaacctaaaatcttttccttctctgttaattaagagatcttaacaaatgggaaattctgagtaagttcctgaatttttctttcatttgatcatggccttctagtgtttactaaagtggtttttcttttcactgccatccttgggtatttttgtatgctgggttgtattacgggtgaagggttgatggggttgtaggcctgagaggatcatttttattacagactctatccttgactataatatgatagcgttacatggagtttagtgactcatgagctcatgtctgactcgtaaggggtcctttgttaattcagatgacattggtcttatccgttatcaagaatccatgagtttggctgggtgcggtggttcatgcctgtagtcctagcactttgggaggccgaggcgggtggatcacaaagtcaggagttcaagaccagcctgaccaacatggtgaaaccccgtctctactaaaaatacaaagattagccaggagtggtggcgcgcacctgtagtcccggctactcgggaggttgaggcgggagattcgcttgaacccgggaagcagaggttgcagtgagccgagatcgcgccactgggcgccagcctgggcaacagagcgagactccgtctc

SEQ ID NO: 851 - DNA, 3676 bp, Homo sapiens
catcaaaacctataactctgactggcatcttgtgaactataaatatgaagattactcaggagagtttcgacagcttccgaacaaagtggtcaagttggataaacttccagttcatgtctatgaagttgacgaggaggtcgacaaagatgaggatgctgcctcccttggttcccagaagggtgggatcaccaagcatggctggctgtacaaaggcaacatgaacagtgccatcagcgtgaccatgaggtcatttaagagacgatttttccacctgattcaacttggcgatggatcctataatttgaatttttataaagatgaaaagatctccaaagaaccaaaaggatcaatatttctggattcctgtatgggtgtcgttcagaacaacaaagtcaggcgttttgcttttgagctcaagatgcaggacaaaagtagttatctcttggcagcagacagtgaagtggaaatggaagaatggatcacaattctaaataagatcctccagctcaactttgaagctgcaatgcaagaaaagcgaaatggcgactctcacgaagatgatgaacaaagcaaattggaaggttctggttccggtttagatagctacctgccggaacttgccaagagtgcaagagaagcagaaatcaaactgaaaagtgaaagcagagtcaaacttttttatttggacccagatgcccagaagcttgacttctcatcagctgagccagaagtgaagtcatttgaagagaagtttggaaaaaggatccttgtcaagtgcaatgatttatctttcaatttgcaatgctgtgttgccgaaaatgaagaaggacccactacaaatgttgaacctttctttgttactctatccctgtttgacataaaatacaaccggaagatttctgccgatttccacgtagacctgaaccatttctcagtgaggcaaatgctcgccaccacgtccccggcgctgatgaatggcagtgggcagagcccatctgtcctcaagggcatccttcatgaagccgccatgcagtatccgaagcagggaatattttcagtcacttgtcctcatccagatatatttcttgtggccagaattgaaaaagtccttcaggggagcatcacacattgcgctgagccatatatgaaaagttcagactcttctaaggtggcccagaaggtgctgaagaatgccaagcaggcatgccaaagactaggacagtatagaatgccatttgcttgggcagcaaggacattgtttaaggatgcatctggaaatcttgacaaaaatgccagattttctgccatctacaggcaagacagcaataagctatccaatgatgacatgctcaagttacttgcagactttcggaaacctgagaagatggctaagctcccagtgattttaggcaatctagacattacaattgataatgtttcctcagacttccctaattatgttaattcatcatacattcccacaaaacaatttgaaacctgcagtaaaactcccatcacgtttgaagtggaggaatttgtgccctgcataccaaaacacactcagccttacaccatctacaccaatcacctttacgtttatcctaagcacttgaaatacgacagtcagaagtcttttgccaaggctagaaatattgcgatttgcattgaattcaaagattcagatgaggaagactctcagccccttaagtgcatttatggcagacctggtgggccagttttcacaagaagcgcctttgctgcagtttacaccatcaccaaaacccagaattttatgatgagattaaaatagagttgcccactcagctgcatgaaaagcaccacctgttgctcacattcttccatgtcagctgtgacaactcaagtaaaggaagcacgaagaagagggatgtcgttgaaacccaagagacgggatttcgccatgttgcccaggctggtctcgaactcgtgagctcaagcagtctgcccacctctgcctcccaaaatgctgggattacagttggctactcctggcttcccctcctgaaagacggaagggtggtgacaagcgagcagcacatcccggtctcggcgaaccttccttcgggctatcttggctaccaggagcttgggatgggcaggcattatggtccggaaattaaatgggtagatggaggcaagccactgctgaaaatttccactcatctggtttctacagtgtatactcaggatcagcatttacataattttttccagtactgtcagaaaaccgaatctggagcccaagccttaggaaacgaacttgtaaagtaccttaagagtctgcatgcgatggaaggccacgtgatgatcgccttcttgcccactatcctaaaccagctgttccgagtcctcaccagagccacacaggaagaagtcgcggttaacgtgactcgggtcattattcatgtggttgcccagtgccatgaggaaggattggagagccacttgaggtcatatgttaagtacgcgtataagactgagccatatgttgcctctgaatacaagacagtgcatgaagaactgaccaaatccatgaccacgattctcaagccttctgccgatttcctcaccagcaacaaactactgaagtactcacggtttttctttgatgtactgatcaaatctatggctcagcatttgatagagaactccaaagttaagttgctgcgaaaccagagatttcctgcatcctatcatcatgcagtggaaaccgttgtaaatatgctgatgccacacatcactcagaagtttcgagataatccagaggcatctaagaacgcgaatcatagccttgctgtcttcatcaagagatgtttcaccttcatggacaggggctttgtcttcaagcagatcaacaactacattagctgttttgctcctggagacccaaagaccctctttgaatacaagtttgaatttctccgtgtagtgtgcaaccatgaacattatattccgttgaacttaccaatgccatttggaaaaggcaggattcaaagataccaagacctccagcttgactactcattaacagatgagttctgcagaaaccacttcttggtgggactgttactgagggaggtggggacagccctccaggagttccgggaggtccgtctgatcgccatcagtgtgctcaagaacctgctgataaagcattcttttgatgacagatatgcttcaaggagccatcaggcaaggatagccaccctctacctgcctctgtttggtctgctgattgaaaacgtccagcggatcaatgtgagggatgtgtcacccttccctgtgaacgcgggcatgactgtgaaggatgaatccctggctctaccagctgtgaatccgctggtgacgccgcagaagggaagcaccctggacaacagcctgcacaaggacctgctgggcgccatctccggcattggtaacgctccatgctcttgtgggcttctccccaccatcactctgaaagtgtcttggagccaatagttggtgaacgtgtcacacttgtgtggtaggaccttgaagtctaagttgctttcctgagtattcttttcctgcttgtgatagtcaacaactgaaacccctcagccatgccctgaaataaaggtcccggatgcctgtgactcctcaggatcatacagtt

SEQ ID NO: 852 - DNA, 3417 bp, Homo sapiens
atacattgccacatagttcgttgccttgtaactttacctctgatttccttttactccttcttaatttatcttaatccaattatctgtttgaagaaaaaaaaattttttttttttttttattttttgagatgagagtctcgctttgtcgcccgggctggagtccagtgacacgatctcggctcgccgcaacttccgcctcctgggttcaagcgattctcatgcctcaacctcccatatagctgcactaccacgcctgactaatatttttgtatttttggtagacacgggatttcactatgttggccagtctggtctagaactcctggcatcaagtgatcaacccacattggcctcccaaggtgctgggattacaggcaggagccacaatgcctggctagaagaaacttttctaattattactgtgatagaagccattttatctgatttgattgggacctgtattagttcattttaaaaactgactaaagcacagtaaatgaatataaatatactctgtttttaccagctttaaaacttttttcagttaaaatgttcagtaacatattttaacactttaaagtgtattttattttttaactttctaaatatagtattttgacctaaaacacagacatttattcgccattttttgttacctgaggccagagtcttctttttatatgattttgctgattattgtttttctctgcagaaaccatatcaaaatgtgtttaagatttctctccagtttttgttttttttttaattttgcaaagcttaaaaacacttgtaaaattgctgaatcctagacttcacagtccctccctaccactcagatttcagtggttcacattttttctcaacagcagattttttcctaatgagttgcattggttgcatattttcttgagaatccaactttttttttaatttgctttgaaaattatttatgaaaaatttcaaatagaaagtatggacagtagtgaagcacttatgtacatgtcaccaaaccttattttctgtaaatctttttggggaaaataatgttttttcccctcagaagtatccacaaatgtgatatatgttactcttatgtatattttagtatatattcatgtttcatctgtaaatcttatgtactatcttatctttttaaattttacctttaatgatgatactatataacctttacaacttttttcacttaagattgtctttgagatttattcatgttgattcacgtaattcatgtagtttattcattttaactgttatgtgggagtcccttgtatgagtaacgatttcacatcctttacaattaggttatttgtcatctttcactgccaaaggcagtgaatgctgaaagttttcgtatataacttgtgctcttattggagatatttttctccatctgacacccagaactgaaaagagctgagtcccaaggtgtatgcttcctcagttttacaagaaattgcagaaaatgttctgaagcagttgcagcaatttacattcctaccaaagttattataaggagcatgtgagagttggacacatcttaaccagatatcagatttttaaattgatttcaagcaaatgtttaataaatgatatttaatttgcattttcctaggaactgtgggggaaacagtttgtatgcatgtattggcttttgttctctttctctgtgaattgcctgactatatttgtttagttttccagtggactctgtcattttctaattgatttttggaagtgaggagttactcgaatatttatgataataatcctaacacctttcaagtgtctttttttttctcctttagttatacagaaatgtgtaaattttacatataatcaaatatatccatctttttatttatttatttttttggtatctgcttgcttgtttgaaaaattcttccatacttccatgtcagaaaaccttctttattttctcataaacatgtttagtttttcttttcatgtttaaatctttaatccacttgttattgatttttgtttgtgcagaagagatctaattgtttttccatatggttaaagtcccttcttcattagtgtgtgatacccatcgattaatagtaccacatgtcatatactgagccctcatctactcatggatctgtttgtttatactataccaataccatagttttaattagaataggtttaaagtaaatcaatatgttactgtattttccttcaggattaccttggctttcttagacctttgctctttcatatagaccagcttgctaaattccaagggggtggcagtagaatatctgatggaactttgattgtaacagaactgaatttacagatgtattcccagataattgacatattttttataatgagccactccatgatatatagctgcatttatttagggtaccgtttttgtcttgcagtttgataattttctccatgaaggtcttgttgtatgtcttttgtaagagtcacatattttgtaagatacagtgttttttggtttctagcatccctggtgaattctcttattagttctaatagtttgttaaacctcttgtatttctcatgtatcttaggataatatttcttatttcctcctttttaattcttatgtggtcttaaatataatctgtaattgcagatgttttcgtgaagttctgactttacagggaacgcttctgtttgattattaaatgtctattataagacttcgataaataccttttttattccttattctcttttagataggtgttgaattttatcaaatgctttttcagtttcctagataaacttgcagcacaaatttgattctctttaatattttctctagggtgatcagcccatgacctaaacctccagacaaaataaaacagggaaaatttgctagaatcaagaatgatggatccatgttcagttggagtccagcttcgtactacaaatgagtgccataaaacctactatactcgtcacacaggttttaagactttgcaagaattgtcatcaaatgatatgcttttacttcaacttagaactggaatgacactttctgggaacaatacaatttgctttcatcatgtaaaaatttacattgacagatttgaggatttacagaagtcatgttgtgacccatttaacatacacaagaaattagccaaaaaaaatttgcatgtaattgacttagatgatgccacttttctgagtgctaaatttggaagacagcttgtacctggttggaagctttgtccaaaatgcacacagataatcaatggaagtgtggatgttgatactgaagaccgccagaaaaggaaacctgagtcagatggaagaactgctaaagctttgaggtcattacaatttacgaatccaggaaggcaaactgaatttgctccagaaactggt

SEQ ID NO: 853 - DNA, 3275 bp, Homo sapiens
gaataccaaactggaagtgaaaaaacagaatggtcgtatgggcacttgaagttccgtttctactgaatgcttatcactttcacaccatcataaagttgaaaaatcagggcctatcagggtcagctctggctgtcttttccttgagggtttctatccttagtatgggctcaggaagttcttccccatgccaatattatattggcaccttttaatggtttcagttttctcatttaattaatctccctagaatttgtttttttacttttttggttttttttttttttttttttagatggagtcttgctctgtgtcccaggctggagtgcccaggcacgatctcggctcactgcaaactccgcctcctgggttcacaccattctcctgcctcagcctcccaagtagctgggactacaggtggctaattttttgtatttttggtagagacggggtttcgccgtgttggccaggatggtctcgatctcctgaccttgtgatccgcccgcctcggcctcccaaagtgctgggattacaggtgtgagccaccgtgcctggcctggaatttgttttgatagatattagattgagatgtaacatttctccccattatttgttgaatccttcattttctcactgatctcaaactttatcaaatggaagcctgtgtctttgcactcgagttctttctgggcattctgctccattcctgtctgtccagcatcagtccactctctctcattagtggtgtcatatgagatagtcactgtttggtgaacacattccatcccttattctgcctccttttaaaaaagattctttgctattctcaagcatttaattcttccaagtaatcttctaagtcattggacaaattccttacaaaaacaccatggagatttcagttgaaattgcattaaatttttgtgttaacttacgggaagactaacatctggacaatgttttgcctgcccttgcttatgttgattcagatttttgatgtccagtgagaggcttggttggtgtatcaggctctgcacagggaagctgtccattctgtggagttgttggtaactggctggtcctggggacagagaactggccctcgttcctgactgttaagggaaggatgatggctcttggcttgaaaagatcatctttatcatgttaacacagtttccttctgtttctaagaggtattatcagaaataacaccttggattttggcaaaggcattttcagcatgtagagaatggatttccctttttctctttgacttctgataggatgaatgttatcaatcagctttctaatgccgaacgatccttgcattccccaaacaaccttacttgatcgtgggacaattccttgttacatgcttttagattagatttggtaatattttattttgcaattatttcatctaactacttaaaattaaaattaatccacagtgggttttctttgaatctagctctgttaggttttggtctttggttcataaatgaattgtccaactcccttttggataatcaaaatgctcaacattttttcctttgcttgattttcagctaatagtgctggaccccccggtgagtatttgggtgccctctggcccatggctcaccccctggggtgcagctgccatggcgcagggataccagtgtcctccttggcctcttgtagagtctgtgtgcacttggacagcactgggcttccaagccccacctagcattgccagcagtcaccttgtgtcctgctcaggcttaggctgtcagttccttcttggccacaagacttggaccgtttctcccacccacaggtggaagaaagtgataacgagtggtctgttccacactgtttcaccatctacgcggctcagaaaacaatcgtggtggcagccagcactcggctggagaaagagaagtggatgctggacctgaactccgcgatccaagcagccaagagtggcggtgacacggcccctgcactgccaggccgcactgtgtgcactcgtccccccagatcccccaacgaggtatctctggagcaggagtcagaagatgatgctcggggtgtccgcagctccctggaggggcatggccagcaccgggccaacaccacaatgcacgtgtgctggtaccggaacaccagcgtgtccagggcagaccacagtgcagctgtcgagaaccagctttcaggatatctgctaagaaagttcaaaaacagtcatggctggcagaagctctgggtcgtctttaccaacttctgtttgttcttctacaaaactcatcaggatgactacccactggccagcctcccgctgctgggctacagcgtgagcatccccagggaggccgatggcatacacaaagactatgttttcaagctccagttcaaatcccacgtctacttcttccgggctgagagcaagtacacatttgaaaggtggatggaggtgatccagggggccagcagctcagccgggagggccccaagcatcgtgcaggatggcccccaaccctcctcagggctggaggggatggtcagggggaaggaggaatgacgctcaacctgcccaggtttggacacaactacaaagaacagcaggacacagaggtgacctctgtcctgaggcttctcaacagatgggaagtggctgtggtctcactggatccccactggcaccagcagtgtgggtgggcctcatgtaacatctgggaggggcttcatccccccacccaggacctagtgcatgccagcagctatctggggccctgggaaaaatgtgcgagtcttgagcgcggagccgctcaagccacagctcccaggcccctggctcaaagacgcagacaaggcctgagcagtgctctcggcatcggaccaaagcctgggcacaccctgcctctctccccagagcagggtccctgccgagggctggcctagagcaagcactggaaaagaggccctgccatacaccctgcgtacccactgccaggaccctctcagacaagcgtggcacagccatgctgaccttccatctggtgaaccaagtggcagccccaggggcctgccctgcaggtcacagctaaacaagtctggcagaagccacgcttgttccccatgtacctctagagaagcagaaaccaaagtccccctgtgccctgggagggtggggccgtctaatttattactgcccagcattccttccaacgggaagtagatgggcgactgctttgttcacacacatttgattaaaaataaacaaacagcatctcccc

SEQ ID NO: 854 - DNA, 3544 bp, Homo sapiens
ttttgcttaagtctttgattagccaaactgtgatagacagttctgtgatggagcaaaatcctttgagaagtgagccagccctagttcctccaaaagatgaagaagcagcagtttcaacagaagaaccaaggattaatcttccccatcttctagaagaagaagttgaattcagcactgatcttattgattcctacccaggacatgaaaccctttggtgtcataggcggcatattttctaccttcagcatcacttaaatggtaggtttcctcacagcatgacccagttgtcacctgcagacagccctggggggactttgagtgacttgcaccttatcccagcaggctcccagctgtctcaagcaatggaagtagatggactgaatgactctagcaagcaaggctattcccaggaaaccaaacgcctgaagcggacgccagttccagactccctaggcctagaaatggagcacaggttcattgatcaagtattgtccacctgtcggaacgtggagcaagccaggtttgccagtgcatacaggaaatggctggttactttgagtcaatgaaagaggtgaattagtcctacaaggttccccttttagtgcaatattgctttcttttattatttacatagttgcatgaactgtttactattattggctaaccatatgttcttcgtctttaggttgaaagtccatagtaaatctttcattttatttattttgttaataactggcattcctgtggggataaaataatcgtatagttccttcctgctgaacagcgagtcttaaattttctgtttaacttctcaccctttgtatttctatatgtggggcttctcatttggttttcctgattggttcacacacacacacctctaccccactcagtccaattgctgcataggcaaattcttttaaaaattaaaaatttaaggcctaggcaggaggattgcctgagcccaggactttgagaccaacctgggccacatagcaagacccgatttctacaaaaagtaaaacaaaatagctaggcatggtgctatgcaactgtgttcctagctatgcaggaagctgaggcagaaggattgcttgagccccaggtgtttgtggctgtagtgagccatgattgcaccactgtactcagcctgggcaatagagttgagaccctgtctctaaaacaaattgaaaataaacatttatgttgcagttcaactgaagaatgttggtatgaatgccgaataacttgatgtaattgttttgagaatcaaatggctagatgggcgaatgtttaaaaatgtaaactagttctctttctctagcatgttctacccaattaccaaagtcagaagtattggaatttatatgaaaaaaatgcttccaatgtaatccattttttaaatggttatttaagaaaaaactaacttaagagtttatgtaattgcagtaaaggaaaattatttttattgctagttttgatagattatttttacctcaaatttggtatatgccaaaacacatcagtccttataaaattgatttttttttcctgaaaacctggaatgccatttttagctattactactttttaatttcaaattcacttatgacaaatgggagaaatatataaagaaatagatccataaaaatattcctttttaaaaatctaaattattgaggatacactatggaaactataaaattatcatgaagtgactgttaaagtttactggcaaatgccaagggaaggaatagtatgtgcaaaacaaaacactttgatactgaacttaatcagggatgaggtaccaaagtatccacattatagccgtatcttatgtttccaataacaagggctgagtttttcaggtaggtgggatgagggtggggaatgggccatgtaatgtctgctttcttatatttgcccttttgtaagtggtctgtttcttcttttcatatactttgttttgccaatccattacgtattttttgtcacttttgtgtgtcatttttgtatatctttcctttcttacttcaggggtgtgtcttcaagatttctaccccctatttgcaatgaatttcatacctcatctaaaatacattcatataccagaaatatgaagagtggcccttctaaaagtttccctaatgatggaagctgtcagttgtcctatctgtgcagaatgtgagtaatagtggcagaaataagtgtgacaacaatgctttgcctgttgttctttttacttgctaggtaatttgtaaagtggggataaagatgtagggaaagtaaacctctctctcactgttacggaaagcctggacttgagttaggtagactgccttaaagaagaagaaatatgtccttttctttggcatcatggttttgttgagtggcagactgttgaagtgagttgagacttaagaacgccagaaaagttgtctagcctggccccagtagacagaatttgttcttctctcaagtaaaaaattacctttttatagcttttatattatttagatgaaaaaataccattatgaacataattccatggccctttgtgtacaaagcatattttgaattaaatacctcaaggtccacctagacctctatggataaaatcataagtttatgatttttagctcctgtgagtgtttgggggcaaactacacagagaagacatgggtggttcagcccattccactaaaatatgttgccagattctggcctaactcagtattaccttttttcctaaaaatcatttttcacattttgagtaatagggcttatgctttgatgtgaaaaaatgtcaggaaatgagtgtagacaataccctataaaacactagctaagttttatagtgctccatgcctttgtgtaccttccactgattatcttgcctatctttggtgtgtaaactattttcatatcttctaaggctcttaacccactcttttctgaagccgcacagtcctttaatatgtcttgtttccttcctaaaagtttaaagtagagagcaaaaatgcaaatacccaaaggatactgttagtatgtaacttttgtgtgctgctttatttctagagtttgcattttttaattgttcattcacagaaaatcctaatattgccctatatggttggtttttttcctaagtggttaatatttaaacccgctagctgtagcatgataatgtctttgactgagcttatgtagtagaaaggatgtgtctgttttctgggacttttagtcttcacttatttttctataacaatctaattgttaaaaggaaaagatggcttattgacacatatttcattaaactttcactggaagaacagtgggtcatcctactgtggattaagaatactactgacaagcaaaaagcattaagctctgtaactgtctccaacaccaccttcaccccgcctttagtgtaccttagtgtactttagtgtacctattttggcagtacggtgttttccagattctacttgtgccctgcacattgtgaggactcattaaatatttattaaattaatgaatgact

SEQ ID NO: 855 - DNA, 3163 bp, Homo sapiens
acccgccgagaggatgcgctccccggcgcccagcagcagaggccaccgctcccagaaatgcatgcgaccgatccccttctcccggaccccaggagccggcgcccccgccctgtagggttacgactcactgattaaaaagagggactttttcaaatactttgcacttttgattgtgtattatggataccaaggaagagaagaaggaacggaaacaaagttattttgctcgactgaaagagaaaaaacaagccaaacaaaatgcagagacagcctcagctgtagctacaaggactcatactgggaaggaagataataatacagtagttttagagccagacaagtgcaacattgctgtggaagaggaatatatgactgatgagaaaaaaaagagaaaaagtaatcagttaaaggagatcaggcgtacagaactaaagagatattatagtattgatgacaatcaaaacaaaacacatgataaaaaagagaagaagatggtggttcagaagccccatgggactatggaatacactgctggaaaccaggacaccctaaactccatagcactgaaatttaacatcactcccaataaattggtggaactgaataaacttttcacacatactattgttccaggccaggtcctttttgtgccagatgccaactctccttccagtaccttaaggctatcatcatccagtcctggtgctactgtctctccttcatcatcagatgcagaatatgataaattgcctgatgctgacttagcacgaaaggccttgaaacccattgaaagagtcttatcgtctacttctgaagaagatgagccaggtgtggtgaaatttttaaaaatgaattgtcgatacttcaccgatggaaagggtgtggttggcggtgttatgatagtgactcctaacaacatcatgtttgaccctcataaatctgatcctctggttattgaaaatgggtgtgaggagtatggtctcatctgccccatggaagaggttgtttccattgcgctctacaatgacatttctcacatgaagatcaaagatgccttgccatcgcctggagaatgggaagacctggcttcagaaaaggatatcaacccattcagtaagttcaaatctatcaacaaggaaaaacgacagcagaatggagagaaaattatgacttcggattccagaccaatagtacctttggagaagtccacaggacatacacctacaaagccctcaggcagctctgtgtcagagaaattaaagaaactggactcctctagggagacatcccatggttctcccacagtgactaagctcagcaaggaaccttccgacacttcttctgcatttgaatctacagccaaagaaaactttctaggggaagatgatgattttgttgacttggaagaactttcttctcaaactggtggtggaatgcacaaaaaagacaccttgaaggagtgcctttctcttgacccagaggaacgaaagaaagctgagtcacaaataaacaattctgccgtggaaatgcaggtgcagtcagccctagcctttttgggaacagagaatgatgttgaactgaagggggcgctagatttagaaacctgtgagaagcaagatataatgccagaagtggacaagcagtctggttcgccagaaagccgagtagaaaacacactgaacatacatgaagatttagataaagttaaactcattgaatattacctgactaagaacaaagaagggccacaggtatctgaaaatttgcagaaaacagaattaagtgatggaaaaagtattgaaccagggggaatagacattacccttagtagttctctttcccaggcgggtgatcccataactgagggcaataaagagccagataagacctgggtgaaaaagggagagcccctcccggtaaaactgaactcttctacagaagcaaatgtgattaaagaggctctagactcctctttggaatctactctggacaacagctgtcaaggtgcacaaatggataataaatctgaagttcagttgtggctgttaaagagaattcaggtacccattgaagatatacttccttcaaaagaagaaaaaagcaagaccccacccatgttcctgtgcatcaaagtgggaaaaccaatgagaaaatcctttgccactcacactgcagccatggtccagcagtacggcaaacggagaaagcagccagagtactggtttgctgttcctcgggagagggtggatcatttgtacacattctttgttcagtggtctcccgatgtctatggaaaagatgccaaagagcaaggctttgtggtggtggagaaggaagaactgaacatgattgacaacttcttcagtgagccaacaaccaagagctgggagatcatcactgttgaagaggcaaagcgcaggaagagcacatgcagctactatgaagacgaggacgaagaggtgctgcctgtcctacggccccacagcgcgctcctggagaatatgcacatcgagcagctggcccgacgccttcctgcaagggtgcaagggtatccatggagactggcctatagcacgttagagcacgggaccagcttaaagacgctctaccggaaatcggcatcactagacagtcctgtcctattggtcatcaaagatatggataatcagatttttggagcatatgcaactcatcctttcaagttcagtgaccactattatggcacaggcgaaacttttctctacacattcagccctcattttaaggtctttaagtggagtggagaaaattcatactttatcaatggagacataagttctttagaacttggtggtggagggggacgatttggtttatggctagatgctgatttataccacggacgaagcaactcttgcagcactttcaataatgatattctttccaaaaaggaagacttcatagttcaggatctggaggtgtgggcatttgattgaaattcagactgccttaaaatataacattaaaaagactgggttcgatcagccctcctaaagctggctggaaaaagaagccccagcccagcctgcctcatcccaccccaatgcttcctttctgccatcatctcagagcatgatcacattgcagaaagattctggaaggtccatgtagagggcagacattg

SEQ ID NO: 856 - DNA, 3630 bp, Homo sapiens
ttgaaccaggtcagtttccttgcagtctggtgaggagaagacaccctacatgtagttatcatctctggaccagccctcttgctgtgtgcctccatcatactcccacctccaagcctttgcacttgctgtttcctctgtctcagatgatttcctcccaaccatatatgtgatcttttctcttgctttattccaatgtcacctcttcccagagatcgtccatgaccaacctatcaaaaatggcaaccccagctactctgtattcctctgctttattcttcttcatagcagttgtcactacccaacattatgtttttatttatgtattcctttcttacctatctcccatgttagaatgtaaactcccatcagggaagggacctattgtcctataccttttatccccagtaactaaatcagtgtctggtgctcaaatatttgtccaacaacaaagtaacttcagtatttgcagcattttgtgtttctgcctagaagctcccatttccctcatgtacagcttgagtgcatctctagaagatcagccatgggcatgggcattatgtggaggtgggagggctcctagtactacttagccaccacttagcctagaacactcagctttgctttgttttttgcgcttctgtcagaacaagatattcttctctgttctgaaaggatggagcttaacattctactctctgataacagatgaagaaatgatggccacagaggtcaccccctcagctatggcagagcttacagacctgggcaaatgtctgatgaagcatgaggtgggtagaaggagcaggtgatacctttactccttgcccaggtggggagtcaccttttacttttcttgctctatggtgctatcaagagttttttgtaatactcctttgttacataagttcctggttccaaaggccccagaaaaaaccgagggaaaaggtgcaatgccatggtgtctcccataccagcataggcaggagctctcaggaaaacacatagtaggcacactgatgcagatccctggtgtttagcctccccaagccaggcctgagctttgtctccatcctacacatacaggttttctcacattttgattttttctttttgactggcaatacacaaaaatagaggaagtaaactccttttatttttcctgcttagctatttaaaactccagctcctaagccaggcatggtggcacacacctgtagtcccagctattcgggaggcttagatgggagaatagcttgagcccaggagttcaggaccagcctgggcaacaaaacaaacccatctttagagggggggaggaaaaaaaaaaaaccctccggctcctgatgtgtaataatcatcagagaaaactgtgcttctttttccattgtaactcttcatcttttcctgttcaggatgtttgtacagcgctattaattacagccttcaattccctggcctggaaagatactctgtcctgccagaggacaacctcacagctctgctggcctctcctcaaacaagtatggttattcaccccttttccctgcccctcatggaaggtttgggtcatgcagactgactaaatcattcagaagaactggggtgctgaggccttgagagaggccccctgtggccctaaagcacagttgtctccccaggtgctgtcagggacactgctcgcagatgcagttacgtggcttttcaccagtgtgctgaaaggcttacagatgcacgggcagcacgacgggtgcatggcttccctggtccatctggccttccagatatatgaggcactgcgccccaggtacctggagataagagctgtaatggagcaaatccctgaaatacagaaggactcactggaccagtttgactgcaagcttttaaacccctccctgcagaaagtggctgacaagcgccgaaaggaccaattcaaacgcctcattgctggttgcattgggaaacccttgggagagcagttccgaaaagaagttcacattaagaatcttccctcacttttcaaaaaaacaaagccaatgctggagacggaggtgctggacaatgatgggggtggcctggccaccatctttgaaccctgaatcaagcttttgggcatccttcctcggcctttcttgtcatctcttctttccctttgtagccgatctctaggcccttcttgcactgccacctcactttccaccactgtcagcctggaaagagatccaggtctggagctggagagaacaggccctgtgcaggaccagaagtaattatactaaagtatcaagaaagggagttagggcttaaactattctgtctagatgtcccagatagttcccattctacttggagatttggcttttccaagaaaagctagagcagagcagcccttctcccacaagccctcccacccccgtgcagccacatacctgtacagaatggtaactaagggtgctgtgcccaaccctgcgactagcaaggctcgcagcaagagcacagccctcaactacttgtgccagagtttctcttggaccactccaactcccactgagcccttttgctgctgggctggcaggaaactttccccactccctaaggggcatgtctgggttaggtgctaagtgctgaagagagcttggtcagttctctcaactttgctttgggcaagaatctggtcacctgatgggatccatggtacaggctactgctaaacttggcacagtatcaagtatagtacctccaaggaccagggctgggaagtctttagtgctaacatcccctttagagttcacacatcttgcccttccatgaatgacccctcagtctggcctccccagcctcaaggtccactcaggcacaagagccacagtaccctagatagtgtcacatgacaccgttgtcatccaaggataatacagaccaactaggctacatctgtgatgagcagctagcaaagccgctggtcttctcctaggactaagtccaggtgccttccacaatctcatggtctttcaggtccctggttacttttctcaaaggccatttccaaaagaatacatgccttcacatcacaacctgtactgtgagtccattctagaggtcactgaaaggccctgtaaagagaggacatggatacgggacctggccctgaggttattactggccgtaaggcagagttaatccatacagaaaccagtgtgtccatgtgctctgcacaaaaacagacctgttgtccatccagtccactgacaagagggtttccccgagagccgaagtggactgaagctacagtttttagctggtgcgggccacaggcagggtcagattgagaagaagcaaagctggggaagcagaagttgggagtcttgtgttgctccctcttcctgtgtggtgctctgggtttctgtggatcgtgaaggcgatctcaagagtgtttccctccaaacctgatagctgcctattcctgtctggttggggctgtggaggatgtagttgtatttattgcattgtaatatttttaacatcctgtgacttcatgctagaaattttctattgtttatagaaactttttgtagaaacattaactctaaagcacatctgcatgtcagtaaaaatctcagtttcgtacag

SEQ ID NO: 857 - DNA, 4021 bp, Homo sapiens
atcgggccgccggcgtccgggctccagaggccgcctggctgggcgcccggtgccttttgtctggcgcagggccggcgtttgcatcacatttcggatacctccctctctttttcgcctctccttctgcctcccgctcacatcgcctccccactcccgccaccgtcccccgccggactgctagcctcctagaccgaagcccgaggacgtctctgcccgagcgatgtcccctctccagaaagttgccgccgccgccgccgccgccgccactgccgccgctgggcggtgaaacaaagtctggcggggccgcctcccggtgcaggagcgcaccggtgcctagcggctggactccgctgccgggcgtcccgctttcccccggggagccctaaacgctccaggccatggccgagggcgcggccggcagggaggatccggcgccgcccgacgcggcggggggcgaagacgacccccgagtgggcccggatgccgccggggactgcgtgacggcggcctctgggggccggatgagggaccgtcgcagcggggtcgcactgccaggcgccgcggggaccccagcggacagcgaggcgggcctcctggaggcagcacgggcgaccccccggcgcagcagcatcatcaagatgggactgtgtagttgcaggaaaacagctcagagtttccactgattcttcattatggatccttcaaaccaaaaatgtggtggaagaaagaaaaccgtgtctttcagcagcatgccatcggaaaagaaaattagcagtgcaaatgactgcatcagcttcatgcaagctggctgtgagttgaagaaagtccggccaaattctcgcatttacaaccgttttttcactctggacacagaccttcaagctcttcgctgggaaccttcaaagaaagacctcgagaaagccaagcttgatatttctgccataaaagagatcagactggggaaaaacacggaaacatttagaaacaatggccttgctgaccagatctgtgaggactgtgccttttccatactccacggggaaaactatgagtctctggacctagttgccaattcagcagatgtggcaaacatctgggtgtctgggttacggtacctggtttctcgaagtaagcagcctcttgattttatggagggcaaccagaacacaccacggttcatgtggttgaaaacagtgtttgaagcagcagatgttgatgggaatgggattatgttggaagacacctctgtagagttaataaaacaactcaaccctactctgaaggaagccaagatcaggttaaagtttaaagaaatccagaagagcaaggaaaaactaaccacccgcgtgaccgaagaggaattttgagaagctttttgtgaactttgcaccaggccagaagtgtatttcttacttgtacagatatctaaaaacaaagaatatttggatgccaatgatctcatgctctttttagaagctgagcaaggagtcacccatatcaccgaggatatatgcttagacatcataaggagatacgaactttctgaagagggacgtcaaaaagggtttcttgcaattgatggctttacccagtatttattgtcatcagaatgtgacatttttgatcctgagcaaaagaaggttgcccaagatatgacccagccattatctcactactatatcaatgcctctcataacacctatctaatagaagaccagttcagggggccagctgacatcaatgggtacattagagctttgaaaatgggctgtcgaagcgttgaactcgatgtaagtgatggttcagataatgaaccaatcctttgtaatcgaaataacatgacaacccatgtttcctttcgaagtgtcatagaggtaataaataaatttgcctttgttgcttctgaatacccactcattctttgcttgggaaatcactgctccttgccgcagcagaaggtaatggctcaacagatgaaaaaggtctttggcaataaactctatactgaagcacctttgccctcagaatcctacctcccatcaccagaaaaattaaaaagaatgatcattgtgaaaggaaagaagttgccttctgatccagatgtgttagaaggagaagtaacagatgaagatgaagaagctgaaatgtctcgaaggatgtcggtagattacaatggtgagcagaagcaaatccgactctgtagggagctctctgatttggtgtctatttgtaaatctgttcaatacagggattttgaactatctatgaaaagccaaaactattgggaaatgtgttcatttagtgaaacagaggccagccgcattgcaaatgagtacccagaggattttgttaattataataagaagttcttatcaagaatctatccaagtgccatgaggatcgattccagtaacttgaatccacaggacttttggaattgtggctgtcagattgtagcaatgaattttcagactccgggtccaatgatggaccttcacacgggctggtttcttcaaaacgggggatgtggttatgttctaaggccgtctataatgcgagatgaagtttcttacttcagcgcaaatacaaagggcattctacctggggtgtctcctctagctcttcatatcaagatcatcagtggtcagaatttcccaaagcccaagggagcttgtgccaaaggggatgtcatagatccctatgtttgtatagagatacacggaattccagcggattgttcggaacaaagaactaaaactgtacagcaaaacagtgataatcctatttttgatgaaacttttgagttccaagtaaacctacctgagctggccatgatccgttttgttgttctggatgatgactacattggggatgagtttatagggcaatatacgataccatttgaatgtttgcagcctggatatcggcatgttcccctgcgttcttttgtgggtgacatcatggagcacgtaaccctttttgtccacatagcaataactaatcgaagtggaggaggaaaggcacagaagcgcagtctttcagtgagaatggggaagaaagttcgggaatataccatgctcaggaatatcggtcttaaaaccattgatgacatcttcaaaatagcggttcatccattacgagaagccatagatatgagagaaaatatgcagaatgcaatcgtgtctattaaggaactatgtggactccctccaattgccagtctgaagcagtgcctgttaactctgtcatctcggctcatcaccagtgacaatactccttcagtctcacttgtgatgagagacagctttccttacctggagcctctgggtgcaattccagatgtgcagaaaaagatgctgactgcttatgatctgatgattcaagagagccggtttctcatagaaatggcggacacagtccaggaaaagattgtacagtgtcagaaagcagggatggagttccatgaagaacttcataatttgggggcaaaagaaggcttgaagggaagaaaactcaacaaagcaactgagagctttgcttggaacattacagtattgaagggccaaggagatctgttgaagaatgccaagaatgaagctatagaaaacatgaagcagatccagctggcatgcctgtcctgtggactgagtaaagcccccagcagcagtgctgaggccaagagcaagcgcagcctggaagccatagaggagaaggaaagtagtgaggagaatgggaagctgtgactctgggcattatcgacacgttcacccatcttatcaaggactctggtttctcattcttgttttctttctttaaatgttttataagttcacaaaatggtgccctatatggggtattggacatagatattttcacaatgtcagtatttcagtgtagttaatttatctaaattaaagcctttagtatcagtgttttaaattctgagacatgtgtcaacacccctgtgtggatgcctgtggaagagtgtgtgtgtgtgtgtgtgtgtgtgtgtgtggcagag

SEQ ID NO: 858 - DNA, 4786 bp, Homo sapiens
ctcattgtcaagttcagagttacgctgcagactgcacagcacctcgcctgcttctagggcctgctccggtcagcccaggacccaccacagcaggaccccccatcctgtgctcacccggggcttgtccatggcactggaaactccttcctgttcctgatccccctctgggcgaggggtgggcagggacatgtggctcgtgccgaggtctaatactgtgttcccagcatggaagcaggtggggacacttcctgtggcatgcaggattccgtgtggaaagctgtgactgtcacccctcctccccactcagttttgttagtggacctttccctggcccttctctccttggccccctcttggcaggagagaggaggagaggatctcactttccccctgtaccagccacaccctcggtctgcggggttcccagcagctggccagggatgctccacacctggaggtcaagtaaccgtcccctcactctgggcatcggtgccctctctggggttggaacaggaaagaaagccaagacctgtatgtgggacttgagttgagactcaattctgtagagtcaggggtgaggaggagccaggcctcctgtgtgctctccataccccagagccgggtgcccagttccatgggtcctgatggacagaagggaagaacgggggggctgctgcaccgtgggtggtaatgcagtgggagccacctccagctgaatgcccagggactcctggggctgctggccccgggtcccagcagtgggtcctgtttcttctttactcttggaatgcaggatctgccacaccaaaacgtcccctccacatttggtgaaataggaagctccatggcatgtctccatctttcaaggtgactgagaggtttattttcataggagcctcagtggccttgtccgtacccacctctgcacgtggttgcagaaagtgaaggattgtcagggagcagggcagacatttggtttatctgtgtcattggtcaaagttttgtttttcctccagaagaaaaaggcttgtgaacatgccaccgtattcttcattccttcttttggaaatgtatgaagaacgggtggcattttggagttattggcctgtgaacagctggcccagaggaagggttagatgtgggtgggtgtggccgcctctgcccctccccagcgcaggtgtgcgtgggcagcccaggcaggcgctcaggaagggtgaggtggagccctgcacgctctgagcacaaagtcctgggatcccttaaacccaagcactgccttgacagcagccagcatggctgatagaagagacacagaagtccagctgatgccagacagagggcgtcactagagagccgtgctaggtgggggtcattcaagttgtcttggcgtatgcagacgttgcttctagagagtcagaagctctatatgcgtagtgttggagcagaatttcgggatagtgatggcaagcctcctcccaagccagctggggagtatggggagggggtggccggaggaacctggcatccccgggttaggaccacagaggtggctctgcctgcagctgggcctctgcctcatcctgactccccctgctttggccatggctcttcttgtccttcctcttctcagtgcaggaggaccctgaatcaaatgcctcatcctggtttgcattttaccctcggatgaagcttgtggcgaacccctggactctgtgtctcctgagtctctgcagacctcgggtcctggacccagagactcttctccctgggacaggaggcactggggtgggtggacaggggtggcctggggcacagtagctgacggggggacttcctagttttctgggcctttccaactctgagtgtgaccttcctattcttgatcacagcccccaacttcggagcctgctagagcctgcagaatgtggcttcatcctcttcctctgtgggaaaaggcggggcctggcagtcccgccaatcttgtatatttgctccccacctcggtggtgaatacattcttgggtggtgaataggttctctccttgccttcactctagaaaagtcccctgttttgtgatgtaggatgtggtcaatgactgactcgtccctttggaccatagacgcagctctgatttctggtgttcctgggctctgcacacagcaggagccactctgggctctgagaggtgcatcttctggctcactttcttcttgttggctcttctccctgcgtcttctgccactgccctgttctgggtgggaggctgtcacactgtggtggagggtcccctctcctgcctcccctctttgatccttttctgtgagggtctgctggggtcctgtgtgtcgtgcattgttgatagattcctgtcgtgcttgctgtcctccccattctaagggacctctgattgcctgtgagcagtttacagggtcctctcctggccccttcacccgaggaattcccgcaacgcatgagtttgtgaggggcggatcctgggaggatgtgacgtcaggtgagaagggagggcccgtcctagtccggtgggctcctctaacaaagtgcattagcctggggagttactgacgctcgaaatatgtcgtcaaagttctgaaggctgagaagtccgagatcaagatgcctgaggattcagtgcctggtgaggacccattccttagggcagtgcctctagctgtgtcctcatgtggccgaaggggacaagggaggttgctggagcctgtttgatgagagcactaccttccttcaggaggggattattcagaaagtctgtctggtttcagggcattcccaaaggccccacctgttcattctaccccattggtagaattcccattgggaattaggcttcaacatacaaatttgggagacactgacatttaggccatagcgcgtcaaaggcaaagtgaggctgagtgtggaaaccatcccagaatctggatgtggcccaggcagaaggaaactcaaagtgatggggtgaccgatggtccctggtctgtgcaggactcagcggtgcggatggccctgggcacggtggcagtggctgttggaggatgatagggaacatgttggtggggggagggtggagcccactatgagtggcaactccctgggggcacaggaaacaaagctagaggtggctcccctctcccctccctgcacacagtgtcacctctgtggtggccctgtcgtccgcctcagttcacaggtgttgctgtaacaactcctgaaattaccttcaaaaggaggctcgtgcaggtgcctgcaggagccaggaggccgaagtgcatcctgagtgtccggggacaggccagcctggcggggtccacggccccacagtcccaacgactgcctcagaaatgggcagagagcatgcctggttctagctggcaaggcccacatctcagagctgtggacagtcatgaagggtccgtgagcatggagagggggcaaaaatgacccatgaacctcaggccactgtgctgccatccagccaagtgcggtaccagcccttcgggcctcgagatcctctacccttctctgggccttgctgatttcctcctccagcccctctgtttgtgtacgcacatacacacatgcacgcacgcacacgcacacccagtgcaatttctctctgctccctgtactccccaaaattcaatgggttcctctttcctcctcagagatatagtcctgggccccatctcagcctgcagaggcctgaacgtttcccaggattgtcttctaattctcaggtccggctttaaaacaaaacctaaactaaaactaaaatgctttctgcaaagaataatacaccaacataaagtccgggtatcctaagcatgtggtgtgtatggtgtctgaaattgaatatgctgtgaaactgcctgtgtcgaaatgcagtgtttcccaagacctggaggctctctccagctgctgattgtgatcacctctcccgatcaccgctgagccctgcaggtcaccttctcctgacctattacaccactgattgcttatgctgggcacaattttatacccttgctgttgttcagtctaatcatccctataaccctatcggatcattcccatatgacagaggagaaaacctggggacacaggggctgtgtcctggccaaggccttgcttgcagcaaaaggcagagctggggtctagccaggagccccagcacagtcctgttcttcccccactaaactgagctgtgaaatagatcatggcggtctggaaaacgagctaattccgtgccgatggaggtgttgatggatgtccaccactctccacttgggaggaggccttaacatccccctcaggtctagcttctctctgtgactgagtaccttgggaaagtgggctcagaggaggaaagggacttacttgcccaagggccacagctgccaagtggcaggtaagggaccgttattctcctgcccctttcacagaggacaggaggaaagtgaggacaggtggggtacatgagtttagcctcttttctgcagcaggcccagatcagctttgcacacggttggtgctgacctcaaatgcagccctagaggggcctatctctgccctgagtattgaggtgcaggcttcttcccctttgttctgtccatttccaaaaatgtgaacacacacctcctacatgtttatattattgtgtgcatagatactaccattgtaacattttttgcggattaaaaatgcactattgtattgaaaatttcaaaggaaatgtgtaataaaacatttaaaatt

SEQ ID NO: 859 - DNA, 3284 bp, Homo sapiens
cagagagacgagataggaactccactgcttactggctatgtgtcattaggcagatccaaaacctaacttcattagggactctgatactgcacttccatatctttgtctgtaaaatgtagatggcaatcacttcatcattttaatgcacccatttttagcagcatgccgacagcatggagctgtggttctcaactttggctgcacattggaatcacctggggagctctaaaaactagtgcttgagccccaccctcagaaatttggatttaattggtctgaggggcctgggcaatggaatttttaaaagctccccaagtggtcctattatacaaccagaattggaaccattatcctagaacaccagttctcagtgtgtggtccctggaccaacagcatctgtatcacgtggatcttattagaaattcaaattctcaggccccaaacctactggatcagcagctctgggggaaggccgcagcaatctctttaacacgcccaccagacaaatctgatgcatgttcaagtttgagagccactgtcctaggacaacagataacactcagcacaactgtgatcagttcagttgtcctctcggatgagtggtaactctaatacaggccaacctatctcatgctgtgagtaggaccagcaggtcggaaagagacctagtgtccaactatattgagttttaatttattttgcaaactgttgtatagaccttatcctgagccatgaactgctataattactttttatgtataactcgtttaatcccaataaacaaccaaagcactgttattatccttggcttactgcacagagaactgaaacacagaaaggttaagtcacttgctcaaggtcacacagtcagttaatatcagagccagtatttgaacccaagcagtctttatttgttgtttaacaaataaaattagtttgttgctttaaccacttggcagtgaggcccctctatcaaaacaaatccctcgtagaaaaaaagttgtagcccatctgcccactgaggggctccacattttttttttcactttccactttccataaccgtgtctttgagatttcataagtactgaaggcaaattactctttaaagatttgcggtaaccctaacctctaaaatgttttaaaataagcataacactttttttttctaatgagacagagtctcgctcccttgcccaggctggagtgcggtggtgccatctcggctcactgcaacctccacctcccaggttcaagcgatcctcctgcctcagcctcctgagtagctgggattacaggtgtgcaccaccacatccggctagtttttgtagttttggtagagatggggtttcaccatgctggccaggctggtctcgtactcctggcctcaagtgatccaccacctcagcctcccaacgtgctgggattacaggcgtgagccactgtacacggcctcttcttttttttttttttttttagacggagtctcactctgttgctgggctggagtgcagtggcgcggtcttggctcactgaagcctctgcctccagggttcaggtgattcccctgcctcggcctcccgagtggcttggaccgcgggcgccagccaccatgcctagctaatttttttgtattttattagagatggggtttcaccacgttggccagggtggtcttgatctcctgaactcgtgatctgcccgccttggcctcccaaagtgttgggattacaggcatgagccactgcgcctggccgcccagcctcttttttaaagtttgtatttgtgtggaatgtgcactaaagattttgggcaaagttaaaaattgaaagtcgcatggctttaagaggggaaagaggcaagacaggtagagttaaatgttaacctgggtgatatcccagggccctgaaagatgcagaggacacataaaaccagtaggcggtgctcttctcagtcctaacgagtgtatttacactcaccccaaaataaagcttctacagaataaaactgtttaaaataaccattgcttatacaaatgtaagctttctgttgccctttcaatactgttttaacctctgtgactttgttattgttatggaaatgatttcctttcatttacatttctgacctctctgtttacttcacagcagaaagactattctagttttctatcaagaaaaagcaagattaagatagctaaagatgactgcgtttttgggaacataaaggaagaagatctctgaagaaagctctcatattttaaaatatccttggaggctatctcaagacagtgaaagaacttggggattcaggtgggctacctaccatcagtggaggaaatttgacctcttcccatttttttggcattaacatggactgtattcatcaaggtattataccgcagcactctatggaaatctcaagattagaaaaaaaaaaagaaccaagttatagagttagtttttattttatttttgcacttcgtcatgacagtatagagtttgtttttaatgtctcataaatgacaagtggcaaattcaaatcaactcatataaaactcattctattttttctctaaaatagatctttatatggcttcatgaagtcttttatgtgttttgaatttacataaatgaaagtctcataaaatatcataaagatattttggatcgatttctaaagatgtgactcttcaacggaggagaatagggctctgagaaatggaatcactgaaaaagaaacctgggttctctgatctatccacacagaactagagcaaggaggtgatgaaatactgatctctttcctcacataagtctgagcctaccaatatggatgtactcaaagtgaaacgctgccctgttctctgcttgaccattgttataattttattctgtccttagagtactgaaggcagttcaataatcaacatgctatttggaatgttttaatttggaaagcaataaggctctgcacctgatatcagataccttataattctcttagctttaaaaatatgtatactttctcacaaggtttttccttatctagcttcatttctctcatggtaattaatgtaattatgtatagaattaagaccacaataagggagatgatcagaggaatctgtatagtgtaattagaaaaagtacaatattctaatgttctaactgggttgtatacctaattatataataaatacaaaataattccagtgaatataaaatttgttgattaaaattctgtgaataatctttttgaaatatagaatctattaaaaattc

SEQ ID NO: 860 - DNA, 3329 bp, Homo sapiens
attgttaatgctctcctatgccagcctgtcattgttccagttgtttgaaaaaacaaaacaaaacaaaacaaaaaaggatgcattcgttgtctgggttctcgagtcaccttatggctgtctaaaaatgtcactgttccgattgcggtctctgcagccttatttgagtgttgccttagactgtctgactggacaaataaactctctttgccctatgttaacaaatgtagattttttttctttcctctgtgttatagggaatctaaatgttcaactttttctctttctctctttctccttctctctgactgttcttggtgctgggccctcccttccacagcgatgatacctcctaatatcgctgcatgtatgagaaatgaaaagctcggggaggcttgcttctaccttatgggccataatcaaactacggtttgtagctcaatcaatactaggtgtttctgtgctgtggcctaatttcctcattgcttctgcttagctctgttttgatatgtttggcaattcattctgagcaccctgcgttctttgaattgtaagtacaacgctgaccctgttgaagtgttgccttcccttgtcttaaaagtaggcataagaagccactggtgatccaagtgccttcctgtatccacatcttcacatgacctttgttaagaacctgttttttgttcattctcgtagccaacccagtatttagaaagaatgaaccttgtttcatggagccctgtatcgtagggctttgctagatgggaagacgagatttcctgcttggtcaggtatctctttgcaaactgcagtccatgggcccaatcctgtccatagcctgtttttgtaagtaaagttttattgacacataggcacgcccattacttttgtgttgcctgtgtttttataccacagtggcagagctgaatagctgtaacagagatggtgtggcccaaaacacccagattatttactattgccctttagagaaagttggctgacccctgcttttggcttttcacttgctttttgttaaaaacccactctaggttttgggaagttgtcatgaaacaggttaattgctaaatattgaccttgttggctcatgaaagatccttaaagagccccagtgaccccttagtctctgactgtcatacaagtctgccctccagactgcagtgccttgtttcaggtgctttgcttggaatggtgtcatgtggatgacttgttgggtttagctgcaacaaagcatcctagctttgaaaagagctctcctcaattcaggacactgcctaaaacatttgcactgtcatttcaaatattgaataatgataaataggggccattatgggctgccctgcttttaaacctgtagaaaccttgatgttataggaagcagcccagtgactccaagctcttagatgtcattatgactgcctcccatgtcataaagaaaaaatgcctctaaaccaaaaattttatttgacccccatccaatctcaaatgtgtacttagcagcttctcttcccctaccttttatctatcagaaaacaccttttaaaaacagttccttattttttaatgtgtgcaaaagtagagaacgtagttgaataatacagataggacagtttaatgggcccttgcgtacatatcccatttgccagtcgtcaacatctggccagcatgttgcctctgtaatcccctttgcctgctaccctggattttttttaaatagaagtatacttctgcatatggtaaaatgcataaatcctgaatatacagtgcagtagatttttcacttctgtatgcgcccatttaatcaccacccagataagatgtagatgattcctgccctgctccagaaagcttcccaggtgccccttcttcacatcaataccctaaattatttttaagtaaatcaaaacaagtattctttaaagcaaagaatattttcttgggtgtgggagacgggtgggcacaggggaaaagggttgggggggtgggaaaggaagaacaagggatagctacagagaggaaattttgatgcctctagacagactatttggattgtgcctttaaagactcaaatcatgactgatttttgtcagttctttaatgatctatgtctcgggtatggagaacattcagtcagccagacgctgaaagccacaagtactagtttttaaccctaactacgtgcagttatccttaagttaacagattcagttggctttgagtctgactgctttaacagttgtttgcttgttgtgactaatgaggtctcgagtgtgggtgggaacggggacaggagccgagggaccttcgtacccaactgttgctctcgtttattttcctggcagaccccagcagcgaccgccacggccccgccaccggtccacaaggtgttccggaagtgagggccgggcccgaccgccggcagcatccgtcattggagtccagttacccacccgatcttcacaaatcatcaccacatggggaaaagcgggcacacgcaagggatccgaaaggcagcagagagtatagcagacaacccaatgaacaccacacctggaatgggacttcgaggaaacccgacagcggggcatgccgacccaaggaccgggcgccggagggacggagggacgcgcaggccgagcgcgcggcagccgccaacggccccaagaggcggtccccagagaagcggagggagggcacccgcagcgccgacaacactttggagaggagggagaagcacgagaagagacgagacgtctctccggagcggaggcgagagcggtcacccacccgcaggagagacggctcccccagccggcggagacggtctctggagagactcctggagcagaggaggtcccccgagcgcaggagagggggcccgcccgagcgcagggccaagtccaccgaccggaggcgcgcacgctcccccgagcgcaggagagagcggtccctggacaaaaggaacagagaggacagagccagccaccgagaaagggaagaggcgaatctgaaacaggatgccggcagaagttccagacatcccccggagcagagaaggcgaccttacaaagaatgtagcaccgacctcagtatctgagacgctgagtcacattccaacctttaccgtgtcaaaggttctaagaggaaagtcacaaacctgaaattatttagtttcttacctaatgaagcatctgacacctgatgatcctatgaataacaacaaacattttatgcatttgaaatcttataagaaaaaatatatatgaaaagtattgtgcctgatgtatcatattaaagaaagtatttttaaatgc

SEQ ID NO: 861 - DNA, 5065 bp, Homo sapiens
atgctttgaatttgtcttgttgcagctctgagcctgtaagatggctgtctgaatcggcagcggctggaagagacagagagaggcggggagggagggagaaagaattggagggattgccggcatagtgcatgtttttaaatgtgcatcgaatccgatgaggccaaggttgggatttctgtgggatcccaggactggcttagctgcgtttttgctgagattaggagaggaaggaaatgggaaattcactgggctgttttaaggagccgaaagagtcaatagctattcctgagaaggctcccatatctcctaagaaaagggttcggttcaaaaggaggtggagagggaagaaaatccctactccagaggcatctcaccaggaagaaacctcagaaggaactggagtcattgaagagactgaaaccctaacgaagttaacagagagtctccaaaaggaagacggagtgggaggggtagagcatacccccccagatattttgctgcctggggactcagcccccaactcacgggtagtcgatcgggggatgatagtacaggtaaaggagagattccaaggggaggtccagaccgcccaccttttgttagagaatgagtcatcagttgctggaggggtctgggattccctggaagaggggatgactgtcattgctcacctgcttgataacccagcagaaaggaactgcgagaagtcagtgagccaactggtggaatttcctaggacagcatcctgcagcagcagggctgtgttgctgcctttgcaaggagagactgcagtggagaaaggaaatattcagcgtgggtttcggagctgtgctttgcctaggacagactaccccactgataaaggaaatcaagaacaattttcagagggctggagtgtggaggaaggaaccaagagtgtttcaggtgcccctcagacagcttcctggattatagaatgttctgtttcttcattactactggaccagcctggaggccaaagacgcacggagccttcccatgtgggtcaagtgcccccccaggattccagactgcctacttctcagagtgatttgtccatcagtggtgtgactgtgagcattttgccctcctcctctggctatggcagtgatgggccacacatacatgggatccagcctaaagatacagaacctgaaaagagctctacttccttctcagaagaggatggcactctttctctggaggcaagccacaccccatcatggggtctggaagagatctctgacatctacattagtggagaatcaggggatatgtcagccaaggagaaactactcctgtggacccagaaggtgacagctggttacacaggaatcaaatgcaccaacttttcctcctgctggagtgatgggaagatgttcaatgcactcattcaccgataccgacccgatctagtagacatggagagggtgcaaatccaaagtaaccgagagaatctggaacaagcttttgaagtggcagaaagactgggggtcactcgcctgctggatgcagaagatgtggatgtgccatctccagatgaaaagtctgtaatcacttatgtgtcttcgatttatgatgccttccctaaagttcctgagggtggagaagggatcagtgctatggaagtggactccaggtggcaagaataccaaagccgagtggactccctcattccctggatcaaacagcatacaatactgatgtcagataaaacttttccccaaaaccctgttgaactaaaggcactttataaccaatatatacacttcaaagaaacagaaattctggccaaggagagagaaaaaggaagaattgaggaattatataaattactagaggtgtggattgaatttggccgaattaaactgcctcaaggttatcaccctaatgatgtggaagaagagtggggaaagctcatcatagagatgctggaacgagagaaatcacttcggccggctgtggagaggctggaattgctgctacagattgcaaacaaaatccagaatggtgctttgaactgtgaagaaaaactgacactagctaagaatacactgcaggctgatgctgctcacctggaatcaggacaaccggtacaatgtgagtcagatgtcattatgtacattcaggagtgtgaaggtctcatcaggcagctgcaggtggatctccagatcctgcgggatgagaattactaccagctagaagagctggcttttagggtcatgcgtcttcaggatgagctggtcaccttgcgtctagagtgtacaaacctgtaccggaagggtcatttcacttcacttgaattggttccaccctctactttaaccaccactcatctgaaagcagaacccttaaccaaggcaacccattcttcttctacctcctggttccgaaagcctatgactcgggctgaacttgtggccatcagctcctctgaagatgaaggcaatctccgatttgtgtatgaactactgtcttgggtagaagagatgcagatgaaactggagcgagcagagtggggcaatgacctgcttagtgtggagttgcagctagaaacacagccgcacatccatacgagtgtagaagagctgggctcaagtgtcaaggaggccaggttgtatgagggaaagatgtcccagaatttccataccagctatgctgaaactcttggaaagctggagacacagtattgtaaattgaaggaaacttctagcttccggatgaggcaccttcagagcctgcataaatttgtttccagagctacagctgagttgatctggttgaatgagaaggaggaggaggaactagcatatgactggagtgacaacaattccaatatctcagccaagagaaattacttctctgagttgacaatggaactggaggagaaacaggatgtgtttcgttctctacaagatacagcagaactactttcacttgagaaccacccagccaagcagacagtggaggcttacagtgctgctgtccagtcccagttgcagtggatgaagcagccgtgcctgtgtgttgagcagcatgtgaaagagaatactgcttattttcagttcttcagtgatgcacgagagctggagtcattcttgaggaacctccaagattccattaaacgaaaatattcctgtgaccacaacaccagcttatcccgccttgaagacctgctccaggactccatggcacaggatgaaaaggagcagcttatacagtccaagagttccgttgccagtctcgttgggagatcaaaaaccatcgttcagctaaaaccacgcagtccagaccatgtgttaaagaacaccatttctgtcaaggctgtctgtgactacaggcagatcgagggtcgaacaatcttatcagaaggttatggccctttggcatcagctgcatgttaacaccaaaagccttatctcttggaactatctgcgtaaagaccttgaccttgtacagacctggaacctagaaaagcttcgatcctcagcaccaggggagtgccatcagattatgaagaaccttcaggcccactatgaagactttctgcaggatagtcgtgactctgtgctgttctcagtggctgatcgcttgcgcttggaagaggaggtggaagcttgtaaagcccgcttccagcacctgatgaagtccatggagaatgaggacaaagaggagactgtggccaagatgtacatttcagagttgaagaacatccggctacgcctggaggagtatgaacagagggtggtcaaacgaattcagtctctagccagctctaggactgacagagatgcctggcaggacaatgcattaaggattgcagagcaagagcacacccaggaggatttacagcaattgaggtcagacttggatgcagtttctatgaaatgtgacagctttctccatcagtctccatctagttcaagtgtcccaactctgcgctcagaactgaatctgctggtggagaagatggaccatgtctatggtctctctactgtatatctgaataagttaaagacagttgatgttatagtacgtagcatacaggatgctgaactcttggtcaaaggttatgagattaagctgagtcaagaagaagtagtactggcagatctctcagctctggaggcccattggtcgacattacggcactggcttagtgatgtgaaggacaagaattcagtgttttcagtcctggatgaggaaattgccaaggccaaggtagtggcagagcagatgagtcgtctgacaccagagcgaaatctggatttggagcgctatcaggaaaaaggctcccagctgcaagagcgttggcaccgagtcattgcccagctcgagattcgccaatctgagctagaaagtatccaggaagttctgggagattaccgagccagccatggaactctcatcaagtggattgaggaaaccactgcccagcaggaaatgatgaagccaggccaggcagaggatagcagagtgctttcggagcagctcagccagcagacggccctatttgcagaaattgagagaaatcagacaaaactggatcaatgtcaaaaattttcccagcagtactctactattgtaaaggactatgaattgcaactgatgacatacaaggcctttgtggaatcgcagcagaaatcccctggcaagcgccgtcgcatgctttcctcttcagatgccatcactcaagagttcatggacttaaggactcgctacacggcattggtgactttaacaactcagcacgtgaaatacatcagtgatgcactccggcgtctggaggaggaggagaaagtggtagaagaggagaaacaagaacatgtggagaaggttaaagaacttttgggctgggtgtctaccctagcgaggaatacacaaggaaaagctacctcatccgagaccaaagaatcaacagacattgaaaaagctattttggaacagcaggttctgtcagaagagctgacaacaaagaaagaacaagtctctgaagctattaaaacatcacagatcttcttggccaagcatggtcataagctctcag

SEQ ID NO: 862 - DNA, 3267 bp, Homo sapiens
attattttattaaggccagcagtttttacttgagtctcttagatcgttcaggtgttcaagcatatcatcatcaagaagaggagcttggccaggtgccgtggctcacgcatataatcccagcagtttgggcagcggatacaggaggatcgcttgagcctaggagtttgagaccaatctgggcaacatggtaagaccctcatctctataaaaaaatgtaaaaataaaaaaagaaggggaagctctgtaatccttttttaccaatgtttacgccaattatttcacttttattatgtgcacaagtgggtggctaccttctcctctgtaccatctgttattgggggctgggggctcccgcctctccctgtgctgtggaataagtgcattgggtcagacctgtctgttctctgcaggtaagcagagccctgctctcctcctcctccccactgcctttgctcatggcctcggccgggccctgctggaaacaccaggtgctcgctcccagcagaggtttgaacctctgtccctgcaagcttgggggttggggtcctggcagatgaggtaccaggaggccctttgggggaggcccaggctctttgactgatggtctgcgggtgtgagcccccaagttctaggcctgggggccgaaaggaagaagcttcgaggaagagtcaagcaggccaccttgggcatacgtgctgtcaccccgggatgcccgcccagcgcgccaagccccccacgctcacctgtaagtgcaggtggtgctggaggccaggccggggccctgcaggggcaggcacacagtggggctccgtcgccgcagcgccccggcggcctcctcctggccgctggccctcccctaaggcttcctcatcctaaacagcaagtgaagccaaacgaaaaccctgtctctcccgccgttccctccctcctggcctccgtcccccgggctcgcctgccccgccgcccggcggaccggtcccttcctgctttccctggcgggtgctttccgctgctctgttacccggagccaggacgcgcatatattcccagaatccgcgctcagtgcgttcggtcccccgggacacctgttctctgcacaggcgcgtctgggcgcagcgggggcagacacgcgttcccgggcagcgactccggaaggcccgagggagtaaatctggccctcccggttcagcacaaagctcccctggccgcctttcaaaaccgaccgcctcccaactctccgcggacacgagtggcggctgcctcccctcccctcccctagggccgcgcacgcctcccgcagggtctcagtgcctcctgggcgggggataattcctgtccccaccggtgtcctgtactcgcggggtcccgggtgtaagttctgggtcccgggctggctccctggtgagcaaagccgcatcgctcgaattccagaaacccttctcgccgagcgcctgcctggctgctgaaagcctggagactgcgctctcggaggtggatttcggaactcaggagagaagaatgagacgctccctagtacccctagtcccccaggggtgggaggggactgtatctcaaaataagattctgcaactcgacttttataggggaaaccaggcacgcatttcaaaatcttctcatccgtccccacctccttgcgccgcttttccgcgcctcttgtgccacggaagctgccctctgctcctgctgtttccagcccggcagcccccagacaggatctagcttggcccagccgggccctgcttcctctgcctggggtcctcaggccatgcaagtgaggaaacccaggctcagaggggccacgtaactcttcccaaatcaccagcaagcctggtgcagccacggtggcgcgcattcgcccactcggagaccgagaggcaggttttctgcctgcacagcctcccgcccaaggccagacctgctggaggcccaggccctggagatggctgtcttcagggagactctttatgtcacgctcattcactccctagcgcctctttctggcaacggatgtgtccagcgttcaggtctcttaacttacggtctccgtttttccaagtttggaaatcagctcagagcagagcgggcaaagaggggctttcactggtgctcagagctcacccgcgaaggagggaccacagcctccgggatgcagcgccctggctgcctactgctggctggctggcccctcccctgcagattcctcctcacccagccccgcacaggctgagggcttcactaaccagaaccatagtgtgacaaatgcacactggggggttacggaggaagagcagagttggggtcagaaggcatttaccctgagaaaaaagggcacatggcacacaacccatgaagggaagggagaggaacagcatgtgcaaaagctcagagttcagagtggtggcctggagcttagctggagtcaaaggtgatggtgggaggtgagggtctggtgcaggtggttctcccaagctgggctgagctgtatgacttgaccctgaggggcatgcgggccaggctgtgttttgtggggaggcaggagccaggacacagattgggggaaaggggtaaaggagcctggtccctgcggccgcctgcttacctaggacctcaggacttggggaataagtggccatcctttggaatgctctcaagggatctcagataaggggaggcagaagagtgttctggagaaagcagggcccatccttctccaccccaccaccctctccccatgtccctggagctggctcctctcccacaagccaggcctggccagcccctggtatctcaccctgccaaagagctatgtagtggcagttccacaccctgtgcccctcccccaccccacccacagtgaggaccccctggtgttggggacactccgggtctgtgggatttctccagaagcagactcagacagggattggcacccacactgaaaagttaacatagtctaaatatgtgtgtccctcccaagttcacatgtgatggtggtattagggggtagggcctttgggaggtgattaggtcatgagagcacagcccttaggaatggcaatagtacctttataaaaatggcccaagagagatccctcatccctcccaccatgtgaggacacagtgagaagccccatctatggaccaggaagcagccctccccagacactgctggggccttgatcttggactccacagcctccagaacaatgagaataaatttctgttgtttgtaaaaaaaaaaaaaag

SEQ ID NO: 863 - DNA, 3346 bp, Homo sapiens
aattgattcacaacctgagagtgtcacaatccccatgttggagatcactgctctaccctgcagcttcaggagaggggaggccagaaggcagaatgagaaatggggtcgggggtgtgagtgcttatctcatccacccatgacagcgagtgggcctgcaggactctggaaattgcatgagaatttctgctccatcagcttcctgcctggtctcatgctcccatctcaatcctctcacccaccctcctcccagcagaaggacacacggattttcctgaatcacaatctgatcacttctatcccctgcttaagacctgtctgtagcttgagtacactgagaagaacagttctcaccaaggctcataaggggaggtggacaggggaagcgatggggatggtgggagcttccctggccttcctggacaccccatcctctcagcacctccacatgttcagcaactgggaagttcaactctagtttttcaagagtttttataaagtttggtccttatctcctcgccattgccacttttcttggaagttggtgggtgatactgaaagtttctaccctctaatcctcaaatcttttggtctttgtgatgactggcatgatactgaggctacctggggacccttccctaattcacattttttttttttgagagggagtctcactctgtcacccaggctgaagtgcagtggcatgatctcagctcactgcaacctccgcctcccaggttcaagcaattcttctgcttcagcctcccgagtagctgggattacaagcgcccaccagcatgcccagctaatttttgtatttttcgtagagacggggtttcgtcatgttggccaggctgttctcaaactcctgacctcagatgatccacctgcctcggcctcccaaagtgttgggattacaggtgtgagccaccgcacctggcccctaaatcacatttttagcatgaactcagctggtgtgatctgaaagagtctcatctggaagaacaaaagacattcctatcactcaggaaattccaagtttagcttcatggtaggaacaagagtcaaagaacaaacattttcatgttatagcacacccagtaagccatgggttcatcagattggactctctttgctctgccaaattggcagcatttgtgagttaccaatcccaagggaggactcccactgcagggaggatggcaaaggtcaccactgcgctaaccacccggaataggggtctgaacacttcagccaccgcatcttgggctgcactctgactacactgagcgtggtgaacagaacacccacagccacagccagttcgacaaagcaggttaattacttacagacaggcagcgatggacagcggaagcctaggctgcatgactgttcatctctctgtacgacaggaacattcaatttttggatgttgtcggcttcccagcccttcctcggtcacatccagtgcacatctgggcataccatgtgctttctgtcttggcagcagaaggacattcaaactggtctcccggggctcaggagcactgcccagggcagatagagtctcccatgcctgccccacttgcaccacagctgaggactcagcagtgagctctgggttttagatgtggtggacacgccctgggctagtgtggcaggacaccccctctaggagggatgggaatgaggccagggctgtcctgggcagtttctctttagctcaaggtgttgcattctctcggaggaatagaaaccaagcttgggcactttcaggcagttcctccttactcaggatggtgcattcttatataatttggctctgtcttgccacacaaatctcatctcacattgtaatccccatgtgtcaggggaaggatctggtaggtgattggatcatgggggcagttttttccatgctgttctcctgatggtgggggagttctcaggagatctgatggtttaaaagtgtgtagaagttcccggctcgctctctttctctcctgccaccatggaaggcgtgccttgcttttccttcaccctccagcatgattgtacatttcctgaggccaccttggcgtgcagaactatgagtcaattaaacctctttcctttataaattacccagtctcaggtagttttttttagcagtgtgaaaatggactaatacacatttctactgtattctacagtgattctgggaactgtgggcaagaagagaggcgggaaagccagagccatccaatgcttgtcttctggtgccctcctccaggaagccattcctggtgccctgggcgctgctcccagccttgctcaccctgggtcatcaccgtttttggaggggtctgtgtcctccccagactataagacccagaaaagcagggcctggagctaagtcacagtcgtgtccccagcatccactgacacagagtaagtgcatagtgtgtgctaaatgaatgaaagaaaagtgaaagcatgatgaaagccctgtgttcagggtgtgtctcactcaacctgtctgtcctgtcatggtgacttggtgagaattgttgcctgaaggtctttaaagctctctcccttccagggcttccgcatggagctgcttctcagctgtgccctatggggtcagatgcactggggaagaactaaggctcttctccacagcccaccttttgtccccttagccctcccaacataggacacaccatgtccagggctgcaggagcccaggctgtcaacagcatcagcatcctgctagaagagggtagggatggctggtactcagaagagccttctagattcctaagtttattaatcctttcactgcaactactaagaaaaataggtgtgacattattactgggttacacacagtcacacacacacacaaaaagcgaaagcaaaaattgtcaagaatatgtcagcttccctcaggggagtggcttcttcaactttgatcccaaatgacttatttcagaggaaacctctcccctctcctcagaacaaacacattcacacaggaagggattaaattcctgcaaagaagaagaaggaaaaccttccactggtcctttggtcttaactatcctgggccataatgtatttgagagtccagtaatgactgtggatttttttgctcaaaatatcacagatgattgccaaacattgtgaaatgccattgaattgcacacttgaaaacacacacatacacatgaaaacttaagtaaacgcatatacttaattgtgggggctgcagggggggagcggaaagaaacatccagacatctggtggtaaatattctgctctggttcagctaaaaataaagccctttatcagtttggtcactgg

SEQ ID NO: 864 - DNA, 3301 bp, Homo sapiens
aaacaggctgatgtcaggggtttattttaaaaagcaatttccaagaagcgtcctggggtcaccacgcattcagtccaactcttccccgctgcagtgttcccgtgacgatgaggcaaatccaaatagtcaccggagtcgagcaaacacggcggcccctgcctcccccggcggctccacaatggccctcagagggtccgcggcagccaggcccgtccaacctcctgccctctctgagaggggcccgagctctcgcaagattaaccagagacgacacctaccagattccaccactgaggcctccctcgatgcctgctccctgggctttttaatgaacgcacttctgtcacatggaaactgagcccggcatggagtcacgtggctccaccctggggctcctctgatgccgagagctctggctctcctgactgtgggcccagtgtccattttctctctcaggcagggtgctctgcccgccacagtgtgcctggttttctggatacagcatgactgaaccgccccttctcagcaaaggccaacacgtctttctcgagtccaagaccatctcccgttcaagggccctcaccgcgctttgtgagtctgtctcgtgggcctccttcagtggtctgtgaccagcgggaatgaatggggacgtgttttgttcagccctgactcttggacgctggtggcagccacgggcgcccactcacctggcacgtggacgaaggtgatgagcgcggctgacggctcccgggggcagcgtggggtccagtctgaagccgacgcccctctcggtcaggctttcagcagcagaaggcagtggactcttcaccatttcttccaacactttctcacgtaggagctccactgtcccttctaacaggacagggcttgtgcagccgggcttggtcttgtggtcagggagaagcgggcaggccagggccgagctgcgtccggctctcagggacttcctctccctgtgctctgcccacctggggtaggcctctgggaacaggggagtcacagaaaccacgggaaacggagtgggttggaagaggcagagaacacgcttttctcagggtcgcttaacacaggcaggggtacaggagagctccggccatttattccaaatgtatgagcagggaggaaagagggagggaagctgcaagaacaggcgacttttttctttttttttccccccatctgaagtgagatcaaacttctaccacattctacctgtgcccttctgggtgggtggtggccgtcctcttgggcgcccccttgtgagggctcgaggcctttactggatgggcaggatgcgggcagcagctttgtcggctgccaacccaactcctccgacagaacggcaggtggcccctgtcggaaggggggtgtctctttattcctgccatcctccggccgcctctcccgcctgcaccacttggaggcagttgtttcacgtggggctcttgatggcataacctgatgtctgtcacggacccccaagcaggagcaatgcctaaagagggcaaaggcccgcgcgcctggcagagctccctcctctgctccaacagcagagcccagagcatcccttggcccgacgcacaagtcccacaatagcctctcccaacgggaacgacttagccctaattacatgagctttgatcaccgctcgattgtatggcacagttatttttaaaaatccagtccaagtggaaatacacctggaacattttatactgcaatgactgatggacgactttgatatacaaaataaattgttactcagcttttctataatgcttacatcttacattttcattctcaaaattaataaatgctatcaaccccaatttttttttttttttgagatggagtttcgctcttgttgcccagcctggagtgcagtggtgtgatcttggctcactgcaacctctgccttccggtttcgagcgattctcctgcctcagcctcccacgtagatgggattgcaggtgcctgccacaccatgcccggctgatttttgtatttttagtagaaatggggtttcatcaccttggccaggctggtctcggactcctgacctcgtgatccacccgccttggcctcccagggtgccaggattacaggcgtcagccaccgtgcccagcctcaactccaaattttaaaaagggcttaaacgaagaggatgaaattctggaaggctaaatgaaaagagaatgtgtctgttgaattcgataagcaattccttgcatttgagaaggcaaggagccgacgggaacctaccgacagggctgccacgcactgctgcagagctttccgtgcaaagcgcggctcccctctgagactcggctcctctgctgacatggaccggttcatctacccacgcggacgcccatccacaaacacttagtcactgctggaggcttttaaaacacctgtcaaatgaagagtcacttcacaaatgttcactccccgtttccatgtctccccacgtcggggtgaacactttttatgcgctgtgacaaaaagagaaagactagtctgtgttttgggggctggaggggatcattatttttttgaatttttatttattgagacagagtctgtgttgcccaggctggagtccagtggtgcgatcttggctcactgcaacctccgccttctgggttcaagcgattctcctgtctcagcctcccaagtagctgggactacaggcgcctgccaccaagcctggctaatttttgtattttttagtagagacggggttttaccgtgctggccaggctggtcttgaactcctgacctcgtgatccatccgcctcggcctccccaggtgctgggattgcaggcgtgagccaccgtgcccagccaggacattttgaatgttttaaaccaatttgcctgacaggtcaaaaggtaattttttgagattcgagactgacagatgcagcagagattttaaattttgcataggcttgttaagaacccagactgggtgcagcgactcatgcctgtagtcccagcacttcgggaaggctgaggtgggaggatcacttgaggccaggggttcgacgccagcctgggcagcacggtgagactccatctctatacaaagtttaaaaattggccgggtgcgggtggtggccacatgcctgtggtcccggctgcttggaaggccggggtgggaggactgcttgagcccgggagttttgaggctgcgatgagctatgatcgcgccactgcactccagcctgggccacagagcaagaccctatatttaaaaataaaaagtgttttgaat

SEQ ID NO: 865 - DNA, 3690 bp, Homo sapiens
actccactagggcacgcaggcgacgagcacactggcagagggcctcccgcagggcccactccccacctggctctcgccccaccatggcctgggaagcaggccaggtttgtgccaggcctgccgtgcccagggggaggaagggctctgtgttctttgcctgtgtctctgtggtgaccgccaggagaagggccgtcgcccgtcgtgccgctctccaaagcccgacaccttggctggcacctctgccagcaccggccaccaccgagagctccacgcaggagatcggtgaggagctgatcaacggagtcatctactccatctccctgcgcaaggtgcagctgcaccacggaggcaacaaggggcagcgctggttcgggtatgagaatgagtcggccctgaacctttatgagacttgcaaggtgcggaccgtgaaggctggcacgctggagaagctggtggagcacctggtgccagccttccagggcagcgacctctcctacgtcaccatcttcctgtgtacctatagagccttcaccaccacccaacaggtcctggacctgctgttcaaaaggtacggtagatgtgacgccctcacggcctcctctagatacggctgcatcctcccctattccgacgaggatggtggaccccaggaccaacttaaaaatgccatctcctccatcctgggcacctggctggaccagtactcggaggatttctgtcaacctccggactttccctgcctcaagcagctggtggcctacgtgcagctcaacatgccaggctcagacctggagcgccgtgcccaccttctcctggcccagctggagcactcggaacccattgaggcagagcctgaggctctgtcaccagtgccagctctaaaaccaactccagagctcgagctagctctaacaccagctcgagcacccagcccagtgccggctccagccccggagccagagccagctccaacaccagctccaggttcagagctagaagtagctccagcaccagctccggagctccagcaggctccagagccagctgtgggactagaatcggctccagcgccagctctggaactagagccagctccagaacaggatccagctccctcacaaactctagagctggagccagctccagcaccagttccatcattacagccttcctggccttcacctgtggttgcagagaacgggctgagtgaggagaagcctcacctcttggtgttccctccagatctggtggcagagcagtttacactgatggatgcggaactgttcaagaaggtggtgccctaccactgcctgggctccatctggtcccagcgggacaagaagggcaaggagcacctggcgcccaccatccgcgccactgtcacccagttcaacagtgtggccaactgtgtcatcaccacctgcctcgggaaccgaagcacgaaagccccagacagggccagggtggtggagcactggatcgaggtggccagggagtgccggatcctcaagaacttctcgtcactgtatgccatcctctctgccctgcagagcaactccatccaccgtctgaagaagacgtgggaagacgtttccagggacagtttccggatctttcagaagctgtcagagatcttctcagatgagaacaactactcattgagccgggagctgctcatcaaggagggcacctccaagtttgccaccctggagatgaaccccaagagagcccagaaacggccgaaggagacgggcatcatccagggcaccgttccctacctgggcacgttcctcaccgacctggtgatgctggacactgccatgaaggactatctgtatggcagactcatcaactttgagaagaggaggaaggagttcgaggtgatcgcccagatcaagctgctgcagtcggcctgcaacaactacagcatcgcgccagatgagcaatttggggcctggttccgggccgtggagcggctcagcgagactgagagctacaacctgtcgtgcgagctggagcccccatccgagtcagccagcaacaccctcaggaccaagaagaacacagccattgtcaagcgctggagcgaccgccaggcccccagcactgagctcagtaccagtggcagctcccactccaagtcctgtgaccagctcaggtgtggcccctacctcagcagcggggacatcgctgacgcgctcagcgtgcactcggccggctcctctagctccgacgtggaggagatcaacatcagcttcgtcccggagtctcctgatggccaggaaaagaagttctgggaatcagcctcacagtcatccccggagacctccggcatcagctcagcctccagcagcacctcgtcctcctcagcctccaccacgcccgtggctgccacacgcacccacaagcgctctgtctcagggctctgcaactccagctccgcgctgccgctctacaaccagcaggtgggcgactgctgtatcatccgcgtcagcctggacgtggacaatggcaacatgtacaagagcatcctggtgaccagccaagataaggctccggctgtaatccgcaaggccatggacaaacacaacctggaggaggaggagccggaggactatgagctgctgcagattctctcagatgaccggaagctgaagatccctgaaaacgccaacgtcttctatgccatgaactctactgccaactatgactttgtcctgaagaagcggaccttcaccaagggagtgaaggtcaagcacggagccagctccaccctccctcgcatgaagcagaaaggactcaagattgccaagggcatcttctgagggcatcctcccagggtctggctggctggtagccaagcacttatggaccagagtggcccaggccagctgggcgccttcctcccacctgccagcccagggtaccccagactccagtttcatcctgaacctctcccgctgctgggattgacgcctgccattggtcaggctgacctggcctcccgtggaccactcgctgccttaggtgccttctgctctctggaaccagaggactagctgacttttgccaaggagcagtgccaacgggcatggcatggtgccctgcctgcccccgggcgccacctctgtacacttccctgacaccttcccaggtgtgggtcactgccacctgtgcccatgggcaccccagagcacccactgtgaccactgcagttctctcatgcccacaggcactggcctgtgaccttcgcaggggtcccggcccctcccaccactctagcctttctcaggctgcaccaaagattccatcatcagggccaactgagagtgagggagtctcacccaccgcttaccccagccctcccctgggagcagagagagaaaccctcttcatggaccagactctgcacccggtgagtgaggacagtcccagctgagtcccatcgatgttgaatctcatgccactgcaagtgccattcaccactgcgtcctgggctttacgagaccatgcaagacgggggttagtgaggaaggaggatttggggtgggggtggggtgattgaatatttgtataaaaagcaaaaagaaaaaaaaatgtttgtttactgattggggaggggcaatatttatttgttgtaaatagcaaatgctagacttgaatattatattaaaatcctgtttctactat

SEQ ID NO: 866 - DNA, 3428 bp, Homo sapiens
aacaactaacaaaacttagggccactaacaccggccctagcaaagagggtggaagtgtgaacttctgtacctgggaagactggcagtggagcttggcttctaagtcacagtcagacagcatcagtgatgcatctatttggctcacctccttgggggaggtaacaagcttcctccataccccaagcgagtgggaggggcagtcgtagtcacagatggctgctgctttgctttgtccctgccaataaccccagagcaagcaaatggctcttctcatttgaggatacatgaatccctgggaaggctctgattggtcaggcctgggtcatgtgcccatgcctgtggacagggtagaagggagaggtggttcctggaggaagggaggagtactgttaccaaaagagggaggaggtgatgagaaacaggccatccgtgttggcccatctgccttttgctgggtacttacctgccagggctatgttaagcaccttgaggaaatgggcccagagagagcaaggaacttctctagaggcacacagcctagaagtgacagtgccaggatttgaactcatagtggtgttaagtcccccatactacattttctgtcgtgtggattctctcatgtggatcatggcagggctgccacttcagcccgagtctccatcccactgttgggccccttgtgaggcagcaggaggggagagatccgggttctctggagccgttgagcactctgggtactgggtttgccgcagctgtggccagggcagtgatgagacagtgtctgctgtgtgtgtgcagggaactacagcctgtccagtgtgctgcccaacgcccccgacatggcgcagttcaagcagggagtgagatcggttgctggaaaactctccgtctttgctaatggagtcgtgacttcaattcaggtcagtggaatggggcagtgctcactggctatgacggtaggttcagcagtttgaaaatgagacctgcttcaatcttcaactgctggaaaattcaattatatattattggatcgatatgtttgctacactataacccagaacattatgaaaaccagaaattataattttatatttaatattttctaacggatgactctaggggaattgttagaggaattgtcatgaccattgtccagtttttttcctagattggaacagagaagtattaagaagaaaactgaaattatctgtaatgccacatcacagggataacctctgttaatattttggtatatttttagctctagatttctaaggatatttttctatacgtagattaaaaagatatacatatctatctttttaaagttaaaaagggattatattgtatagagggttttatatcttgctttttctctgtgatgctgggagcatttccttgtaatgaaaagttttcctaaaaccacattctattgagtgaaaacataagccaaggatggcgcatacttgcgcatgagagtcgaggccatctgtgacgatatgagtggctcgtttctttgcaccttcttgtttacgtcaggctattgaagaaggattgtattaatgtaaaacgctgctaaaggaagtaggactgaaaccgtgtggactctggtgcctccaaaggagattcctggtccccaggcagatgctgctctagctgcagttcaaggagggcgtggaggtgcacccattccggagagttccctcagccccaggactctggatgtagccgttttcatgctgtgaatagcacagtcttccctttcatgtggcactgaagttaaaatgcatagagctctttcatgtcccttaggtcagctaagcccacatcagtgtccaaataggtaacatccctattttatagatggtcatccccattttagagatggctcccttttatatccccattttacaggtgaaggaattgaggcacagaaggttaggtcacttctgcaagatgaccagctgaaccaaaatttcagggcttcaaacaccaaatgtgttcctttgtcttccgtttcccacttgcttcccagagggctcagcaagttgcctctggcccactgagcatcctcccgcccactttgctccctgcctcctgatcccaggactgtggccgtggatgccagaggcaggatgtgaatcctgttgggttctgaagcccacacctaccctcagccttgaagctgcagcaatggctgcttccagatgagcacaccctcggggtgcagcgtccatgtcacatgcctgacatgggctgcagtgtcaattgggtgatgctgaatattcagggcgtgggagtcagggatcgctgctgaatggtcgtgaacttccattttggttctctcttcaggatcgctacggttcttaatactgaagtcatgatgtgtatttcctggagaaattcctctttaaatgaacaagtaaccacatctcaggcggcagtgaagtccagatagttttgcagattgttttgctactttttcatatggtatatgtttctgatttttaatatttcttttgagaaattctgagttctgatgtaggagctttcctgtgatttctgtttcacgttccttcctgtcacaccctcctttggcgtctctgtgtatatccttgctttattttcttggaacctttgatttcaacactgagggcctggagacctcggctcctcctgctcctgaaccaggaggcttcatgtgggggaggaggagaggtctccatgtgacacatgggctcagggctgccagaatcagcggatgctggatgggcctgcagaaacaacactcaccacacacacttccttcaaaagaccaaaagtgactggtgtctcgtgtgacagattgcttcatttatgtttctacatagtaaggtgactgccaaataatatttgaagtcatctgtctctttgtaaattattttatatgacctataaatttaaaaatgtttttcagtgagtgcttttaacaaacttaagcttctgccctgccaagggaattaatgttatcttgtgaaaggtgttgctgtttgaattgatgagaaatggaagatgagaactccctaagagttctcataataaatcatctcatcacaaatcaatacggtatacagagttaaagtggaatgaggtaagaagatacagctacagaaaatagttgcgtgtatgggagaacagtcattgtaattgggtagttttgttaataaatatttttaaatcttgcttttcagaaattaccgaatgtgtataaacaaataaagaaaaataatttagctgtgttttagacagcattagaatatattgttcagcacagtaaaatatatttgaaatttgataagccaaaaatgtggttttgaatgaatattttgtgaatctttcttaaaagctcaaatttgtagacttctaaatagaataaacacttgcagcag

SEQ ID NO: 867 - DNA, 3617 bp, Homo sapiens
atgtgcttgggcttctctcaatggcatctgagaaaggaaaggagtgaagtctcttccaggcacagtggagctggccggggcatatgccctagagagaggtgtcaggaccccaaatactgacacgcaaggttagaagttcagctctgaaaagtcaacttggagggaatggaattaggagtacaggtgacagcatggacttatccagggagcttacctttgcctgtgttagacggtgaccccattcctggtacctctgccctaccaaagatattcagtgtttctgagagcctccggtctgagactgcccaccaccccaccccaccccacctccttagtcctgcccagtgctcacggcgagtcccagggctgggccctcggttgtctgtgcaaggcagggctgacctctcctggttcgcagggttggcacagatggccctgggaagacaaggcctgcgagctcaagggagagtcctgctccatgagccctaacctcatatgtagcttctcacatcaggcttacaggggctgcccctggcttctccaggttgcgacataattagatttagcctcagatggcggcatacaagtaagaggaagtctaatttcctaaggccgagtcacaactatctgtgactttgaataaagctgtgaggccttcagcctctttcacttgagaagctgccaaccagtccttgggtaagaggccgtaaaatatctggaatcccatctgttggctgccccctaacattctagtctgccatttcttaaacatgctcctcaacctgcttctgaagtttaggacccaccacttttaaggcagggcaggcctctaatcacccccaaaacccagcctcagaagaacctgccactggagacacttttttgcctctcagctctccagggacttgatgacaggcttcttgtccggcacccaacggtcaatgtcaagaggccctgccatttccctccagctctgcctgagggagacggatgtccgtgaaatttctcagacctctgggtatgaggggcaaagatggtataaggctttgaagtccagacatgttcttggggggaatgtagctttaggaatgcactcgtgaatcagcgcaaactgggctcatgactggaagccagctcctgcggcaggaatctgttcatcttgggtcacaggtgcacgtgtgggtgcatgggctttattctcctgtaatcctccctaggatttgagggattttttgctgtaattgttttctttgaaaaaacattgtgtaaatgagccaaacctttctcccttccttttcgcaccatgaacttgaccgcaggctgctttgtgctgactgccttcccatgccaggatgccactctgggttcccgagccaggaccatgtgcctcagataccagtgacctgagccttccagtataaaccattatctggtggctggagagagattagggaaacaaaaagttactaggtatgggacagaacatttagacttcagaaaaagtatgccaagagagaacagatttgcccaggatgtatgtttttcctctttgaggagtcggggcatgatatgtggcaccattatctagtaagtgctggttatttgatttctactaaattctttactttgaatgtcattcatattgaagctccatttcccagagaatatcctgacaggctgctttgaagagggtaggtcctgtccctgtcacttggctgctggttgaacgtgctcctcccggctgatggaggggtgggtttaaggttaactctaagaactaagatggtcaatgaggtggtgtttgttcttggtgggggggcattgactccagcaatgggcgctgccatcccatatacttacaaagggctcctccactggacatgacaagatagccaaaggacggaaacagagacgatcatttggttgagaaaccaaattgtctagtgtacaattaatgcaactcattgcattcatgaatgcaactcattgcattaatgcaatgctacattatgctaataaggttacaacattaatgctacaggatagcccaagtatttaaaaagctgagcccatttagcagccttccagcaaacttttggaaatgcatttcttacttgatttcttcttgttatccaatccctggggaccgttttacccacaacctcttcgatccagtgtgctgctgttggccaaacatcagcccctttcctggaatcctcctctttcaaaagtggggagggctgggcaggggtaaaaatgtactataccaccccatcccattcagcaagcttcctctccaaatccttaaatggaaggtagaagtattatgccaactgtcaagctctttgtccaggcccttgtggggactaaatgaactctttaggaatactaggtataggaagactaggtataggaagattctcatttccccttgttgcactgaccactatgtctcccatgcatactctgggaaattttaggagccctggtggagatacacgttgctgatgtgcatttgattaataggttttactatgtcttgcaataaagacgtttagccttaagacccttgaatggaactccagctgtgatagagctgccaatgccccttcctctctcctcccttatcacctagtgttgcttaaagaggaggccattgagggcacacttgatgccccagacagcctccctctgttgctaaatcattgttattgctctatatactgccttctcactcgcttcaattaaaaattaccttcaccagctgctgtgccctccacctgggggagacttcatgatcctctcagcactgactgcaaacatcagagaaaaaaacattttctcaccaaaggtgttcatgttgagaagttttaatttctaccccctacagctcaaaagaatcaatgtgaatttatctgcagcttaaattcaagtgaaacttcattctcatgcaagcatatcagacttattctggaacctctagaactggacttgaattccctgcaggtgccagactggtgggtgccctccctgcctgccattaaacttttcttacagccactgtccctttatctgtgacttctgagtcatccgacggatccattagttgttcaatgagaagttcacagatcttgtatcaggatataaactgatcttatgttgaaggatgcaccctcccctaatgaatgtattctcttaatattccgatgctgtatttgtgcatcagttggagactgtccacatccgacatttcaccgacacctcaaggacacttctacttatgagcagttcatcattctggggcttctccttatattaatactctttccattgagtcctgccaaatcctttattgggttttctttttcctttgcatctgtcactttgtccaaatgagcatgaataaacaaaagtgtaaatgagctgatactatttttgtggtcagctgaggatgctgccaagaacaccactgtatatctgtggcttgggaatgttaagaggaacgtgcaggcccttccattgatgatattcccttctcaacatttttaaacaagcacaaatgatatttgtaaaaaaaaaagttttatttattatggtaataaactattttatacatg

SEQ ID NO: 868 - DNA, 3264 bp, Homo sapiens
aattgtgatttcctcggggaagcttcccaggcccctcagcccacggaggccttcccagcaccttgaccgcaccacaaaaccaggcggcggatgggccgaggactgctttgggtctcctgtcacactgacttccagggaagggctgtgtctctagcagctggcgagtcagaggacactcggggcgagccgttcaggactctctgtccgcctgcagcccccgccttccctggtacctccgcggagacccaagaggcgtccagaggggagcccaggcgcacggtccccagggaggggccccgccctcaggcccaggcttccacagggtcaagcggtctcaagccggcggctctccctggtggattcctgcagctgcttccatcccgggccctgctgaagctgcctttgctgaaaagatgtagggcacagccgctggggtgatagtgggagacggaaaggttggctgagaggcctgattccttccacgcatcacaacctgaaaatcaccaaaggtcttccttgttggggaggagtgaaaggcagcaccggaagccaaggcccctcaccaccaagaagccagcagctcatccccaccttctggaccaaagacacgaagcagaggccaagccgagccaaggtcaggacctggggccacagtcaaggtcggggcctggggtcgcggtcaaggtcggggcctggggtcccggtcaaggtcggggcctggggtcacggtcaaggtcagagcctggggccacagtggatttcctcctgtggggatgtccttgacgtccacagctcaggcctgagggtctgccaccggctccagcagctgccacaggtgtcctggctcacagggtgtctctggctcagggccggggctgtctgcaactcccctctcccctgagccctctgagtggggctcctcaagctctcaggggctccgccacacctgggcttcctgggggctgggtcctgccctgcgacgcctgccaggctctttgtagacagttactgatctcccattggctccggttttgtggctctaagtgcttctggccctccctccacactccctgcctctctgctgagtagttaattcactataagcacgctccagaggaagtctccagcctcttagtgaaactgcagcgatgaatgagaatgatcgggcacccaggtctgcctccaagtctcgcggatggcccagagaccgtgcagtgggaaggttggcagcaagctgaaggtttgaactctggctgtgcccctgctgccaggggacctcaggcaaatcatctttttctctggaccttggtttcctcagctgtggggacagtgctggccccgagtcactgggccgttgtgaggatggagagggggtcgtgcaggctcctgggtcctcgctgaagccacccaggagttctcctgcactctcaggggagcccttgtgctgacatctgagggtcacggttcagtggcttcagggtccagacaggcccggaggccaggccagatgtggtgcagccaggggagggggcaagccccgggggccgtgggccatcggttcacaccacatcaggggccgggaatcccactcagggtttagccctaggctccccccagcacccccctcccaatccagaggacactcccagccctgagcagcgagctctgggcaggcatcgggagagggagcgcatctcggctctttgtgaggaattacgtcccgacaggtcactgacacagaaaagccctttgtcccagccagctggccgcctgctaatgacatccagcctgcaccttccaaggccacctctgcatccagaaaggacagtggcggctccagccagggaggaacaagggccacagcttccctggggtcaggggtggggagggtgggtgaaggctccggacgcttctgcacgttgccccagagctgcggacggacctcaggtgaccgtcaagacctgctgcggatccagtgacccctccaaggagagtgccgagtcctgggaattctcttcctcctcctgcacctccaggtcaccttgccctctcccgtgttccccagccagacccccagtagagaggagacccctgcagttgtggatgtggctttccccagtgtccacgagacccctggagcctggcccctctgggcccgtagaagctcccatgagattctgatgcacagcgagggcctgagccccgggccagctcttgggggcagccctgggctcccatgtaggtttcatcacaccacactgtggccctcacaccctgccctctggctgcccctcctccctagggcatgtaccccgagcccacctcagcctccccgggcatatcagggccccactttctggggtatgtgtgagccacgggacctcgagtcaggagatccaggcctaggcctgattctgccccctccaggttcaggaccctgggcaagtcctcccacccatcttagcccagcctccccacccataaaatttgggttgcttgtcccggctctgaggctttgagagcagggctgtctctaaccgagggagggtgctgcaaactccagaaggcccccgtcccagggaacagcggggggaactgtcagagaagcgacccctggaccagcaccctgagtgggctttcttctcctccccaccctgctgagaccacccaaaccttgttaagatcaaaggttccctggggagccacacgggccatgctggacactccctgccagactttccggaacaattcctggggacccgtgtcccacaaacaccagctggaaaaggcagcaacgtggggtctccctccccctcagccaaagtgaactgtgtcagcaggtgtctcccagctgctgagaatgagccaagggaccaagatggccgcctggctcctgcaagtggagagggtcttgctggggcctgaactggctgaggtcttgcagcagcttcttgatgccccattccccaaacccgggcccccaatgcccccgccccacccccgggagaagagcccagccgcgccggagggtggagagttctgtcaaccagtgccgtttccttatcaacaaggacatgtctacaaatagctcatcacgtctccaatccagaagtgctgtgtcgtttcaaaaatgagcggagccaacgcagccaccagccaggcctcggctacctgggcaaggctgccggctcatgaatattcacggctccgatggtgtctctgagcctcctaaccatctggaattaaaccaacgagcttcccctc

SEQ ID NO: 869 - DNA, 4308 bp, Homo sapiens
tttgcctatgggtttgttctggacactgggcagtgcagtgcagagcaattactcccaggagtttggttatcttctcctgctgctgctgagaaccaactacccctggctttagtgtgggacctcccaattctctgctatgtctcccctgcccccactccccactttccccataagccagctgtcgcattgttcccagatctctcccatgcccctttcaagatttcaagaatgccccatggggattgtaggggctggtagggtaggagcctctctcagcccccaccccaccccaatcctgacttggtgccattcatactctttgcagccaccctgcgttatcagtgggcattctgaaagtggctcctccctgatttcatgtaggaaatctaacaaaagtacctctgcttttgttgttcaagatagggtcttgccatgttgcccaggctggtctcaaacttctgggctcaagtgatcctcccacctcagcctcgcaaagtgctgggatttcaggaatgagccaccacgcctaccccaaagtaccttcttttctcatgtcaagaaacctatttggaaagaggccagtcccctcagggacttttcctacatctgactttcttctcttttttccctctttctccatgctcttccctgcagcccaggaagggaattattcttcttccttgctatcaggcaagaatatattaagtactgcattatttttattctgtgattaacttttgtaatctctgtgctctcgtcttctagattctgcatcagttttccaatcatgttcgtttttattaattcaaaagaaaatccttctctttcaattgcccagtttttttgtttgtttgagacagggtctcactctgttgcctaggctggagtgaagtgatgtgatcccggctcactgcaacctccgcctcctgggctcaagcgatccttccacctcagccccctgagtagttgggaccacaggtgtgcgacaccatacccggctaatttgttgtatttttcgtacagacggagtttcgctatgttgcccaggctggtctcactcctgagctcaggggatctgcccagcttggccttccaaagtgctgggattataggtgtgagctaacacactgtgcatggcccagttcttacatatcaaaggtgctttgcttcagggtgataagcctgctatgagttaaaacacatttaagcatgcaatggatttctcctctcccaaagacaatggctctgattgacccaatggatggattcagtattaatctaattgttatagggcaatagaaataatttgtgaaaaggaaaaaaccctttggttaaaattttccaatgacagctccacattcaatttgataccctatgttttctactaccaagataattttttaatccagggctgcatcggatttgcttagtcattctacaactcatttaaccttcctcctatgattgaatatttagaagattttgttattataattaagattgtaactaacatccttggacacacatttctatatgcctcttattctatttgacaagcattttagtgggacagttattggatcagaaagttaaaatttgaaaatattcttcatatatgttgcaaaatggttcccaaaaagcttgttctcacatgtgccccagccaacagtataggagggcttgagacttcttacacacttgctgacattgaataatgatttaatcttagcctcttgcagccctcattagtttataggaacagaaagggcatatattaaaaactaacttcagtattgcccttttcccctcttgctagctgatgtaagacctctaatgcttttggaaattctcactaatccctgcgaccaagggtttctaaaagcaccagggctttcatgcttgtgcttatattccaacctccctctgattggctttgcctcatctagtagctgaggtttggagcttcagagggttttgtgcaaagtgtaggacgatgtcttttccctcagtgtgtcactgtaatagacccgaagctgtgctagtatgttccagtgctttaaagatgttgatgaaattgctctttcagatttttttctttatcttttttttctggatgccctctcttccttcctctgtaggagttcagtgagggaactcggctagaagacaaatctgaatgacagatcctgttttcctgggctgagctcattatttctaatttcttccttagaatatattcttttccaagaggctcttcagtttgcatacaaatcggttttttgcaagcccacctcataactacaacactgatggggattgattttcacttagactcaagctgatgtgcctattacagcatttttaaaaaaagatttttaatttgataagtgaaaataatatcttgtaggtttttaaatttgcattcctttactattaaggaggccaggcatttttctgtatatttatttctaatttctgtttctttcttatgaattgtctggttaagtcctttctcattatctcaaggtgttttagtatgagatttaagaatattagatatataagcccttgagctatcatattagttagaagtagttccccttttttggtcttttcatttttattactatatgtacaaaagtttaacatcctatggagtaccttgttcatggataggaagagtgaatattttaaggacagctctactctccaattggtttatagatgcaatgcaattctaatcaaagtctaaaaaggttctatgtaaaaccttacaggtttactctaaaatttatatggaagaggaaaaggctaaaagcatccaaaatacacttaacgaaaaagagcaaaacagggaggtttgtctcccagaaattaagatttattggaccgcacccagccgccatcttgaaattcttagtaattttttattttttatttttggagacaagagtctcgctctgttgtccagactggagtgcaatggcgccatctcggcttactgcagcctctgcctcccaggttcaatagattctcctgcctcagcctcctgagtagttgggattacaggctcacgccaccatgtccggctaatttttttttttttgtatttttagtagagacagggttttgccatgttggccaggcttgtctcgaactcctaacctcaggtgatctgcccgtctcagcctcctaaattgctgggattacaggcgtgagccaccgcacctggcccttagtaatttttgaacaaggagccctgcatttttattttggactgagccctcaaaattctgtagccaatgttgttgcagtggtttgctttaacaatatcaggaagaatgatacgtatgtgtaatgcatggctaattttttaaaatgtgagattcgtgcttattccacttggatatatttaggcactaagacaaaatgtccctggtcagagttgaagctacaccagtatttgaagtgctaaaatgtattccttctttccattaacacctctcttctccttcctgtccattaagatctttatgctgcttcctggacttctctcagcccctctccccgatgtcccaccatttgcccaccatgaaaaatacaatacacatgtatattgttcatttacacacaatgctatcaatacatgccccttttccatttcctgcattgtgccattggaaagcaacctcagaagctattttagtaattcttctgaggtcttttcgtcacggccttcaccaccatggaaatggtgtggatttttgagaaagttctcagaagagagcacacctgcctcaggcttcccccatcctcactaaaatgccgtctttattctgtcttaccaaagatcctctccccgccacggatgaggggaaagaaagcaatgacaaaaaagagaaagtatcacattttttcatgcgctcattcttcagactcaaccctttaacctgatacattgattttacctttgaacattttcatgtaaacaagtccttgcactcatttcaaaatcctgactccttggccatccatgccttgtcatgtgttcttagccttatgttgatacacacatgggccttgttgatacacacgtgagccatgtgacactatttggctcctttattatccaatatcttaatattttgtagtaggaaaaaacaacacagaaacatggccatgccattgctttcttccttcctctcttctttccttcttgccgtccctcccttcctctctttctcccttccatttcaaacttctcctttggaagcaagtctgaagattttgtttcctgttgaaatagtg

SEQ ID NO: 870 - DNA, 3361 bp, Homo sapiens
atgatgtgactgtgaaatactatggaaaagcatctcattctgcttcttatccctgggaaggattaaatgcattagatgctgctgtgctggcctataacaatctgtctgtgttcagacagcaaatgaaaccaacctggagagttcatggtataataaaaaatggtggtgtaaaacccaatatcattccctcttattctgaattaatctattacttccgtgcaccctcaatgaaagaacttcaagttttgaccaaaaaggcagaagattgcttcagagctgcagctttggcttcagggtgcacagtggaaattaaaggtggagcacatgattattacaatgttcttcccaataagagcctatggaaagcctatatggaaaatggaagaaagctaggaatagagttcatttcagaagatacaatgttgaatggcccttcaggatctacggattttggaaatgttagttttgtggttcctggaattcatccatattttcacattggatctaatgccttgaatcatactgaacagtacactgaagctgctgggtcacaggaagctcagttctacactctgcggacggccaaagctctggcaatgacggcactggatgttatttttaaaccagagttactggaaggaatcagagaggactttaaactgaaacttcaagaagaacagtttgtaaatgcagtagaataaaagacttaggggccacttataaatcaagaagacgtgatgatttttttcttttaatctcttttaatgaaggcatgcttgttttttaatcttaaaggagtaaaattctttttacctgataagtgaggacagggtgtggagaaaacatattaattacctcatatctaaagtgaaaatttttgcaaatccgtacttgataggattatgatattacaggagctggtatgtgatgccattctttcttttttttttaccccgcaaccactcaccttcacagtagtgataccatttcttaacctggaggatacatggcatcatttttataaaatatgttagtaaacctttttgtaagccttaaatgttatgtgtatttttaaaagcttaagagatttcaaaccttatattcagaattgacacccatgagagtgttttgtggtatagggtggtaaacttgttctctaatcgtatattaattcctctaccagattgtatatttgaagccagtgtctttcctttttttgttttaagatagagcctcgctctgttgcccaggctgaagtgtagtggcacaatctcggctcactgcaacctctgcctcccaggttcaagtgattctcctgcctcagcctaccaagtagctgggattacaggtgtgtggcaccatgcccagctaatttttgtatttttagtagagacggcatttcaccatgttggccaggctggtctcgaactcctgacctcaggtgatgcacctgcctcggcctcctaaagtgctgggattacaggcatgagccaccgcacccggcctgccagtgtctttttaatacacatgtgtgttggtatttttaaattgttacagtatctagcatattgcttactctgaatattcagtactttttgaataagcaaatattgcttccttgcttggaatcatcagagtttaaagtagcttcgtggatggaccatgatcctaagatgagttttaattttgtgtttacagtcatctcttgtacaacgtggagaagaaaagatatacttactactttgcttcaggtacacataagaaaacctcttttttaaaaaaatttttatttttttacataatagagacaggggctcgctgtagcttccaggctggcctcaaactcctgggctcaagcaatcctcctgtcttggcctcccaaagtgttgggatttcaggtatgagacaccacacctgcccatttttgtttggttttttaatgggcaggttcttgctctcccaggctggagtgcagtggtgtaatcacagctcactgcagtctcgaactcctggactcaagcagtcctcccacctcagcctcctaaagcactgggattacaggcttgaggcactgcacctggccctgaccattttttaaaaaggttaggcttagtgcaaagtttaaaattatatgattcttaaaatactgaattagtttctaaactaaactagaggtataggtggacctgcttgaggtatctttgtttttatggaacatttttattacatgcctttataatttttcattgttcacaccctgtactgaaacctttttctcaaataccaactcttggctatgttaaatttgtagactttaaaagatgttatctaaattaatggtttaaatatacaaattgaaaatattttctttttagtggcaattttaaaagcaggccttaatatgggacctgcttttaaagtaaaatatgtggtactatgaattactaaattgctatataccatgtaatagtgagtatagctaatatttagtatgccttttaaaaattttggactgcttttcggttttaacaaattctccacatgtgaactactcaagaaattttccctttttaattgcctctatagcactcataagagctagggcattaggataaactagaatattttatgtttatgaatacttgtataaacttaaaagtgttttgatttcccacaatttcccaaaggaatgtttatttattaagagttgtgttgataatttaactgttacaatttcagcagttgaattcagtgaacactggttgaggagtgcctatttctaagcactgggtgtaagaagaaaagacacttgcaaaggaagagctaagattaacataatttctttggtttttctattgcttgttattattatgtaaaaactgggtggcagttcacaaggaagattgttgtaacagaagagtgacaaccaatagttttttgatcattaaatcaaattttgtaaacagtggcaggagcgtggacttaaaacaaggcttgcttatttggttttgtcaaagttttacgaaaatatatgatatatatttatactaaaactatataatccttagatttaggaaagcaatcagttaatgtctttagcacactaaagcagtattaaacacaggtacaagttggaaattgtagaaaactgaaagaaaacaagacaaaatgtctatggtagggaataaaagagtttaagatattatgtaaaattatgtgtattttcttctcttttacataaattgtttgtgaaaagtgtgctcaacttttttacaagagtgatattaacttggatttatttttcaatataatttggagaccctttgttatccaaataaaattgatgagtttctgtgcctgt

SEQ ID NO: 871 - DNA, 3292 bp, Homo sapiens
cagtactgatgacacaaacatggcagacactttcaccgagattatgaccatgatgtcgccttcacagttcttgagttcatctcctttgagaatgacaaataatgaagacagtctgagtcccaccagcagcactctgtcaaacctggaactggatgcagccgaaaaggatcgcaagcttcaggagaaagagaagcaaatcgaagagctgaagaggaaactggaacaagagcagaagctcgtggaagtgctgaaaatgcaacttgaggttgaaaaacgagggcagcagcagcggcccctggaagcccagcccagtgccccaggtcattctgtcaagtcagatcagaagcacggcagccttggctcctccatcaaagatgaggcctcactccctgactgctccagctccaggcagcccatcccagtagccagccacgctgtaggccagcccgtctctacaggtggccagacccttgttgccaaaaaggctgtagttatcaagcaagaggtccctgtgggccaggcagagcagcagagtgtcgtctcgcagttttatgtgagttcccagggacagccaccgcctgctgttgttgctcagccccaggctttactgaccacgcagactgctcagctgctgctcccagtgtccatccagggctcgagtgtcacctcagtgcaactccctgtaggcagcctcaaactccagacttcaccacaagcaggaatgcagactcagcctcagatagcaactgctgcacaaataccaactgctgccttggcctcaggcttggccccaactgtacctcagacacaagacacgttcccgcagcatgtgctcagtcagcctcaacaagtcagaaaggttttcacaaactcagcatcatcaaatacagttcttccatatcagagacatcctgccccagctgtccagcagccctttatcaataaggcctccaacagtgttcttcaatccagaaatgctccgcttccatccctgcaaaatggacctaacacacccaacaagcctagttcacccccgccaccccagcaatttgtcgtccagcactctctatttgggagtccagtcgccaagacaaaagatcccccccgctatgaggaggccatcaagcagacacgcagcacacaggcccctctgccagagatttccaacgctcacagtcagcagatggatgacctctttgatatcctcattaagagtggagagatctccctccccataaaagaagaaccttctcctatttccaaaatgagaccagtgacagccagcatcaccacaatgccagtgaatacagtggtgtcccggccaccaccccaagtccaaatggcaccacctgtatctttagaacctatgggcagtttatctgccagcttagagaaccaactagaagctttcttggatggaactttaccctcagccaatgaaattcctccactacaaagcagcagtgaagacagagagcccttctctctgatcgaggacctccagaatgatctgctgagtcactcaggtatgctggaccattcacactcacccatggagacttccgagacccagtttgctgcaggtactccctgtctgtctctcgacctgtcagactcaaacttggacaacatggagtggttggacattaccatgcccaactcctcttcaggactcactcctctcagcaccaccgcgccgagcatgttctctgctgactttctagacccacaggacctaccgctgccatgggactaacgtcacagatttcttttctgagagttgatgaggtttaagaacatgaagattctaaaaggtcagtttttagagatagatctatagttgcattgttgcaatcaaaatatgttgtcacagaaagaataggtggaaggtcatagcctggaacccaagtttgaaaacatttcattgtgttcagtagtgaatttctacagtttaacatagcacagggccttctgaaaatcgcacttgtcaaagacgactcatctatttctccagacttcagtaaagaatgaaaagtacctttagataaaaacaaagaagagtaatatatgcagcacagtgacgttaggattctggtaattaactacatttaaatctctggtcactttaagaccctaaataaaaggcagacagctccactcaaaaactaaggctgatgtgagggaggtgagaggtcactgcacttggtacttcctagagacggccggagccaggcccaagacacagcagaggtcaaaggcagtggagagccttggccagttcagtgacagcttctggctgaagacttttggttctattcagaaacctgtgtcgtttttttggtgttgtagtttattttgtgattttttggaatcgtactttatatttccaaatttaaatttaaatgcaagatctttcaacataaacagaagatacctacaaaatactgtcagaagtccaggtatactgataacactgaaaattctattagcaaccttctgggttggttagattgattttaatgtatatattagacatttgtatgtatgctctgacattgtgatttgtacagcctacgctggggtaaggaaatgggtatccaaggtcctacttttttaatagctcgaatatttctagagtacttgagccacatgtatttctgtatttaaagaattgctgactaactttcaggtaaccagacccatctcaaagaaccaagaaaaggctttagcatgaaatatctttctgagctggcgagttagaagaatggaaggtaaggggaaggtctgtcatctacccaggacattcccatgatgagtacaggtcagattgtgccacaaggtgggcctccacgtccctgccctggccctctttcttctgtcactaaccctggttatcattttacaggcttgtaactggatattctaccagagctctcactatattgtcaagcctaagattgaaaaactggaggctttattagtgtttttatatagaaaacagttattacatatgtgttaagtcatttcttaagaattttctaaaatgccaactatcacaggattatttcaagctagtcattgaggtatatgacaaaatgtaaataacaaaaaactgaaatctaccaaaagagcatggagatttttcttaaataataatattgtgctctccacctcacccttgtgtaaaccctcaggtcaggttggttcccctgggtcacaaaatggtaaatgttccatactgacatgccggaggcagcctgacccgttatttggaaagaatttgtgaattatt

SEQ ID NO: 872 - DNA, 4979 bp, Homo sapiens
attatcctccttattgacaaacagagcggtcgcggcggcgactctcggcgtgcggtgatagccaagccatgggagacaagaagagccccaccaggccgaagcggcagccgaagccgtcctcggatgagggttactgggactgtagcgtctgcaccttccggaacagcgccgaggccttcaagtgcatgatgtgcgatgtgcggaagggcacctccacccgggacagcaaggaaggggggaagctggtgtcctactccacagccagtcttggggttagaggaaccctgagaaatagagtaggtggtggcagctcagaagagaagaaacaggctgaatacctggcacctggaagaagaaggaatatagtacacaggggagttggcccaggacagagaagtgggcctagtttaaaagaggcttgaggcccacatgggggcccctgacatttttttttttaccagtacatctgagctcttgtagatccaatttttagtggtggaaacattacttgaggaggactcagagaagcattgtcatttggattgaaactgaagaggctctgggcaactcaccagaaatctaagggacactgtgttcctgaaagtaagtgttctacaccacgaccctctcagcttcttccttcctctctctgaattctcttctcttttgattttggctctaagttaaacctaagagctctaatttctctgttatctgttattttcctagtggtttctgaaattcagggtagaatctgtgtttgtatagaacagtgtggaacagggtattgttactagagaagatattgattgcatcacagaatattaatatttttcctctctggtaatgttaaaaaaacaagattaaaggactgcagaacggtgttgagaagcaaaagtttcagtagttggaagaaataattctccataattgacttattaatgaacagggtaatttccagagtaaggttggcaagtactaaagccaagactggatagctgcagagcagaaggatgcagtttgctaatgatttgtttgtgtgacgcacagatgggatttgaatcctttgggtcagactgacctttgaactgattctgcctcattgccaaatgttaggccaagtctaagccattctagacatttgaaaaacttttttctttttagacctgcagagaagattgagtccttgttctacctttgaagtcttctttttttcttttttcttttttgagataagatctcattctgttgcccaggctgggttgcagtggcatcatccaggctcactgcagcctcgaactcccaggttcaaggaatcctcccacctcagcctcccaagtagctgaaactacagatgcacaccaccatgtgtggctaattttcttattttttgtagagatgggggatctctatgttgcctaggctagtctcaaactcttgagctcaagtgatcctcctaccttggcctcccaaagaactgggattataggaatgagccaccattcggcccctttaaagtctttattggcaatataattttttttctttaaataatattaagttcaaattctttatgcaacagaagcccatttcctttggctatatccatggtaggtcatgtctttctagagaacgaagttacattcatggcatgtatttcaaaataaaatgatttgttgtagcttcagttcctcaagttttaattttattttagattttggggtacatgtgcatgtttgttacttgggtatattgcagattggtgggattgggattccagtgtacccattacccaaatggtgaacgttatacccaacaggtcatttttcagcccctcactccaaaattttttacattgtgcttttgtgagagaaacagtagtaaatgtcaaactgacaggaaattttttaaaaggaaacaaaatgccacggtgacacattattttcaagatgctgcacagtctttatatctgaagtttcttttctttcttttcttttcttttcttttctctttttttttttgaggcagaatttgagacagtcttgctctgtcgcccaggctggagtacagtggcgtgacctcggctcactgcaacctccacctcccaggttcaagcaattctcatgcctcagcctctgtggtagctgggattacaggtgcccgccaccacaccaggctaatttttgtatttttagtagagatggggtttcactatgctggccaggctggtctcaaactcctgacctcaggtgatccgtctgcgtcggcttcccaaagtgctgggattacaggagtgagacactgtgcccagcctatctgaagattcttataaggcaagaaatgtcccaaatataaatgcaagaaactttaggaaattaaggatcattcttggctggcccagtggcccacacctgtaagcccagcaccttgggaggctgagacgggaggatttcttgaggccaggagtttgagaccaacctgggcaacacagtgagatctcgtctctactaaaaattaaaaaaattagctgggtgtggtggtgcatgcctgtggtcccagctactcaggaggctgaagtgggaggatcccttgagccccagagttcgaggttgcagtgagctgtgatcataccactgcactccagcctgggcaacagagtgagaccttgtctcaaaaaaaacaaaattctgagtcatcagagaaaatgaaatattaaatgttaaggatagtctgtatgagggtgataatcaatgtgtgatgattaatttaagactggtgtcttattggtacttcatctagtagtggacagttacttaatattgcttaattcagatagcaaatatttagaaatgaaaatgatagaattattggtttgggtttcaaactgtggtctaaatggttcataccaggctttcaaatgtaacaggtaatgttacattttgttagaggatattataacagtcctttaggtttctcataggtgttattttagagagctataaaaaagatttcacatagtagaaagagtgctagatgttacactagtatgattttggtaacctgggttcatatctcatttcatatcaaccatttcaatattcagcattcagcaaatgtttattgagcatcttatttaagggctgagttggatactagacatacagtggtgagcaaaatggatttttttgtttctttaaaattttacagttttgcaaattagaaccgctttaactgtaccaagctctatatgtgaggtttagtgttagtagatctttcctttatgtgtaggctgaagaggtggaacttcttcattaaaaatatatgttgtttataactgaacacagtattattattatggttaggtaaaaagagtgagttatttcagcttcttttaaaagtaagctataaaatccacattctgaaagaagcttaaaccaactatcatctggtagaaatcttttcagcatcgttgttttcttgtcatacttgctttatgtcttcaaatttgaggtttggcactgattcttctagacttttggtgtaggaatgggagaaaaaaattgaggaccatctacataagtcctttttaaagaaatgcatggttcctgagccgcctcctgtctatctgaggagcctttctagcaaccatttagttgttcagagactccttattctaggagatttcttacttgtttgttttttgtcctgtaagaggactcacactggttaattgtatatgggtaaattttacaagtgattattagtgtttgtgtagtctggatatcagagtggttttcaaagtgtagtctgagggacactgagagtccctgagatctttttagttgaagctttctatgaggttcacactgtttttataataatttgaagatgttatttgcctttttcactgtgatggtgcagaggcagtgatgggtaaaactgccagcaccttagcatgaatcaaagcagtggcaccaaattgctatcttcattgtaatattcaccaccatgtacatgcatgcagtaagaataatgtcagtttgaattaagaatatccttgaagcagaaaaatttactaattttattacatctcatatttttaaaaatattctgtctgaccaaatgggaactacacataaagcacttctactgtataccaaagtacagtggttaagggaaagcacatgtgtagtttgtcttgcaagcagagctagtctttttgtcatagagcatcatttttacttgaaagactacctgaaataccatagttattcagacttggatatttagcatatattttcttgaaaatgaatatattcaaaaaatatatcacttcaaggaaaacacttgatactatatgttgccagtgataatcattcaagtgaaaattagaatttttgaaaatttgtagcaacaatgagctttagagtttctgtgtataaagacttttctgagaagattagtggtggtatcaatgaatataatttctgatatttcaccatgaaatgtgtcagcatttggaagctacgcataactcagcaaacaaatggttcctagttaccgatgtatgattttacaaaactgtaatgggtaatccatcaaagtacaaaataccaacagattttaagggaacactgaaaacttcattgatgtggtttcagatttcatattgcaactaacctttgagaaacaactgtgtttttatgtagtatcaaagaataacacctatagttatctgaaaatgctattcaactacttacctcttttcaactgtatatctgtgagagtccagattttcttaatatttttggaccaaaacaacatattgcaacaaattgaatgctgagatagatgtgacaatccaggtgtcttctactaaccagatgttagaggtttgcaaaaatatacgatgccactcttcatacaaaatatctttgttttggaaaataataagtttttaaaataaaaatatgtcattt

SEQ ID NO: 873 - DNA, 3189 bp, Homo sapiens
ctaatcctacagtataaagaacttttgtattgcatttgaattcttttatttattctttcatgagcaaaaactttttgcacacttactgtgttccaggttctgttctaagcttgtgcagtgcatgctacctcatgcaacctttgcaacaactctccctgctagggggccactctttcctaaagcaggcaggggcccagaacaggctgttccaggcctcctctatgccttattatcacagagagagcatagaatattcctcaagcaacaagaaagagcaaggaaatacatgttcaatgcagacatccacgtttgtgtcatctcagaggaaggaacaggatcacccgttccctccaagggaaaatatacccttttctttgcttttattggttttaaggcctgggacagtagttctccaccttcttgggtcacattgcctttcactctgccagattctgtttcctttctgtgacacgaggatagaaataacacgcatggcaatggattggggtggtattccaacgaaataatgtaacgatggccctttgtgaagtggaattcatacattcattcactcatgcattcaacacatttactgagggcctattatgtgccaagctcctcttgaagtctctgaggcctgaagagtgaagacagaatagatgctaaaggcagatttctggaacaaactgcctggggtcaaatactagcctcattactcactaactatgggaaagttaagtataaaacctgactcaaagggttagtgtcaagtttaaagaagttaatatctgtaaaacatttaaaatagttcctggcatagagtaagttccagaaatcctttgataataaaaaaaatatttttgaaaagaacaactaagaaaaattacattcagtatttctacctaaggagatatggctgtatattttaccttaaaaatatcagagatgttaaaataatagaacaataaatagaataataaacatctgtataactttttaaaaagatttaaagcccacattttgtgtttttttttttgttttttttttttttatggaaacagagtcttgctctgtcacccaggctggagtgcagtggcgccatctcgctccacctcccaggttcatgccattctcctgcctcagcctccagagtagctgggactacaggtgcacgccaccaagcccagtaaagcccacattttctaaatgtgaaataaaattttaattcttaatcattagccatcaagaacacacagatatctagaatgccctaacttattaatgtcttaatgtattagttcaagtctcaaaagcttaaagcaataaaatgtattacctgctgaagtaaaccctcatatacctgtgatagcagttcctccaccatcaagaatctggaaaaaggaggaaagcctagaaaacaacaacaacaacaaaacactgcttcttaaagatatcaaccccaaagtgacacctatcacttcctctttcatgtcactggccacccccaccttcactgagaagaaaaaggttaattcgactacacacctgacttcactgtttgatcatctgattgtggacaagtcacttaatttgactgtatttcagtttccttgtttgttaaatgaaaacagaaacagtgctttgctcatggcattgtcatgagacttaaatcatacacaaaaatgttagctataatgacaatgtgatctacccacagaaaatataaagtattatttgtgtgtgcatgtctgtttaatgtgagtagtatcagactacatttccaatgccgataaaaatgtgtgatctgactgaaacaataacctcgcattttatttcaaacttacacacttacacaatacatccatacatgcgagtcaccattgcgtttcgttcccatgaaaacttggattgcgtcagagttttattgcttttgacccaatgccacttaatgattgaaaaaaaatggtgggttcatgtttggtatttcctgatgcgggcaagggagcagggctgctctcagcaggcggttctcacccacgtgctcactggccctccgcaagctgatgtccaagacgacagacacatggtttagggagctcagatgcttgaactgtgacgcagctggaaacccaatcaggacatcggagaagaaagcagagtgaggtggggtcagaagggggcacgtgggacattcccaggagttggaactgaagaggggtgaaagggagggatgtgggcaaagtcaagctctggaagcagaggctcagggggtaccctgtgtttgtggttggggacagagatggggcaatgaggcccagcacccaaaggccaacagggctaaggtgtgcaatgacttcaggttgactctggaggctgatgagttgtttgtctggatggacgtgtggttggcagatgtcttgtgcctgcccagccttcaccccacacttctggggccatgctctgagcttgctcagggaaccatggctttgctggtctcagcacagctccagaaatgatcatgtggctccggtttgaccaatgaggcgccacatccctctggccacaatgattggctcaggaatggcatgtgacccagtcagacccaatcaaagctcaccctgggccttgctaggggaggaaggatggaaggtgtaagactccaccttcagagccccctgggtgggggtcacatgtgcctcagggtgatgtcaagaaggttgtgctgagatggagagaaaaagagtcatagtccctggatttggatatgctcaaagccagcttgtcattggccttttcttggcatgaggcaatacattcctttccttcgtttaaactagtcggacatgggttttctgtcacttacaacctaatgtcttctaaaacagccttccccaacctttttcacaccagggactggtttcatggaagacaatttttcaacgcatggtgggtggtggggagggattgtttcagaatgaaactgttccccctcctatcatcaggcactagttagattctcataaggaacccacaacctagaccgctcgaacacgcagttcacaacagggtgaatgctcctgtggtaatctaatgcagggatggccagcctttggcttccctgggccatgttggaagaattgccttgggccacacatagaatacactaacacgaatgatagccgatgagct

SEQ ID NO: 874 - DNA, 1959 bp, Homo sapiens
atttcgcagctctgagtccacgacagaccacgcaccccctcctccgtgcctcgggattatttagatcgcagagctcccgaacttttgaccgctacttttcaaagaaacaagttcccttgtgttttgaagttcaggcaacttgcgttttattggccggaatcagctcccagagaaggcacccccggatgcaaatgcagcctggacctggtagagccccgttaggggcaaaggtcccagctctccggtgtctcctggcgcaggaggctggagccgccggcctctccgagccaacatgcgcccgggcgcgtaccagccgttcccgcagtgccccgcggggcccccagtcgggtggtgcggagcggaaagcggccgggacgcaggcagaggagctggggtgcccgcccggctcctggcacgatgctccccggagcccgccggcggacagctcgctcggtccccaaagcccgccaaagtcacccgcggaggcagaaatcaccaggtccccagcccgccggtaccggcctgccactgaggccaccttactcaccgcggggccagccaggaccaagagcgcccgcagctcttctcggaaggcggacagccgcaagcagcgcgacccacggacctcaagggtggcctccgggcctccgcgcactggcgcgggctcctcaggagcttccatgtgactcgcgcgctgcggccgggtagcgcggaggccggcagtgggtaccgcggaggccggcagtgagtaccgcgcaggccggcagtgggtaccgcgcagtgcagcctgctctgcagtccccgccccggccgcccgcccagagcccgccccgcgcctggcgcccgggggcccgactgagcgcgcagccaggcagcctgcgaccttgggcgcgccccttgcacctctctctgcaccactgcggacgcctgcgggtcttgcaaagaccaaggaactcctgcacttggaaggcaaagtttgaaaaagctctgtaaactaacggaacgcgctccgggggctgggtcctccacgtctcggacgccaggactcaccccggctctccacctccgctgggggtttcaggttctgaatgacctggcgtggaaggacccagaggcctcgagccgtgactcggttagcaccccgcggggtgtgtggggttgggcgcatttgctgtgcagattgagttgggtacaccctttgatgctggttagggtgttgcatactcctctcctctcatcagttgttccattagagaacttagaatctaccaggatagagcaacatgctcccatttgccaagtagcacagtttgtgccagctggtcgtgttggaagtttatccatcaagcctgctgtgggagtacgagaggctgcggcccagaagggcaggagcagcgcgctttcctcccagagcctcagcttcctcatctgcaaacgtgaaagaacactcgtcgccagctgtgaagactggggttgcctgggcggaggaccggagtcagtgccacctgccctcagcctggcaccagccgttacctaataagtgtcagttaccaggacaagattgatttctctaatagtcaaaattccttccgttgtaatgatccaatgtaagtagagaaaatggaaaacaaattttttggctcacataatcaggaagtttggattcagggatttgaaaacaaggtcattaggccaggcgcggtggctcacgcctgtaatcccagcactttgggaggcctaggcgggcggatcacaaggtcaagagatcgagaccatcctggccaacatggtgaaacaccgtctgtaccgaaaattagctgtgcatggtggcgcgcgccataatcccagctactagggaggctgaggcaggagaattgcttgaacccgggaggcagaggttgcagtgagccgagatctcgccactgcactccagcctggtggcagagggagactccactc

SEQ ID NO: 875 - DNA, 1972 bp, Homo sapiens
gtaatttatccaggaataagtattgtaatttcataccatagcttagttcatgcatatgtaaaatttaaaaatttcaggcaatctttgaattgtaaaccacttaaacattgtttctgagttgaaatagttctgtggtaaagcctggattaccttgataaaacttggagcaaatgaataataccccttgcctctctcattcccctgtgtgtatttcaaccacagagtcacagttcaggccagagggttatgttataccgcgcccggcctataatcttttgttttttttgagatggagtctcgctgtcacccaggctggagtacaatggtgcaatctcggctcactgcaacttccacctcctgggttcacgtgattctcctgcctcagcctcccagctacttgggaggctgaggcaggagaatcgcttgaatctgggaggcagaggttgtagtgagctgagatcacatcattgcactccagcctgggcaataagagtgaaactccatctcaaaaaacaaaaacaaaaactaaaaacaaacaaaaaaaagaaatcccagtttcttcaagaaatagtccctttttagtatgtgtaattctggccagagtgataaaataattattttaaataggtagtagatgatgactccccagagatgtataagacaatctctcaagaatttcttacaccgggaaaactggaaattaattttgaagaattattaaaacaaaaaatggaagaagaaaaacgacgaacagaggaggaacggaagcataagctagaaatggagaaacaagaatttgaacaactgagacaggaaatgggagaggaagaggaagaaaatgaaacctttggattgagcagagaatatgaagaactgatcaaattaaaaaggagtggctctattcaagctaaaaacctaaaaagcaagtttgaaaaaattggacagttgtctgaaaaagaaatacagaaaaaaatagaagaagagcgagcaagaaggagagcaattgaccttgaaattaaagagcgagaagctgaaaattttcatgaggaagatgatgttgatgttaggcctgcaagaaaaagcgaggctccatttactcacaaagtgaatatgaaagctagatttgaacaaatggctaaggcaagagaagaagaagaacaaagaagaattgaagaacaaaagttactacgcatgcagtttgaacaaagggaaattgatgcagcactacaaaagaaaagagaagaggaggaggaggaagaaggtagcatcatgaatggctccactgctgaagatgaagagcaaaccagatcaggagctccatggttcaagaagcctcttaaaaacacatcagttgtagacagtgagccagtcagatttacggttaaagtaacaggagaacccaaaccagaaattacatggtggtttgaaggagaaatactgcaggatggagaagactatcaatatattgaaaggggagaaacttactgcctttacttaccagaaactttcccagaagatggaggagagtatatgtgtaaagcagtcaacaataaaggatctgcagctagtacctgtattcttaccattgaaagtaagaattaatcactctttttatcttttattgtattaatttttttttccttaaaatcacttttcttcttctcttttttagctgatgactactagctcccctcccctctccctggaactttctctttcactccaactttcttactacatccatcttttctgtggcggggccaaaaaaggaaaccaggagtgccactatgctgacttcttattccttttcataacagtcttcaaagcacagctcatctaaagaatgcctacttcttttccaaataagcatcagatttatcgcctattatgcagtaacagtcaataaaatgtacttatgggggggaattactcaattattctatcagaacctattataaagactgtatttccc

SEQ ID NO: 876 - DNA, 3492 bp, Homo sapiens
tctttccggcttctttgcaaaaggatagaaccgtctcgaccagggcactaggactggaagatcgggctgtgtctaggccgctgtccgcgaaatccgagacgttttttcagcttggctaggaccgacttcgctgccggtttgagctttctctgcactcgggggtctcctgccgtcctcgaccggtggcgtaacttgggaagagattctgagcagagcactggttcagattctgaggtcctcactgagcggacttcctgctccttcagtactcacactgacctggcctctggtgctgcaggccctgtgcctgctgccatgtcttccatggaggagattcaggtggagctgcaatgtgctgacctctggaagcggttccatgatattggaactgaaatgatcatcaccaaagcaggcaggaggatgtttcctgccatgagagtgaaaatcactggcctagatccacatcagcagtactacatagcaatggacattgtgcctgtggacaataaaagatacagatatgtgtatcatagctccaagtggatggtggctggcaatgctgattcccctgtgcccccaagagtttatatacaccctgattctctagcttctggagacacctggatgagacaggtggtcagttttgacaaactcaagcttaccaacaatgagttggatgatcaaggacatatcattctgcactctatgcacaaataccagcctcgagttcatgtgattcgcaaagacttcagcagtgacctttcacccactaagcctgttcctgttggggatggggtgaaaacgttcaactttcctgagactgtgttcaccacagttacggcctatcagaatcagcagattaccagattaaaaattgaccgaaacccttttgctaaaggattcagagattctgggagaaacagaactggacttgaagccatcatggagacatatgcattctggagacctcctgtgcgcacactcaccttcgaagacttcaccaccatgcagaagcagcaaggaggcagcacaggcacttccccaaccacctccagcactgggacaccatccccttcggcttcttctcatcttttatctccatcctgttctcctccaacttttcatctggcccccaacactttcaatgtgggctgccgagaaagccagctgtgtaatctaaacctctctgattatccaccatgtgcccgaagcaacatggctgccttgcagagctacccagggctgagtgacagtggctacaacaggcttcagagtggcaccacttcagccactcagccctctgaaaccttcatgcctcagaggactccatccctgatctcaggaataccaactcctccctcgttgcctggcaacagcaagatggaagcctacggtggccagctggggtcctttcccacttcccagtttcagtatgtcatgcaggcaggcaatgctgcctccagctcctcatcaccacacatgttcgggggcagccacatgcagcagagctcctacaatgccttctcccttcacaacccttacaacctgtatggatacaatttccccacttcccctaggctagctgcaagcccggaaaaactgagcgcctctcaaagcactttactctgttcttctccttccaacggggcctttggagagaggcagtacctgccgtcagggatggagcacagcatgcacatgattagcccttcacccaataaccaacaggcaaccaacacttgtgatggccggcagtatggggcagttccaggctcctcctcccagatgtccgtgcacatggtttaaaggccagtccaaacaccacggagcatttggcaatcaaggccccagagtctccgtggtcagatcctcctctttgggagtccagtgtctttgaaaaacaggaaccgtgttttttttttttttttttttctggccgaagacatatacccaagaacaagagatacctttaagccagtgaaggatacttgcgatagaatcatccgcaactcagtggccattcttctgccttcccagaccttagttttataaagcattgtctgttccagagtggcctttgaagagaccgaataatcacttcgtcataatgttaagggagatgctagtgtgtggcagccatgaaaagttacacatacacacccacatacagacagacctacctatacatacgtgcacacacacatacatattcatacacaattcatacacatgcaatcatacatgcacactgactctgaactgggtgaactctgtggagggaggcccagaatgggtgctttcaccaagaatttgtctgtgtacaactctagatggagtgggccagcagtagctgccagtctttctcccctgcagcttcctctgcttctggaatgaaccatgtatcctggagaccctcccaatggatgagagtggaaagacatcagtacaactggacttggcttccggaaaaagattgcttttgaactttggctctcttcacttgtatgctatcattgatattcccagtggtgcccgtggaaagagggagaaagagaagctgaacaggagaaagacaaacagaaagaatagagaacaggaacgaggtggagagcaagactgacagagaaagtgtgagcaatgatgagaattttaattcaccaaggagacgtgtttttggtttgtccccccaaaccccgcccgccccactacaggttatggaaagaatcatggcattactgaggagtaaacctctctggcacactgagcatggtcagggcattggtcagagggacagagcaaggaatgcatcctgagcccacagctttgaccactgtgatccagaagagaggtgcactacgtgggaagtgctgattccacagcatgcagcctggtaggggaaggaaaataaaagggtgtgaagaaggaatagttttataatctcggaagatgataccaagagcagaggcaacaaatagaggcctggcctccaggtgccggatccagacacctgacctagaatgcctgcccgctatccctgtggcaggaaatatcccctcatgtcccagggaattgcagatgggtcttctatacccttctacctgcccttagatctccatttttatcaaatagtacattgcattttgaagttttgggttttgtccttcatctttccctttcccttcaaatcttttaatggtaagaaagcaagtgaagcttggtgcaagctaaaatttttaaatggtgtggaaatgcaaataataccaagtaaaataatacagatattattaaagtttctggttttgaggtgttgtagataaatgtatttatgtgcctagtggggaatccaatattatgaatatgaaaaagggggcaataaaagggtatgtaaaatatgtatgaagaaaaggtgtacaaaaatttgcccttatgcacggaactctgtttctaagtgccaagcacagaaagccgctaaataaaatctttgcaattgtt

SEQ ID NO: 877 - DNA, 2327 bp, Homo sapiens
agatgcgagcactgcggctgggcgctgaggatcagccgcttcctgcctggattccacagcttcgcgccgtgtactgtcgccccatccctgcgcgcccagcctgccaagcagcgtgccccggttgcaggcgtcatgcagcgggcttgggtcccgtggtgcgctgcgagccgtgcgacgcgcgtgcactggcccggtgcgcgcctccgcccgccgtgtgcgcggagctggtgcgcgagccgggctgcggctgctgcctgacgtgcgcactgagcgagggccagccgtgcggcatctacaccgagcgctgtggctccggccttcgctgccagccgtcgcccgacgaggcgcgaccgccagctccaggaaatgctagtgagtcggaggaagaccgcagcgccggcagtgtggagagcccgtccgtctccagcacgcaccgggtgtctgatcccaagttccaccccctccattcaaagataatcatcatcaagaaagggcatgctaaagacagccagcgctacaaagttgactacgagtctcagagcacagatacccagaacttctcctccgagtccaagcgggagacagaatatggtccctgccgtagagaaatggaagacacactgaatcacctgaagttcctcaatgtgctgagtcccaggggtgtacacattcccaactgtgacaagaagggattttataagaaaaagcagtgtcgcccttccaaaggcaggaagcggggcttctgctggtgtgtggataagtatgggcagcctctcccaggctacaccaccaaggggaaggaggacgtgcactgctacagcatgcagagcaagtagacgcctgccgcaaggttaatgtggagctcaaatatgccttattttgcacaaaagactgccaaggacatgaccagcagctggctacagcctcgatttatatttctgtttgtggtgaactgattttttttaaaccaaagtttagaaagaggtttttgaaatgcctatggtttctttgaatggtaaacttgagcatcttttcactttccagtagtcagcaaagagcagtttgaattttcttgtcgcttcctatcaaaatattcagagactcgagcacagcacccagacttcatgcgcccgtggaatgctcaccacatgttggtcgaagcggccgaccactgactttgtgacttaggcggctgtgttgcctatgtagagaacacgcttcacccccactccccgtacagtgcgcacaggctttatcgagaataggaaaacctttaaaccccggtcatccggacatcccaacgcatgctcctggagctcacagccttctgtggtgtcatttctgaaacaagggcgtggatccctcaaccaagaagaatgtttatgtcttcaagtgacctgtactgcttggggactattggagaaaataaggtggagtcctacttgtttaaaaaatatgtatctaagaatgttctagggcactctgggaacctataaaggcaggtatttcgggccctcctcttcaggaatcttcctgaagacatggcccagtcgaaggcccaggatggcttttgctgcggccccgtggggtaggagggacagagagacagggagagtcagcctccacattcagaggcatcacaagtaatggcacaattcttcggatgactgcagaaaatagtgttttgtagttcaacaactcaagacgaagcttatttctgaggataagctctttaaaggcaaagctttattttcatctctcatcttttgtcctccttagcacaatgtaaaaaagaatagtaatatcagaacaggaaggaggaatggcttgctggggagcccatccaggacactgggagcacatagagattcacccatgtttgttgaacttagagtcattctcatgcttttctttataattcacacatatatgcagagaagatatgttcttgttaacattgtatacaacatagccccaaatatagtaagatctatactagataatcctagatgaaatgttagagatgctatttgatacaactgtggccatgactgaggaaaggagctcacgcccagagactgggctgctctcccggaggccaaacccaagaaggtctggcaaagtcaggctcagggagactctgccctgctgcagacctcggtgtggacacacgctgcatagagctctccttgaaaacagaggggtctcaagacattctgcctacctattagcttttctttatttttttaactttttggggggaaaagtatttttgagaagtttgtcttgcaatgtatttataaatagtaaataaagtttttaccatt

SEQ ID NO: 878 - DNA, 2289 bp, Homo sapiens
aaggcattcgcaagtgtgtcattgtaacgctgtgtttttctggtatagatgcactctgttttcctcctacagatgatttcaaactttacagaaacattttaagtggcattgtctccatttcaaatcaagttgcctagcttcctcctaccgccatacgttttctcttcctaatgtgtagacatttcaaagagcttccttatttgagaacgagtgttctttacagacacgcttagatctgtgagccagcatgtcgcactgatgtgctggagtaccggagcgtgaagccatgagcgaggtatttaaaaagcataacagccacattcagcgcccagaggccgatcgcccgtcagagggagagaggtggccggggcagtggagggctctgcccatgtctgtcagacagccatgttcttgccagggcagccagggccgggccactcaagctgggtgcttggctctccctgagctcgagcacgggcacgttcaggtgatcttcctgatagcaaagtgcgtttctgcgcatggactcctgaggagcagcgaggagctgactcacacattccaccaagcccaggctagaaagaggggacagtcggaaccgtagtgttttcttcctgtcaatgctgagagactcactcctgaggtcgcacatccttgccagcaaacgaaagacccagatcacagtcctaggctcgtcctggacgtgtagcctttgtacgttccatagtgaccttttgtacattttctcctgtgcgtgttcagccttagaatggcactgtgggcaggcagaactgccggtgctcaccacccccctttcccggggggaaactgaggctcagagagatgccgctggacttgctccaagtcagtcaatgaggcagaaccaggagcgccccaaccccagcgccaaggcccgcatgctctcgcgggtcccagctctaccgttgagtattttcttcccactagagagatgtgatgagcaaagatttccgctcagaactcctaacatccaagtatgagttggctttgcaagccaaaggggagcatggtgtctgtttttcttcagagaatttctgactgtttgctaaggcacgtttccataagaaggactggagagaagcaggccttctaaactgctggagagcatcttgaatcagctctcccccaaagcaacaaaaatacagcatcactgtcaaatcaaccaccaaatctggcagtcagccaagaggacagaacaaacacagatgcattcactcaaggaagagcggccccagggggaagaacaggatggcagcgtcttcacttggggccgctccagccccgaggcgcacagccgtggaaagccagtgacagcacagaccgtggaggagctgggctctgttgaaaaccccatcccaggatgcagtccgcatttggactggtcatggagctcctggaaaaggcccgttccgaggcacaatcaccgttggctgcagtcgtgatcatgggagctgccccaaggctgcgatcgacattggagcaaacaagagcctggccagaccaggtgaccccggggactttgaaaaaccttggagattcccgggcacatacgaaaatggatgtgtgaaggcttcggtacagagagggccccagccactcttctctggctgacctcaaaaccccaccaagcagaagtgagaggtaaagctgcctgtggctgggaggcaggtcctgacacacaggttttgtgattagagggaggagactggcttcgtggctcaaggatttaaggaaacttcctgtctggtaacagcagaccattaaactctgctaaccagagggtgatccctaggcagcctggcttaaagacagaaacaagatttaaaaacagagagaacagaaaactcagtgtccacattctgcaaggaatacagcatctagataattagtccaggaaagtcatgagtcacataagcaacaaccaaggagaggggaagccgagaaacaacaagtcctatttggagggggatgggggggggtatctcatttcagagtcgctacaatgcattagttgtcatctccagttgtaaaccaaaaaattatagtacatgcaagaaaacatgaaaatatgtcccatccacaggaagaaaaatctgtagcccctgagagggctcaggtattagaccagcaaaggctttaaatcagctgcaataaatatgctcaaagaactgaaagaaattgtatttaaaaaattacaggggagtgtggcaaatatatcttaccagatagagaatatccataatgagattt

SEQ ID NO: 879 - DNA, 2604 bp, Homo sapiens
atctcgagcaaaacctcctggcttgtacatcaccatagcaggccccaggaatgcgagggaccctgtgtcagggcagggaccccatcatccaagacagttggcagggagagtgcaagacctgcctggtttctacaaccttccaaaggaggcagctcccgaaagaaggttttcagaacgcagggccttgggagacaggaagccagtcagactcctcgcacaaaccacagggggcaagcagtgctcctccaagaacctggccccaccagggtgctcaagggaacgaggaggacaaccacagctattatgtgtcccgtctctatggccccagcgagccccacagccgggaactgtgggtagatgtggccgaggccaaccggagccaagtgaagatccacacaatactctccaacacccaccggcaggcttcgagagtggtcttgtcctttgatttccctttctacgggcatcctctgcggcagatcaccatagcaactggaggcttcatcttcatgggggacgtgatccatcggatgctcacagctactcagtatgtggcgcccctgatggccaacttcaaccctggctactccgacaactccacagttgtttactttgacaatgggacagtctttgtggttcagtgggaccacgtttatctccaaggctgggaagacaagggcagtttcaccttccaggcagctctgcaccatgacggccgcattgtctttgcctataaagagatccctatgtctgtcccggaaatcagctcctcccagcatcctgtcaaaaccggcctatcggatgccttcatgattctcaatccatccccggatgtgccagaatctcggcgaaggagcatctttgaataccaccgcatagagctggaccccagcaaggtcaccagcatgtcggccgtggagttcaccccattgccgacctgcctgcagcataggagctgtgacgcctgcatgtcctcagacctgaccttcaactgcagctggtgccatgtcctccagaggtccctcaacaaccaggatgaaaacacgtatgtgaattgcctggattctcagcagtgtcacggcagctcagagtcaaggcgaccttgaggatcactggagctcatgcagtcctgctagcccctacacctactcacatgggcagatgtggccttggtcctggggagctgggtgggaaggaaggcagggatgccacaaataccttcatcttccggggaagtagagggaatgggagtgcctgactacctcagcctggggaccttggctcctcttctcactatcagcagagagctgttactgaacagtgaaaggggaaggcttctttgtcaatcccatcataactctgtccttttggtcctcccgcagatgctccagtggctttgaccgctatcgccaggagtggatggactatggctgtgcacaggaggcagagggcaggatgtgcgaggacttccaggatgaggaccacgactcagcctcccctgacacttccttcagcccctatgatggagacctcaccactacctcctcctccctcttcatcgacagcctcaccacagaagatgacaccaagttgaatccctatgcaggaggagacggccttcagaacaacctgtcccccaagacaaagggcactcctgtgcacctgggcaccatcgcgggcatcgtgctggcagtcctcctcgtggcggccatcatcctggctggaatttacatcaatggccaccccacatccaatgctgcgctcttcttcatcgagcgtagacctcaccactggccagccatgaagtttcgcagccaccctgaccattccacctatgcggaggtggagccctcgggccatgagaaggagggcttcatggaggctgagcagtgctgagaacaccaagtctcccctttgaagactttgaggccacagaaaagacagttaaagcaaagaagagaagtgacttttcctggcctctcccagcatgccctgggctgagatgagatggtggtttatggctccagagctgctgctcgcttcgtcagcacaccccgaatattgaagagggggccaaaaaacaaccacatggattttttataggaacaacaacctaatctcatcctgttttgatgcaagggttctcttctgtgtcttgtaaccatgaaacagcagaagaactaacataactaactccatttttatttaaggggcctttacctattcctgcacctaggctaggataactttagagcactgagataaaacgcaaaaacaggaatcatgccgtttgcaaaactaactctgggattaaaggggaagcatgtaaacagctaactgtttttgttaaaggtttataggaatgaggaggtttggctattgtcacatgacagactgttagccaaggacaaagaagttctgcaaacctcccctggacccttgctggtgtccagatgtctgcggttgtcagccccttcctttcccccgacctaaacataaaagacaaggcaaagcccgcataattttaagacggttctttaggacattagtccaccatcttcttggtttgctggctctccgaaataaagtccctttccttgctcc

SEQ ID NO: 880 - DNA, 2123 bp, Homo sapiens
cgcttctctcgctgtgaagatggcgctctccagggtgtgctgggctcggtcggctgtgtggggctcggcagtcacccctggacattttgtcacccggaggctgcaacttggtcgctctggcctggcttggggggcccctcggtcttcaaagcttcacctttctccaaaggcagatgtgaagaacttgatgtcttatgtggtaaccaagacaaaagcgattaatgggaaataccatcgtttcttgggtcgtcatttcccccgcttctatgtcctgtacacaatcttcatgaaaggattgcagatgttatgggctgatgccaaaaaggctagaagaataaagacaaatatgtggaagcacaatataaagtttcatcaacttccataccgggagatggagcatttgagacaggtatgggccaggggcagatatccagaagttcatggtgagttccgccaagacgtcaccaagtgtcttttcctaggtattatttccattccaccttttgccaactacctggtcttcttgctaatgtacctgtttcccaggcaactactgatcaggcatttctggaccccaaaacaacaaactgatttcttagatatctatcatgctttccggaagcagtcccacccagaaattattagttatttagaaaaggtcatccctctcatttctgatgcaggactccggtggcgtctgacagatctgtgcaccaagatacagcgtggtacccacccagcaatacatgatatcttggctctgagagagtgtttctctaaccatcctctgggcatgaaccaactccaggctttgcacgtgaaagccttgagccgggccatgcttctcacatcttacctgcctcctcccttgttgagacatcgtttgaagactcatacaactgtgattcaccaactggacaaggctttggcaaagctggggattggccagctgactgctcaggaagtaaaatcggcttgttatctccgtggcctgaattctacgcatattggtgaagataggtgtcgaacttggctgggagaatggctgcagatttcctgcagcctgaaagaagctgagctgtctctcttgctgcacaacgtggtcctgctctccaccaactaccttgggacaaggcgctgaatgaaccatggagcggatggcattgtcctgcagtcgtatagtatagcagtgcaggaacaaacagcacttgccagcaaagtctgtgtgtactgttaagtgtgtgggaggcagagagaggagcaggggccatgggcttcacagcatggcacacctgtgggaactgcagacattcctctcacagctagaactgaaacaaaccctcttgctaggggtggtccgtgtgaggtgtcatcctgtccccctcataattactaatagctggaactggcagcagcctctactgggcttttactgtgatgtgttcagttcatgtcctaggaagtcagcttttgccccaggtgggaatccttatttggcttaggactgatccacttccatgttacttacatctgtgggtttttgttgttgctgttagaaaatttttggctggtgaaaacagcactcctttggctggagcacttgtgtccatgcatgtacttgggtgtttccctccatcctttctgatatgaccaaaaatcaagttgttttgttttttgtcaccttcactggcatgggctaaccacttctttttcaaaccctctgaacacctttttctgatgggtaacttgcaggaatattctattggaaaagataacaggaagtacaagtgcttcttgaccccttcctcaatgtttctagccttcactctccattgtcttttctgggctgtattacagccctctgtggatcttcaactctgctgcctccactgtgatgcagcagtccaactgtaactgacagtggctgccttctctgggccatggatcacacctgtaaggtactaattactgcccagcctggggagatcaggagaggtctgcatagttagtaagttgggtttagcttttgtgtgtgcatcagtgacttagagttctgtaataacttattgtaaatgcatgaagcactgtttttaaacccaagtaaagactgcttgaaacctgtt

SEQ ID NO: 881 - DNA, 2571 bp, Homo sapiens
ttttgtgaccaccttcttcgtgggcttcagcaatgacagccagacatgggtgatgtacaccaacggctatgaggaaatggtgggcaccatgcccaggctcttggctctgctcccattgtctgggcgaggggtgggctctcagaggggctggcagtactgctctgaggcctgcctctccccagacctttcatgggaacgtggacaaggacacacccgtgctgagtgagctcccagagccggtggtggctcgtttcatccgcatctacccactcacctggaatggcagcctgtgcatgcgcctggaggtgctggggtgctctgtggcccgtgagtgtggagggctggcaggggctctgagtggaggtggggtgctagggtgggccagccggcacccagctaaagacaaccccgcctcccttgcagctgtctacagctactacgcacagaatgaggtggtggccaccgatgacctggatttccggcaccacagctacaagggcatgcgccagctcatgaaggtggtgaacgaggagtgccccaccatcacccgcacttacagcctgggcaagagctcacgaggcctcaagatctatgccatggagatctcagacaaccctggggagcatgaactgggggagcccgagttccgctacactgctgggatccatggcaacgaggtgctgggccgagagctgttgctgctgctcatgcagtacctgtgccgagagtaccgcgatgggaacccacgtgtgcgcagcctggtgcaggacacacgcatccacctggtgccctcactgaaccctgatggctacgaggtggcagcgcagatgggctcagagtttgggaactgggcgctgggactgtggactgaggagggctttgacatctttgaagatttcccggatctcaactctgtgctctggggagctgaggaggggaaatgggtcccctaccgggtccccaacaataacttgcccatccctgaacgctacctttcgccagatgccacggtatccacggaggtccgggccatcattgcctggatggagaagaaccccttcgtgctgggagcaaatctgaacggcggcgagcggctagtatcctacccctacgatatggcccgcacgcctacccaggagcagctgctggccgcagccatggcagcagcccggggggaggatgaggacgaggtctccgaggcccaggagactccagaccacgccatcttccggtggcttgccatctccttcgcctccgcacacctcaccttgaccgagccctaccgcggaggctgccaagcccaggactacaccggcggcatgggcatcgtcaacggggccaagtggaacccccggaccgggactatcaatgacttcagttacctgcataccaactgcctggagctctccttctacctgggctgtgacaagttccctcatgagggtgagctgccccgcgagtgggagaacaacaaggaggcgctgctcaccttcatggagcaggtgcaccgcggcattaagggggtggtgacggacgagcaaggcatccccattgccaacgccaccatctctgtgagtggcattaatcacggcgtgaagacagccagtggtggtgattactggcgaatcttgaacccgggtgagtaccgcgtgacagcccacgcggagggctacaccccgagcgccaagacctgcaatgttgactatgacatcggggccactcagtgcaacttcatcctggctcgctccaactggaagcgcatccgggagatcatggccatgaacgggaaccggcctatcccacacatagacccatcgcgccctatgaccccccaacagcgacgcctgcagcagcgacgcctacaacaccgcctgcggcttcgggcacagatgcggctgcggcgcctcaacgccaccaccaccctaggcccccacactgtgcctcccacgctgccccctgcccctgccaccaccctgagcactaccatagagccctggggcctcataccgccaaccaccgctggctgggaggagtcggagactgagacctacacagaggtggtgacagagtttgggaccgaggtggagcccgagtttgggaccaaggtggagcccgagtttgagacccagttggagcctgagtttgagacccagctggaacccgagtttgaggaagaggaggaggaggagaaagaggaggagatagccactggccaggcattccccttcacaacagtagagacctacacagtgaactttggggacttctgagatcagcgtcctaccaagaccccagcccaactcaagctacagcagcagcacttcccaagcctgctgaccacagtcacatcacccatcagcacatggaaggcccctggtatggacactgaaaggaagggctggtcctgcccctttgagggggtgcaaacatgactgggacctaagagccagaggctgtgtagaggctcctgctccacctgccagtctcgtaagagatggggttgctgcagtgttggagtaggggcagagggagggagccaaggtcactccaataaaacaagctcatggcacg

SEQ ID NO: 882 - DNA, 1705 bp, Homo sapiens
agaggcagagacacacgcggagaggaggagaggctgagggagggaggtggagaaggacgggagaggcagagagaggagacacgcagagacactcaggaggggagagacaccgagacgcagagacactcaggaggggagagacaccgagacgcagagacacccaggccggggagcgcgccctcccctcggcgggcacggtatttttatccgtgcgcgaacagccctcctcctcctctcgccgcacagcccgccgcctgcgcgggggagcccagcacagaccgccgccgggaccccgagtcgcgcaccccagccccaccgcccaccccgcgcgccatggaccccaaggaccgcaagaagatccagttctcggtgcccgcgccccctagccagctcgacccccgccaggtggagatgatccggcgcaggagaccaacgcctgccatgctgttccggctctcagagcactcctcaccagaggaggaagcctccccccaccagagagcctcaggagaggggcaccatctcaagtcgaagagacccaacccctgtgcctacacaccaccttcgctgaaagctgtgcagcgcattgctgagtctcacctgcagtctatcagcaatttgaatgagaaccaggcctcagaggaggaggatgagctgggggagcttcgggagctgggttatccaagagaggaagatgaggaggaagaggaggatgatgaagaagaggaagaagaagaggacagccaggctgaagtcctgaaggtcatcaggcagtctgctgggcaaaagacaacctgtggccagggtctggaagggccctgggagcgcccaccccctctggatgagtccgagagagatggaggctctgaggaccaagtggaagacccagcactaagtgagcctggggaggaacctcagcgcccttccccctctgagcctggcacataggcacccagcctgcatctcccaggaggaagtggaggggacatcgctgttccccagaaacccactctatcctcaccctgttttgtgctcttcccctcgcctgctagggctgcggcttctgacttctagaagactaaggctggtctgtgtttgcttgtttgcccacctttggctgatacccagagaacctgggcacttgctgcctgatgcccacccctgccagtcattcctccattcacccagcgggaggtgggatgtgagacagcccacattggaaaatccagaaaaccgggaacagggatttgcccttcacaattctactccccagatcctctcccctggacacaggagacccacagggcaggaccctaagatctggggaaaggaggtcctgagaaccttgaggtacccttagatccttttctacccactttcctatggaggattccaagtcaccacttctctcaccggcttctaccagggtccaggactaaggcgtttttctccatagcctcaacattttgggaatcttcccttaatcacccttgctccttctgggtgcctggaagatggactggcagagacctctttgttgcgttttgtgctttgatgccaggaatgccgcctagtttatgtccccggtggggcacacagcggggggcgccaggttttccttgtcccccagctgctctgcccctttccccttcttccctgactccaggcctgaacccctcccgtgctgtaataaatctttgtaaat

SEQ ID NO: 883 - DNA, 1722 bp, Homo sapiens
gtgctaagtctcagccctgtgaccacctcaagctacggaggagtcagggaaacttcgtctttggctgggtggccgtgtgcccagtcaaactcaggagtaaaggacaaaggggagaatgatattgggcagtggccagcagggttggcacaaagctcctgcaggattcgaatactgtttaacagaggattttctactgtggggcgacgacctgtcaccttgattggcttcagcctgggagccagagtcatctacttctgtctgcaggagatggctcaagagaaagattgccaaggaatcatcgaggacgtcatcctgctgggtgcgcctgtggagggagaagccaagcattgggagcctttccggaaggtggtgtccgggaggatcatcaacggctactgcaggggagactggctgctgagtttcgtgtaccgcacatcctcggtgcagctccgtgtcgccggcctacagcccgtgctgctgcaggacaggagggtggagaacgtggacctgacctctgtggtcagcggccacctggactatgccaagcagatggatgccatcctgaaggccgtgggcatccgcaccaagccaggctgggacgagaaggggctcttgctggccccaggctgcctgccctccgaggagcctcgccaggcagcagctgccgcctcatcaggcgagaccccccaccaggttgggcaaacccagggtcccatatccggagacacctccaaattggccatgtccacagaccccagccaagcccaggtgccagtagggctggaccagtctgaaggggcctcccttcctgctgctgccagccctgaaaggccccccatctgcagccatggcatggaccccaacccactgggctgccccgattgtgcctgcaagacccagggccccagcacggggctggactgaccacagcaggggacctgagccgtcttccccagtctccatatgcagctctctcttataccctcgggttcctcccaggagctctggaggtacaggatttccacaggcctctttcctaaatggaaggaattggaactgaaagggaaaggaaatggaaggaaggggaatttggaggagagaacacgcccacccttgggaagctgcctgtccccagaggagccccaccagggagcagctgccccctcatcagagacctgcagagtcaaccaagcacaggttagagtcccaggaccggaaaccaactgtgggctttctgtacttctcatagctttggagtctggctgtccatcaggaggtcccgagggctctctggggcctgaggctcccacaccagctctcccctggcctcaataaaaccaggtgcatgcctgttcttccatccacactccagggctgcccaccagctgacaggcaccatcaactggcagcaacagagcaggcgcaggtacaaagaaggcagctcactcctgctcttaggagatccaatcagatctgccctgtacagccatgtaggctgtgcgctgcataactccagggacatgagtcacacagacacaatgtgagtgtgctcccccgtcatgcaacatctggacaccactaacagagcatggtgaatacatgctgaattgcattcagtatggctgtgaactaggcctggggacaagaatgaattttacatggaaagaatttcctgtagcaggaacagaggggataacaacagcaataaataataataagaag

SEQ ID NO: 884 - DNA, 2126 bp, Homo sapiens
agtgtgtgaagtaaagggattaaaggctagtctcaggctggggatggctcctgtctatttcttctctctcagagactgcagatggcttttccctgccgcaggtccctgactgccaagactctggcctgcctcctggtgggcgtgagtttcttagtactgcagcggcggcggcttcctcctgtccggccccacggcccgggccctgcgcgcggccgcccgccacaccccgctcttccccatcgacgacgcctacatgggcggccagtgcgccgcctctttctattgggcaccccgggccccgaggacgaggcgcgcgcggagcggctggcggagctggtggcgctggaggcgcgcgagcacggcgacgtgctgcagtgggccttcgcggacaccttcctcaacctcacgctcaagcacctgcacttgctcgactggctggctgcacgctgcccgcacgcgcgctttctgctcagcggcgacgacgacgtgttcgtgcacaccgccaacgtagtccgcttcctgcaggcgcagccacccggccgccacctgttctccggccagctcatggagggctccgtgcccatccgcgacagctggagcaagtacttcgtgccgccgcagctcttccccgggtccgcttacccggtgtactgcagcggcggcggcttcctcctgtccggcctggcgcccagcggccacgagggcatccggcccttcggcgtgcagctgcctggcgcacagcagtcctccttcgacccctgcatgtaccgcgagttgctgctagtgcaccgcttcgcgccctacgagatgctgctcatgtggaaggcgctgcacagccccgcgctcagctgtgaccggggacaccgggtctcctgaggccagttgggcggcttcagccccgggcctccaaccatgtccatgctgagaaggcagctttcccgctctgggtaccttacgtcctgcccagctctgtgcacctgaaccccagctgcgcactgaaatcagctggggtggggggtgtggaaaatgcctacatcctggctccatctcccgaagtttcgatttgattagtctggggtggacccagacatgttaagtattttttaagttcctccagtgatgcgaatgtgcagctaggcctgaggaccactcggctagactatctcttcatcctcgcaaagccagctccaccgccctctctgcaagaattccgggcccctcgctcccacactcgggtcctcttgagcagtggagcaagggagacctgggagcgtgggagccaggatcagcgccccctgccatgtgcctacaaatgtcagttgtgatttccactgtttacaagtgagtggagctggagctgggctgacagtatcaggtggatcccgcttccccctcccccaagaagtcagccaacacgcagctgaggcgcatgtggtggccttcttcccaccactaccccagtacaccgtgaggtagaaatcttcaccgtgcaaagtggaaaccagaggcccggtcagacagtgactaatccagggccgtggcattcccagacagcacaccactgtggtcccctccacactcaccccaaccaaagctaatggcctagttgggtcctgcccgccaataatcacccccacgggtcagagacaggctccttgccggggtctgggcctcaggctcagtgggccttggacaacccagcagggagttccggggagtccgaagtggagaaaggctggtgggaacatggaggccagtgttggggagcctgtggaggcaggtgtgtagaattgtgttcgggaggtgggggatctgagaccgaagtggacagtggttaagattgtggggccgggcgaggtggctcacgcctgtaatcccagcactttgggaggctgaggaggtcggatcatgaggtcaagagttcgagaccagcctggccaatatggtgaaaccccgtctctattgggagtacaaaaattagccggccatagtggctcgtgcctgtaatctcagctatttgggaggctgaggcaggagaatcacttgaacctgggaggcggaggttgcagtgagccgagatcgtgccactgcactccagcctgggcgacagagcaagactgcatctc

SEQ ID NO: 885 - DNA, 1536 bp, Homo sapiens
agatccatccttaatctggtgggcaccatctaatcagctgccagcacatataaagcaggcagagaaacgtgaaaaggagagatgggcctagccccccagcctacatctttctcccgtgctggatgcttcctgccctcaaacatcggactccaagttcttcagttttgggactcggactgcctctccttactcctcagcctgcagacagcctgttggggaccttgtgattgtcggccagagcccccacaccatgaacagcacccccaggaatgcccaggccccgagccaccgtgagtgcttcctgccctctgtggctcgcaccccctcggtcaccaaggtcacgccagccaagaagatcaccttcctcaagcgaggggatccacggtttgctggggtccgcctggccgttcaccagcgcgcctttaagaccttcagcgccctcatggacgagctctcccagcgcgtgcctctctcctttggggtgcgctctgtcaccacaccccggggcctgcatagcctcagcgccctggagcagctggaagatggaggctgctacctctgctctgataagaagccccccaagacccccagtggaccaggccggccacaggagagaaaccccactgctcagcagttgcgggatgtcgaaggccagcgtgaagccccaggcacctcctcctcccggaagagtcttaaaaccccccggaggatactgctgattaagaacatggaccctcgcctccagcagacagtggttctcagtcacaggaatactaggaacctggccgcctttctcggcaaagcctcagatctcctgcgctttcctgtgaagcagttgtacacgaccagcgggaaaaaggttctgccggacatgaaattccaccaaaggtcggcagaatggaggatggaggttgactgacctaattcacagtctcctcaagattcagtcctgttgctccttaacatctgtatgcaccattccaccaatacttcataaatatcatatcactgggcacagtggcgcacgcctgtaatcccagcactttgggaggctgaggcaggcggatcacctgaggtcaggagttcgagatcagcctggccaatagggcgaaaccctatatctactaaaaatacaaaaattagccaggtgtgttggcacacacctgtaatcccagctactcgggaggctgaggcaggagaattgctggaacctgggaggcagaggctgcagtgagccaagatcacacactgtactgcagcctgggtgacagagccagactccatctcaaaaaaaagtcatatgataacatcattacaaaaactttgttataaacatcagctacagcagcctgcactcatggagtaacagagctctccctcctacaatcaaaaacacgttcaccttctccccacaatcgcattatcactggacccttcgtcttctatgctgtgacaacctcaccttgatatcgtctatctcaaggtctacttaggtagtccagcaccatcaaagtaccctatgttaagtagtatagg

SEQ ID NO: 886 - DNA, 1295 bp, Homo sapiens
aaaggaggggcagagcctgcgcagggcaggagcagctggcccactggcggcccgcaacactccgtctcaccctctgggcccactgcatctagaggagggccgtctgtgaggccactacccctccagcaactgggaggtgggactgtcagaagctggcccagggtggtggtcagctgggtcagggacctacggcacctgctggaccacctcgccttctccatcgaagcagggaagtgggagcctcgagccctcgggtggaagctgaccccaagccacccttcacctggacaggatgagagtgtcaggtgtgcttcgcctcctggccctcatctttgccatagtcacgacatggatgtttattcgaagctacatgagcttcagcatgaaaaccatccgtctgccacgctggctggcagcctcgcccaccaaggagatccaggttaaaaagtacaagtgtggcctcatcaagccctgcccagccaactactttgcgtttaaaatctgcagtggggccgccaacgtcgtgggccctactatgtgctttgaagaccgcatgatcatgagtcctgtgaaaaacaatgtgggcagaggcctaaacatcgccctggtgaatggaaccacgggagctgtgctgggacagaaggcatttgacatgtactctggagatgttatgcacctagtgaaattccttaaagaaattccggggggtgcactggtgctggtggcctcctacgacgatccagggaccaaaatgaacgatgaaagcaggaaactcttctctgacttggggagttcctacgcaaaacaactgggcttccgggacagctgggtcttcataggagccaaagacctcaggggtaaaagcccctttgagcagttcttaaagaacagcccagacacaaacaaatacgagggatggccagagctgctggagatggagggctgcatgcccccgaagccattttagggtggctgtggctcttcctcagccaggggcctgaagaagctcctgcctgacttaggagtcagagcccggcaggggctgaggaggaggagcagggggtgctgcgtggaaggtgctgcaggtccttgcacgctgtgtcgcgcctctcctcctcggaaacataaccctcccacagcacatcctacccggaagaccagcctcagagggtccttctggaaccagctgtctgtggagagaatggggtgctttcgtcagggactgctgacggctggtcctgaggaaggacaaactgcccagacttgagcccaattaaattttatttttgctggtt

SEQ ID NO: 887 - DNA, 1810 bp, Homo sapiens
atgcccggggcgtgtgcggcggtgcggcccgggctccacgtccacaggctgggcagcgctttgggccccgcgggcgccgagtccgcaggacccgcgagggcactaccgcgaagcatcggcctccgggccgggccgggccggaccgggagcctgctcggcgggtccgggctcctgcaaggcggggacgcggggccggcgacccttcacgcttcgtactcattgagcgccgattttatgccaggcaccgtgctggatctcccagtgcctggaagagaaaacccattctgtttcgaagggcatccagagctggtcacagtggggacccaccctccttttccaggctacgccagaccctgggtgtgtgtacgtttcaatggaagtgaatttaaatgtactttataaatcaaagactttttctgagactttggagagttccagtaatgagagcttctcattgttatcaaagccagggctggagaccagtggcggtcggccaagatctgaccgtgatggcggcccttggcttgggcttcctcacctcaaatttccggagacacagctggagcagtgtggccttcaacctcttcatgctggcgcttggtgtgcagtgggcaatcctgctggacggcttcctgagccagttccctcctgggaaggtggtcatcacactgttcagtattcggctggccaccatgagtgctatgtcggtgctgatctcagcgggtgctgtcttggggaaggtcaacttggcgcagttggtggtgatggcgctggtggaggtcacagctttaggcaccctgaggatggtcatcagtaatatcttcaacacagactaccacatgaacctgaggcacttctacgtgttcgcagcctattttgggctgactgtggcctggtgcctgccaaagcctctacccaagggaacggaggataatgatcagagagcaacgatacccagtttgtctgccatgctgggcgccctcttcttgtggatgttctggccaagtgtcaactctcctctgctgagaagtccaatccaaaggaagaatgccatgttcaacacctactatgctctagcagtcagtgtggtgacagccatctcagggtcatccttggctcacccccaagggaagatcagcatgacttatgtgcacagtgcggtgttggcaggaggcgtggctgtgggtacctcgtgtcacctgatcccttctccgtggcttgccatggtgctgggtcttgtggctgggctgatctccatcgggggagccaagtgcctgccggtgtgttgtaaccgagtgctggggattcaccacatctccgtcatgcactccatcttcagcttgctgggtctgcttggagagatcacctacattgtgctgctggtgcttcatactgtctggaacggcaatggcatgattggcttccaggtcctcctcagcattggggaactcagcttggccatcgtgatagctctcacgtctggtctcctgacaggtttgctcctaaatctcaaaatatggaaagcacctcatgtggctaaatattttgatgaccaagttttctggaagtttcctcatttggctgttggattttaagcaaaagcatccaagaaaaacaaggcctgttcaaaaacaagacaacttcctctcactgttgcctgcatttgtacgtgagaaacgctcatgacagcaaagtctccttatgtataatgaaacaaggtcagagacagatttgatattaaaaaattaaagactaaaaacttagtttaagagtcaatttaataagtttaaaataaatgtttagtttcatt

SEQ ID NO: 888 - DNA, 2772 bp, Homo sapiens
atgtcagcacgcagaaggtttgaggagcattgcttctcatacagtaaggtttcccaacagtgatgtcacaagattgaccacattgatcacaatatggagtctggagaacggttaccatcctcagcagcctcctctactacaccaacttcatcttcgacaccttctgtggcttcagtagtttcaaaaggtggcctttccactggagttgcttcacttagctctacaatcaacccatgtggacatttattcagaacagctggggatcaaccgtttaacctgtccacagtgtcgagtgccttcccaatggtcccgaaaaaggtgtaaatgggtcaataaatggaagtaatacatcatctgtaattggtatcaacacatctgtactatccactactgcttcaagttccatgggacaaactaaaagtacaagctcaggtggaggaaatcgaaaatgtaatcaggaacaaagcaaaaaccagcctttggatgctagagttgacaaaatcaaagataagaaaccaaggaagaaagcaatggaaagttctagcaacagtgatagtgattcaggcacatcatcagacacctcaagtgaaggcattagtagcagtgattcagatgatctagaagaagatgaagaagaagaagatcaaagtattgaagaaagtgaagatgatgattctgattcagagagtgaagcacaacataaaagtaacaaccaggtgctattacatggtatttcagacccaaaagcagatggacagaaagcaactgaaaaagcccaggaaaaaagaatacaccagccattacctcttgcgtctgaatcccagactcactcattccaatcccagcagaagcagcctcaggttttgtcacagcagcttccatttattttccaaagctctcaggcaaaggaggaatctgtgaacaaacacaccagtgtaatacagtctacgggattggtgtccaatgtgaaacctttatctttggtaaatcaagccaaaaaggaaacttacatgaaactcatagttccttctcctgatgttcttaaagcagggaataaaaatacctctgaagaatctagtttattgaccagtgaattgagatccaaacgggaacaatataaacaggcattcccatcacagttaaagaaacaagagtcatcgaagagcctgaagaaggttattgcagctttgtcaaatccaaaagcaacctctagttcaccagcacatccaaaacaaacattagaaaacaaccacccaaatccattcttgacaaatgcacttttaggtaatcaccaaccaaatggagttattcaaagtgtcattcaagaagctcctctagcacttactaccaaaactaaaatgcagagcaagattaatgaaaacattgctgctgcaagtggcacccctttttcctcacctgtaaatctgagtacaagtgggagaagaacccctggcaatcagacacctgtaatgccctctgcctctcccatcctgcatagtcaagggaaggaaaaagcagttagcaataatgtaaacccagtaaaaacacagcatcactcccatcctgcaaaatctttagtggaacaattcagaggaacagattcagacattcccagtagtaaagattctgaagattcaaatgaggatgaagaggaagatgatgaagaagaagatgaggaagatgatgaagatgatgaatctgatgacagccaatcagaatcagatagtaattcagaatcagatacagaaggatcagaagaagaagatgatgatgataaagaccaagatgaatcagatagtgatactgaaggagagaaaacttcaatgaaactgaataaaacaacttcctctgtcaaaagcccttccatgagtctcacaggtcactcaacacctcgtaacctccacatagcaaaagccccaggctctgctcctgctgccttatgttctgaatcccagtcacctgcttttcttggtacatcttcttccacacttacttcaagcccacactctggcacttccaaaagaagaagagtaacagatgaacgtgaactgcgtattccattggaatatggctggcagagagagacaagaataagaaactttggagggcgccttcaaggagaagtagcatttatgctccatgtggaaagaaacttaggcagtaccctgaagtaataaagtatctcagcagaaatggaataatggatatctcaagggacaatttcagcttcagtgcaaaaataagagtgggtgacttctatgaagccagagatggaccgcagggaatgcagtggtgtcttttgaaagaagaggatgtcattcctcgtatcagggcaatggaaggtcgtagaggaagaccaccaaatccagatagacaacgagcaagagaggaatccaggatgagacgtcggaaaggtcgacctccaaatgttggcaatgctgaattcctagataacgcagatgcaaagttgctaagaaaactgcaagctcaagaaatagccaggcaagcagcacaaataaagcttttgagaaaacttcaaaagcaggaacaggctcgggttgctaaagaagccaaaaaacaacaagcaataatggctgctgaggagaagcggaagcaaaaagaacagataaagattatgaaacagcaggaaaaaattaagagaatacagcaaatcagaatggaaaaagaacttcgagctcagcaaattctagaggctaaaaagaaaaagaaggaagaagcggcaaatgccaaattattggaggccgagaaacg

SEQ ID NO: 889 - DNA, 2723 bp, Homo sapiens
ccttttcttcgtagcctccaagggagctggaacaaaaaaacgaaaccaaaacctgcctgctcgctcctctccccatcgcctgcgttccgctggttgtgggcttcctgtggccgctgagggcgcgtctcccctccgccatggcatcagttttgaatgtcaaggaatccaaagctcctgaaagaacggttgtagttgctggtcttccagttgacctttttagtgatcaattattggccgtattagtgaagagccacttccaagacattaagaatgagggcggagatgttgaagatgtgatatatccgacaagaaccaagggagttgcatatgtaatattcaaagaaaaaaaagttgcagagaatgtcatcagacaaaagaaacactggctagcaaggaagactagacatgctgaactcacagtctctctcagagtctctcattttggtgacaagatcttcagctctgtaaatgccatccttgatctttctgtttttggaaaagaagttactctagaaactctggtaaaagacctgaaaaaaaaaatcccgagtttaagcttcagtcctttgaaacccaatggaagaatctccgtggaaggatcatttctggctgtcaagaggctcagagaatctttgctagcaagagcatgttctctcttagaaaaagacagaaattttaccagtgaggagagaaagtggaatagacaaaatccccagaggaatctacagagaagtaataactctttggcatcagtcaggaccttagtacctgagactgctagaagtggagaaatgcttgtgcttgacacagatgtttttctttacctgaaacacaagtgtggatcttatgaaagcacactgaaaaaattccacattctgagtcaggagaaagtggatggtgaaatcaccacaatttgtctaaaaagcattcaagttggttctcagccaaacaatgcaaaacatgtaaaagagctcattgaggaatggtcacatgctctttacttaaagcttagaaaagagacatttattttggaaggaaaggaaaatagagagaaaagaatgatcaaaagggcatgtgaacaattaagttcgagataccttgaagtcctgattaacctttataggacacacattgacattataggatcttcttctgacacttacctgtttaaaaaaggggtcatgaaattaatagggcaaaaggttagttaataaaatctcagcaatatagtcataagggctgctttctcttgctgagcagtgaccattgccatgaatgaggctagctttacacaccgtatctcatgaatccttatagtcatccttctttgtcagtgttgactatcctcatgttacagcggaagaaactaggatttggagaagttaaaacacttttctgaagttatccagttgacaaggaatgaggctgtggcttagcccagtctatctgattacacagataatatctaaggaataaaactttgaaaaaaactcaccaaacttttttttttttttttttttgagatggagtctcgctctgttgtccaggctggagtgcagtggcgtgatctcggctcactgcaacgtccacctcctgggttcacgccattctcctgcctcaacctctggagtggctgggactgcaggtgcccaccaccacgcccggctaatctttttgtgtttttttggtagagatggggtttcaccgtgttagtcaggatggtctccatctcctgaccttgtgatccacccgcctcggcctcccaaagtgctgggattacaggcgtgagccactgcgcccagcaaactcaccaaactttgaaggaatcttactttctctgtaactccaaattattagagaataataattattaagaagtagccttaacatatgagaaatttgaaaggtgattattatgccatgggcaatttcttaacatttacagtttgtgtttactccgtgtagaattaggatactggcaaaaatcactggggaaactacttagatggaaagcatatcttatgcaggtaatcattatttgactaaattctattgtttcaaggctgctggccacataggatgtttttactatttttttagcctaagtgcttacataaaatggtgattcttttataattgtgcaagttgataatattaattgagtcattcttgtcacatccaactaaaacagactcaagaagctagggggaaaaagtacttgggacacataatattgctccaagaatgtaattctctgtgagcctggctactgaaactgcttgctgtaacctgagaccagttttgtctatagctgctgagataacttgctgtaactctaggactaattttacctatggccattgcccaccagttggagcttgccagctccccagggctttactaataccaatgaactttctcttaagatcacaagttggccgggcgtggtgactcatacctgtaatcccagcactttgggaggccgaggcgggtggatcacagggtcaggagattgagaccatcctggctggcatggtgaaaccccatctctactaaaaatacaaaaattggccgggcgtggtggtgggcgcctgtagtcccacctactcgggaggctagaggctgaggcaggagaatggcgtgaacccgggaggtggagcttgcagtgagccaagactgcactactgcactccagcctgggtgacagagcgagactccgtctc

SEQ ID NO: 890 - DNA, 3199 bp, Homo sapiens
tagattgtcataaatcttacatggaatcattacggaatgaccaggttcttcagggcttctcggtggacaaaggagaattcacgtgtccactctgtaggcagtttgctaacagtgttcttccatgttatcctggaagcaatgtggaaaataacccttggcaacgtcctagcaacaaaagcatacaagatctcataaaggaagtggaggagctgcagggacgaccgggagctttcccatcagaaacaaatttaagtaaagaaatggaatctgtaatgaaagatataaaaaataccactcagaagaaatatagagactatagcaagaccccgggctcaccagacaatgattttctctttatgtactctgttgctagaaccaatttagaacttgaattgattcatcgaggaggcaatttgtgttcaggtggtgcaagcacagctggcaaaaggtcttgtttaaatcagctgtttcatgtattagccttgcacatgcggctttatagcattgactctgagtataatccctggagaaagctcacccagttagaagagatgaatccacagctgggatatgaagaacaacagcctgaggttccaattctttatcatgatgtaacatcccttttgctcatccagatcttaatgatgccacaacccttacgcaaagaccactttacctgcattgtgaaggtactttttaccctactgtacacacaggctcttgcagcactctcagttaaatgcagcgaagaagataggtcagcctggaaacacgcgggagctctcaaaaagagtacatgtgatgcagaaaagtcttacgaagtattactgagctttgtgataagtgaactgtttaaaggaaagttataccatgaagaaggaactcaggaatgtgcaatggttaaccctattgcttggtctcctgaatccatggaaaaatgcttacaggacttctgcttaccttttctcagaatcaccagccttcttcagcaccacctttttggggaagatttacctagctgccaggaagaagaagaattttcagttcttgccagctgcctgggacttctgccaacgttttaccaaacagaacatccattcatcagtgcctcctgtctggattggccagttccagcatttgatattataactcagtggtgttttgagataaaatcatttactgaaagacatgcagaacaaggaaaggccttgcttatccaagagtcaaaatggaaattaccacacctactacagttgcctgagaattataacaccatttttcagtactaccacagaaaaacctgtagtgtctgcaccaaggttcctaaagatcctgctgtttgccttgtgtgtggtacttttgtatgcctgaaaggattttgctgcaagcaacaaagttactgtgaatgtgtactgcactctcagaactgtggtgcaggaacaggtattttccttttgatcaatgcatcggtaattatcatcattcgaggtcaccgcttctgcctctggggttccgtgtatttggatgctcatggagaggaagaccgggatcttaggcgaggcaaacctctctacatttgtaaggaaagatacaaagttcttgagcaacagtggatttctcatacttttgatcacatcaataaaagatggggtccacattacaatgggctgtgactctccacctcagcattgcatcgtatcatcattttcgctacgaatttatttttcaacaataagctttaacttaatttgggggattaacacttttgctgagggagaaaaagaaaacatacattatgaagcctttccaaaattaggtgcttggtaatcacgttaatggtataatttttttttttttaatatctggagaacattaataacaagttaaattattctttagtggtcattttttaagtgcacaattaataagaagcacaacttgttcacaaactcattcagaaatgattctcccaacaatgcatatcagctattcattgatacttagagtgggtgtgatttatttgacattttactgcttctttctgtctgtgtgttttaatttgcatctgccaagcataatgcatcttttttcctctgccattcttgtgttgattggagaatttttctgtatgtaattagaaaaaaatgtaaaacatgatttatgtgaaatactgtatagtaaaagttggtctaatagtagaactttaaaattttttcttattgtgaggaatctgttaaaagtttaaagctttgctgaaaactgaattcattctcaggaatttcataaatcttctccccaggtaaataattgaaatagctgtaaaataagtagatagctgctgttaatataatacagtacattttggggggcatatgtgtggttggggggtccttaaaaatcaaaatttgccatttcagttggatgaattactagaggtaataacaaatcttactataaaatcaagaggtttaagaacatacactgggcagatgttgattccgtgcatgcccaccttttattaccaaacaaggttttgtttatatgattgtattagaaatgctcagacttccccagaaatgaaccataaattttggaacttcctttcagctcaagaggttcagctatattgtatttgtgcagtgtaatcactactatttctgctcggtttcctaaaaggaaaaaaaaggcacagtggtgatgaccctcatgaatgagccacgcttctgcattcttcttagaaactgctgtgaaaaacaatttatgtttgcagggtttaaaaatcagtaaaaatgggaatgattgagctaaaacccactctatgagaaggaagattactgaaaagcatgtgacatattgctacaaagattttttttcctaaatgattcagtaattgaatgattatttaatatatagtgctatcaagcaatccctggtactttggacttccatggcttgttatataaaattacatttttacatgtaaaaataaactaaacaaacctaatgataaaatataaaaataatgtcagatccatgttctaaaaaatttttgtaatgacatgacattacaagagtataaaaatggacattaaatcatggccttgcattaaaatatggaaagcagagcagtacatattcaaatgtattcagaaagtcaaaagattacctatcgttctacaataaaatacatggaaatagc

SEQ ID NO: 891 - DNA, 2100 bp, Homo sapiens
aagaaaagcggcgtctcctcaaaacaccaccatgttcccctatgagtctggtgagccaagacactaagaaactgcaggaaacgagagagttctcggggtgggggtgtccatggatgaagcaccgaacaaactggagcccgcaagagtcttgccttcttttgagcctaagtcatgagttggatgttcctcagagatctcctgagtggagtaaataaatactccactgggactggatggatttggctggctgtcgtgtttgtcttccgtttgctggtctacatggtggcagcagagcacgtgtggaaagatgagcagaaagagtttgagtgcaacagtagacagcccggttgcaaaaatgtgtgttttgatgacttcttccccatttcccaagtcagactttgggccttacaactgataatggtctccacaccttcacttctggtggttttacatgtagcctatcatgagggtagagagaaaaggcacagaaagaaactctatgtcagcccaggtacaatggatgggggcctatggtacgcttatcttatcagcctcattgttaaaactggttttgaaattggcttccttgttttattttataagctatatgatggctttagtgttccctaccttataaagtgtgatttgaagccttgtcccaacactgtggactgcttcatctccaaacccactgagaagacgatcttcatcctcttcttggtcatcacctcatgcttgtgtattgtgttgaatttcattgaactgagttttttggttctcaagtgctttattaagtgctgtctccaaaaatatttaaaaaaacctcaagtcctcagtgtgtgagtgccacagcctcagatatgttgaatgtggtaggagagggacccctcccctactccagaatcttcacacttggccataaacacactccctctacctgaagcaaagctactctgtgacacacaagagggttaaacaaagaaaacctgcatccctcctcagcaaggcctaagctgagttggaagacaaagcacatcagccttagtatcatttgggaggaatttttttacattgtcaatatgctttcagttatgagctctagacagaggtctcattgttttgttgtagggttctccagtatgtggataacattagttgttttagaataggtaattgcaaattagtctgaagaaatctaacaggattcttttaagagcttagatttttcagggaaaaaaaaaaaaaaagaaaccctgtgtcagttttctgttttttctaactatctcattacaattggtgcacaatgaactggaaaatataaaaagtgacactttaggcaaatgtgatggcctccgagctgaaatgaaggaactggcaatctttccaaagtggcagccaaggccccactccctgtcctactcaatctctgcagggaaaaactgtgggataggatagcagccagctggggacacacagaggaacattcaacaggaaggtcccgcctagggaaaaggccacagagcccaggcctcttgccgattcagggatccttggatataagtggattagaggagagggaggaaagctatcatttcagtggtctccaaatcaagtagaaatattactgggaggtatcccacttaagcctgaaccagcagacatccgaaagggtcactctagagtcagaaaggaaagcaggtcccccagaaggcaacacattgataggaagtggaggccacagaaaaagaatgtgcccacttgataattacttaagacttctatttaaccaaaagaacattgaaatactttgtaaatattcatattgttgaacctttcataatcaggaattcactatgtactatactgtaagtcatagttcgcctataatttactagtatatctccctctaggacagatagtaaaatgtgtactatgttgttacagtggtgcaaaaatgttttaaaagtttatcacttgttttgaagactagaactttctttacttttctatattttcttagcaattcacagatatgttctctttggatttagtactttaacatatgtacatttcttcagaataaaaataagggtatttcac

SEQ ID NO: 892 - DNA, 3215 bp, Homo sapiens
tatgagggagggtgtgggtcagggttcttacctggtatttaaaaaatgtttgggagtgccctgggcctatttgaaaagtttgaatctgtgatcactgtcagctcctccaagacttctcctctcaacagacaattgcattgtagggcaccccagaccccccttagcctacatggcagcaaataccactgtgccagttatatctggactctagggtagtcttggccaactccaagactggccaactccaagacttgtccactgtgtgcagagtattttaagtatgttatctcatacaatccataaaaacaaccctatagtgttgggtattgctatttcttttatacacatgagaaaatggaggcagtaagaggaagaggaacttgttcaaagtcacacaactgttaggcagaaatgaggtcattcaaatccttaatcttctcctccagaccacactgcctcccaggaagagatgtgggcacctcctgctcttgccaggcaggaaaccgctccttatcaatgtctacggggtctgctctcacacccaggaaggactgtgacaagcatggactaacctgcggctccactcagcctgctgtcagcaccctcctgttcagcaggatgcaacatctgatgttctgccaggaggctgtagagctgcacatagaagtagccagtgtttcttcccattccaaaatggaaatatcactcagccttttttaaaattgacttcctatgttcattttgattgtaggtgatgcagcaagcctcagggctggggattttcaaaatcttgttggctgactattatagatggccttggaatttgctcttgggggtctgaatataacgtaggaaaatgtcctttctcagggagtggggctttaaagttcgtttgtttgtcactccaattttagctgtgcactgcacctttctttgcacccctactctcttcatcttgtctcatagccacagctattgaatttggcctgtgatcataagttgggtttctgatctgatctcttgcattctggtgggtactgggggcagaatcagctttgttaatgattttctgggcagaaggtaaattcagctgcatctgaaggggcttcacagtccaatagccgtccttttgttttacataacagagagtgatggtcaaggccacccacatctttagtggtagagccaggacaaaaagtcaggttttctgcctcttaagtctcatgctgcctcacatagcacctccagagctctaggggaaggaggctcagagagatgaagtgacttgtctgaagtcctgtggctagtggcagagaagttggaattagacctgcattggacctcaattcgctgagcagttgcagggaaatctggaaatcctttttttttttttttttgagacagagtcttactctgtcacccaggctggagtgcaatggcgtgatctcagctcactgcaacaccgcctcccgggttcaagcgattctcctgcctcagcctcctgagtagctgggattacagacgcacgccaccatgcccggctaatttttgtatttttagtagagacaaggtttccccatattggtcaggctggtcttgaactcctgaccttgtgatccgcccgccttgacctcccaaagtgctgggatgacaggcgtgatccaccgtgcccagccgggaaatccattttttaaaataaattcaattatgtcttgaatgtactcagaaaacgagctgtttaaaatgtcccattgtgactgtaatgtgaacaatgacctctaacttgtattttatttggcaaggatgggggatgtgcatcaaatcttcacctctgggatttcctgaggcttggtctacttggctcaccctccacctgcatccccaccccactcctagatattaatacaaatctagccttgacaccgcctactgctccaccaccgcctacgtttttggccatcagagccttggagtttacagagcagaggccatgacattggggagcttgtttaaaaatcaatgatcagaaccccacattttagtttccttttggggagaaagaggagggccgtggaagaaaaggggtgtgcagctggagcgttattatgtctttctcagcggcaggcatgcccgcctctccaccttctccccgccaggcacaggagccagcagctggagcgtgctctgagtttcaggggaccccccacccagactgactggggcttctgggacttctcataggaagagtcaagacctcctgcgcttctttaaaaggtgatgggctcagtgttcccagtggcatctggaggtgaagccggtactgtctcaggagtggaaggcaatggcccactggcctttttctcccccacgtcacagtccccatttgctggagcccttgagggggccaccgaaactgtggctctcattcagcctcccaaagtgttgcactactgaatactcctttctgtttacaccagcagtgaatagagtcatgaaaagaacatattatatgcaatggcttgatgcttagtgtggcaatcaaaagcttgcctgggcagatgtaggcaggggctagacaatagtcatggagttgtcaccaggtcactgtctctctccttccccttccagatctctactgtcccctgcagccaccacaagggctaagctgttgaatgagccccttggtttttccttataaacgcaatgacttacttgtgattcttggtctaatcccaggctaagaaacaaaacaaaagcttgtgatctgacccattcctttgctgccttccttctctttcaggcacctggacgtatttagtattctgccctgtgccttgcccaggggagggagaagtttctagcaaatgtggctttctgtctgctgcctggtgcttttatagtacttcatctgctttttattgttgttgttgtgttttttaaccaaaatggcatttgtttggctgtcattgtcgagtatatatttattgtgttttacaaacatgagtatatatgtatgtatatgtataaaaccaaacttatatatataagaagtcaaggcatgtatactagatattttaaagagttatttatcaagggaaaaagatgtgtgttataaagtaaacagagtctatattttctatataatgtagatagtcaaacatagcttataaattataggaggttttggttttcttttttattattaaaggaaaaag

SEQ ID NO: 893 - DNA, 3266 bp, Homo sapiens
gaaatctcgcgagggtaggtgcgcgtcggtattttgcgggcaactaactcttccagctgctgtaaattgctgctgcgggagaaactggagccgctgtagccggcgcgcccttcttcccctactgcgaggagccaccgcctctttcgcgctccttatacacctatcactgggagcggtggcagcaacattccctggaccaaccgccgcctcttcaggcggccgctttgccggtcattcccgaagcccggcaactgagggcggccccctttccttaacagtctcctcgctacagatcgtctgctccctcagcctcgcccgagacccacttccccagtctcgcccgggtggaggtcgacgaggaggagacaagagtcacccttcctccaggcggcgccggccccctcacccgcgggtgtgtcctataaatggcgtcggaaagcgacaccgaggaattctatgatgcccctgaagatgtgcacctagggggcggctaccccgtggggtctccaggaaaagttgggctttcaacattcaaggaaacagagaacactgcatacaaagttggaaatgagtcccctgtacaagaattgaaacaagatgtgtctaaaaagattattgaaagtattattgaggagagtcagaaagtactacagcttgaagatgactctttggattccaaaggaaaagaactctctgatcaagctactgccagtcctattgtggctagaacagatctgagcaatatacccggactgttagccatagatcaagtactaccggaagaatcccaaaaggcagagagtcagaatacatttgaagagactgaattagaattaaaaaaatgctttccttctgatgaaacctgtgagaaaccagtagatgaaaccacgaagttaactcaaacaagttcaactgagcagcttaatgtgcttgaaactgaaacagaagtattgaacaaggaagcagtggaagtcaaaggaggtggtgatgttttagagcctgtgtcctcagactccttatctactaaagattttgctgctgtggaagaagtggcccctgccaaacccccaagacaccttactccagagcctgatatagtggctagtacaaagaagcctgttccagcacgcccacctcctccaactaatttcccacctcctagacccccacctccttctcgacctgctccaccaccaagaaaaaggaaaagcgaattggaatttgagactctgaaaactcctgatatagatgttcccaaagagaatattacgtctgattctctcctaaccgcaagcatggcttcagaaagtacggttaaggattctcagccttctcttgatttggcaagtgctaccagtggagataaaatagttactgcccaggaaaatggaaaagcacctgatgggcagactgtagcaggtgaagtgatgggccctcagagacctagatccaactctgggagagagcttactgatgaggaaattttagccagtgtaatgattaagaacctggatactggagaagaaatacctttgagtcttgcagaagagaaactaccaacaggcattaatcctctcactctacacatcatgagaaggacaaaagaatatgtaagtaatgacgcggcacagtcagatgatgaagagaagttacagtctcagccaacagatactgatggtggaaggttaaaacagaaaacgactcaactaaagaagtttcttggaaaatcagtaaagagagcaaagcaccttgctgaggaatatggtgaacgtgccatacacaagaccagttaaattcaaagcagcacacggtttcaaaggaccttatgattttgatcagatcaaagtggtgcaagatcttagtggtgaacatatgggagctgtttggaccatgaaattttctcactgtggccgattacttgcctcagctggacaagacaatgtagtgagaatatgggctttaaaaaatgcttttgactatttcaacaatatgcgaatgaaatacaatactgaaggacgtgtgtccccatcaccctctcaggaaagtctaagttcatcaaaatcggatacagatacaggggtatgcagtggaactgatgaagaccctgatgataaaaacgcaccctttcggcaacggccattttgcaaatataaaggacatactgctgatctccttgatctttcatggtctaaaaactactttcttctttcttcttcaatggataaaacagtcagattatggcacatttctcgaagagaatgcctttgctgttttcaacatatagattttgtcactgccatagcttttcatccaagagatgacaggtattttctaagtgggtctttggatggaaagctccgcctttggaacatacctgacaaaaaagtggctttgtggaatgaagtagatggtcagacaaaattgatcacagctgcaaatttctgtcagaatggcaaatatgcagtgattgggacatatgatggcagatgtattttctatgatacagagcatttgaaataccatacacaaatacatgtccgatctactagagggcgcaacaaggttggaagaaaaattactggcattgagcctttacctggagaaaataagatattggtaacctcaaatgactccagaatcagactatatgatttgagagatttgtcactatccatgaagtataagggttacgtcaatagcagcagccagatcaaagcaagtttcagccatgattttacttacctcgttagtggttcagaagataagtatgtttatatctggagtacctaccatgacctaagcaagtttacttcagtcaggagagatcgtaatgacttctgggaaggtattaaagcccacaatgcagttgttacatcagccatctttgcaccaaacccaagtttgatgttatctttggatgtgcaatctgaaaaatcagaagggaacgagaaaagtgaagatgctgaagttttggatgccacaccttctggtgcagtggctcatgcctgtaatcccagcactttgggaggccgaggcaggcggatcacttgaggtcagcagttcgagaccagtctggccaacatggcgaaaccctgtctctactaagaatacaaaaattagtcaagcgtggtgatatgtgcctgtaatcccagctcctcgggaggctaaagcaggagaatcgcttgaatctgcgaggcagaggttgcggtgaactgagatcccacccctgcactccagcctgggcaacagagcgagactccgtctcc

SEQ ID NO: 894 - DNA, 4066 bp, Homo sapiens
atcttttgttgagtaccagctcgcattgtgccagctaaggctttgggggctttgcatttgttatctctttaagtgctgaagacagtgctgagagttcagcacgattcgccccactttacagatgggaaagtggagacccaaggtcacagaagtggtcgctggcagaagtaggctttgagcctaggtccaatggaccctgaagctgtgtctactccagggaggtagaggctgcaggcccaatacagggtcctctctccctccagccctgagacactggacgtgcggctgggcttcagcctgtgcccagcagagctggagtttctgcagaagcggaaggtcgtggtggccaaggccctgaagcaggtgctgcagctggaggaagacctgcaggaggacgaggtgccgctgatagccatcatggccactgggggtggaacaagatccatgacctccgtgtatggccacctgctggggctgcagaagctgaacctcctggactgtgccagctacatcaccggtctatcaggggccacctggaccatggctaccttgtaccgtgaccctgactggtcctccaaaaacttggagcctgctatctttgaggctcggagacatgtggtaaaggacaagctaccctccctgttcccagaccagctccgcaaattccaggaggagctccggcagcgcagccaggaaggctacagggtcacctttacagatttctggggcctgctgatagagacctgcctgggggacgagagaaatgaatgcaaactgtcagatcagcgtgctcctttgagctgcggccagaaccccctgcccatctacctcaccatcaatgtcaaggatgatgtaagcaaccaggacttcagagagtggttcgagttctccccctacgaggtgggcctgcagaagtatggggccttcatcccctccgagctcttcggctccgagttcttcatggggcggctggtgaagaggatcccggagtctcgaatctgctacatgctaggcctgtggagcagcatcttctccctgaacctgctggatgcctggaacctgtcacacacctcggaggagtttttccacaggtggacaagggagaaagtgcaggacatcgaagacgagccgatcctgcctgaaatccccaaatgtgatgctaacatcctggagaccacggtagtgatcccagggtcatggctgtccaattctttccgagaaatccttacccatcggtccttcgtgtctgagtttcacaacttcctgtctgggctgcagctgcacaccaactacctccagaatggccagttctctaggtggaaagacacagtgctagatggtttcccaaaccagctggccgagtccgcgaaccacctgtgcctgctggacactgcgttctttgtcaactccagctacccgcccctcctcaggccagagcgaaaagccgacctcatcatccacctcaactactgtgctgggtcccagacaaagcccctgaaacaaacctgtgagtactgcactgtgcagaacatccccttccccaaatacgagctgccagatgagaatgaaaatctcaaggaatactacctgatggagaacccccaggaacccgatgcccccatcgtgactttcttcccactcatcaatgacactttccgaaaatacaaggcaccaggtgtagagcgaagccctgaggagctggagcagggccaggtggacatttatggtcccaaaactccctatgccaccaaggagctgacatacacagaggccacctttgacaagctggtgaaactctcagagtataacatcctgaataataaggacactctcctccaggctctgcggctcgcagtggagaagaagaagcgcctgaagggccagtgtccctcctaggccccagggagcctcccctgttctgtgtcagcttctaccatcagaggtgcaggacccctcagggctgaccaggttactacgcagccagctctgctctccggcaatgggtgtgagcaggttggcctgggctttctaacgaaaagtaaaaaattttaaaaagttgagaaagtcagaaagagagggagaggagctctgttggggttttatacccactagagtttcttcaagtgcttccctatagagaaggtggtctcatagccacaggctcccacacatctgtggagaggaaaagcctggggaagaggctgggcccccagaaacctcgactcagaggcagagcccagggctggcagccctcctctctctgtcctctacctcgtgtggcgggcctagggaaatgcacagaaggacctgagaggcactcggcgtttcactggaaaaacacttcaaaatttaaggcaattctagtcttgtgatttttggttttttttagacggagtctcactctgttgcccaggctggagtgcaatggcgcgatctcggctcactgcaacctctgcctcccaggttcaagcaattctcttgcctcagcctcccaagtggccgggattagaggcacccgccaccatgcccagctaattttttgtatttttagtacaggctggtctggaactcctgacctcaggtgatccacctgcctcggcctcccaaagtgctgggattacaggcatgagccaacgcacccggccctagtctcattatttttataggcaattatatttcatgatttttatttttatgaatcggagtattaataggaagcatgaagctagaagatctagatggagccctagaaataagccagtctctgccacaacaaagccaaacaggtggccggtttcagtggctctctccagctacccagagctccagggctggtgatccatgtcatcatgaccagacagccatgcccaagcatccagctccaaacaaatgccaggcaaagcctaagtctatagcccaggttcaccaaatgaggatctgggatggagttcagcaaggtcaggcaggctgtgggtaaatgaggttgggggtcaggcaggcgatgcatccagcgctgcccactccagctgtcggtgctcactgacgaccctgctccaagagcatctctcagcctcttactgcccatctctctggctgcctcatgggattacttatttctaaatgtgattcgtcttatctgtgttgtcaacaccgtgaccagtgcattccaactcttggagagtcacccacagagactgaaactgggaagaattagtgaaaaaggactaggttagccgtcagaggaagaagcccgccctttaagattgcttcctaatgaatctctgggaaaaccctgggacacagagaaacccaaagtcagcaggtctcccttcaggctgggaacataaccaaggaaatgtataaccggagccactgacaggcccaggttgatagaaggtgaaagcagaaaggcaggaagacatgaggtctgcaggaaacccagcaaccctggaaggcggagtcccctttctgggccaccatgctccctaagcagtctttgggttgtgaggaaaccagtggtgacaggtaccaaaagtttagaaaaattggcctccgatgtacatccttgctactcaaagtgcagtggggagctggttggaaatgcggaatctcaggccttagcccagctgtactaaattagaagctgcatttttcaggagattcccatccccaggcgccccccgtgattcctgtgcatattgaagtttgagaggcctggatttacgccactccctcccatgagcttggaacgtatgaatcagtgctcccttgagccactgataaactgagctctggacctgcaaaactggtccccatccaggtaatgctaacctgggacaccagccctcccctccaccagagcaactggctgcctccactttgacatcttttctttctgactgcaacagactctccttccagtatcaaagagtgagccaagcaacagacaggacttgtttatcgtaaggcgaaggcagccatgccttggattcatcaaaagtttgtgaaacgaggtttataaaatcatcatattatttgtgcatggaataaaatggccatgtgggtg

SEQ ID NO: 895 - DNA, 3493 bp, Homo sapiens
agactgagatttctgtggtctcaacttcgctttggtataatttctggcactcaccagcctctatcattatgactttccccccagtgtattatttctctaataggtttccttttcacgttcttttagcacagactggcactttaccctctcaatttggaagttagcccctctcctctgttacttttcccttcacccaactacagctgtgatctagaacattcatagtcatatttctgctactactaccttcatttatcaagactttttatgagaataggtaaaccaagcaataacttcctaggactgaatcaccaccccagaagagcgagaggctcctttcatatgcccgaggccacaccccttaacctgttctgacaaaatagtggctggcccatgtaccagctccattcagaaattcaggaagagaaaagacagccctgttgtcacacaaaccggtgtgggggagggtggagcctggtctgcacggcagtcctggtggcccctgtggaggacaggcagggctggcagcatagcctttgttgccacacaaccggaatttgctcccccaggactgtgggagccagtgtcccagctgaaatctttttagtgtgtggctctgaatggcactcacattccattttggctcacatgaaactaactgaagccctttgttcaagcttcaggctcttaggcatggaaatgagaatgtgactgtggctgtcttacaggaaaattcttgtttgtccctgaatgagagcacagaggcattgaattcacagagctgcaaacttgcctgataaatgagggagtggcagtttatagataggtcatcttttttccttcctccaggtgtccttgcctttcttcccaaagtcattcatttctgatgagtatatgaatccccctcttgctagtaaggttctatttgggctaaaacaaggctgaatttttaaagagtatttgaatatattttagaatcaaattgaggctataaattgcatcaatctggacaattccattgcaggaataatatgttaaaaaccaatggggagaagcacccacatctctcctgtagcactccgtgtctcataagcaatttgaagacacttacaagtaactgattccagtcaaattaggattaactgactcaaaaaatggtgtcaagtttctttaatgtttttatgttagaagtgagtttaacagacttgaagaaaactgttatcttttcctgctgtgagtttacacaaatgattccagagcagaatgaaagcagaaagctgttggttacaatattcttttaacctctctgcagcattttacacttactgggaaccttatgattcaccgtaagagtgggaatatacctgagttcgtgtcctaatggtctctaattcacattggatcgtgggcaaatcacctcacctctctgagcctgttccctcctcttagaccatctctaagaccacttcatctatttacacatcatttgcttgaacattgctgaacatctgcgtgaacttggcctctccagcccttgcaggtggaaacagctgtgtcaaggctcaaggctcacgctgaggggacttggagggagggggcttctgcattaagctttcctggtgaagacccttgatcttgtccaaagccctgtgtctttgactggcttctcttcagagtccccgttgtcatcgtaagacccttgctgtttggagggtggtcttgtgactgtggcagctgctggccgctggaatgaggagcctatctccatcctccagtgtgactcaggcagagcattgagaattcccagggcagaaatccttcctgctcaggctttcattctaaaactacagtcttcattaaagctgaactttctgggtagctgagcttatatgcccggcatctgaatgagagctctctttgtaactgtgtgacttgagatctagtttgccagctcctgggaaacaatacatgtgttcttgtttgtgtttgctcagcaagcagatgtctgagatgtaagaagcttttcttttcctgtggcattgattctgacttagagctgatgtaaagatcactgaaacatcacgtcaagttgaagtcactcataggtctttgtcctttaggcaggacaggagagtcattaagaagcatttcactgtagcattctatcacaatatcatctggaattgttttctttgcccagaaagccttaacttgcctctagagaatccctggtattacaacgatattgcggcattagaattccaactcttctgctgtggaagtttgaagcgaagctgcagcaaaaccagagaatttcctcaagtggcctgtgggctccttgttatcttatgcccccacccctccctcaacaatatgagtgatccagaactggcccaaacacctcagctctggtccctttttgcccttcttggccttactctgttgttcaaagccactttggattgcttggatgcttcgaacagccatgaaaagtagcctgcctgtggcatttagaggccaagcaattgacagaaagggtttcttctacctctgttatctaagcagagggaagtaaacttctcaccgccccccacccctcactgcccccgattacactagaattgctttcgccaaattgtagttgaagctaaggaaggggaatctggcccctgctgggagagggaactggaatgccacacaaggcaaggcctgcttccttccttcccctctgctgctgctgcctcggaacgctgcagcccaggcttcctcccacagtggcccttggaagcaggccgcagagtagacagctgctccttttggaagagtcagtcccctgtgttttctgaactgtttttcctagcatgtatgtgggtagagctttcatgcatctctagtaataataagctgaaattagttttttttttaattctccaatttaaaacttttaattaaaaagtaaattttaatgtcgaaaatgcaaacttggggagggcagaaagatcacacacaaggctgtcacttcatacttgcaggattgcacagcagccgggcagaggcgctcctcacttcccagatggggcggcgggcagcagagacgcacctcacttcctagacagtgcggcagccaggcacaggcacacctcacttcccagacagttgggcggccaggcaagcgctcctcacttcccagatggggcggctcgcgggaagcggggctcctcacttcccagacagggtggccaggcagaggtgctcctcacttcccagaacaattctttatgaatttgataaaggactgaagtgcaactgaaagctgctagtgatgatctggtaatatacaatttgtccagtagccagtttgtttttattgtgttttctaaccataagagatcattaaaggcaaagcctgtatgacgctgtacacacacaaaaaaatggtcaccgcaggccatactaccaatgaaatggtaggtaaacaaatcttctggtcaag

SEQ ID NO: 896 - DNA, 2885 bp, Homo sapiens
gttgtcgtgatgattccgcggccagcggatcgctgcgagtggccttgaaggcagctgctgcaggtgaagagtaggcggcggggcagagagcggcctccgagggtcacctgaatggttgagcatggaccctgttgctacccacagctgccatctgctccagcaactgcatgagcagcgaatccaaggcctgctttgtgactgtatgttggtggtaaaaggagtctgctttaaagcgcataagaatgtcctggcagcattcagccagtattttaggagcctctttcagaattcttcaagccagaagaatgatgtttttcacttggatgttaaaaatgtcagtggcatagggcagatcctggacttcatgtacacttctcatctagatcttaaccaggacaatatacaagtaatgctggacacagcacagtgtttgcaagttcaaaatgttctgagtctgtgtcacacatttttaaaatcagccactgtagtacagccacctggcatgccttgtaatagtacattgtctctacaaagcaccctgaccccagatgccacttgtgttatcagtgaaaactacccccctcatttactgcaggaatgttcagcagatgcacagcagaacaaaacgttggatgaatcgcatccgcatgcttcaccatcagttaatcgtcatcactccgcaggtgaaatctcaaaacaagctcctgatacttcagatggcagctgcacagaactgcctttcaaacagccaaattactattacaaactcagaaacttttacagtaagcagtaccataaacacgcagctggtcccagtcaggagagagttgttgagcagccttttgctttcagcacctctacagaccttaccacggtagagagccagccttgtgccgtcagtcattctgaatgcatcctggagtctcccgagcacttaccttccaacttcctggcccagcctgtgaatgactctgccccacatcctgagtcagacgccacatgccaacaacctgtcaagcagatgaggctcaaaaaggccattcatctgaagaagctcaatttcctgaagtcacagaaatacgcagagcaagtatctgaacccaagtcagatgatggtttgacaaagaggttggaatctgctagtaaaaataccctagagaaagctagcagccaaagtgctgaagaaaaagaaagtgaagaagtcgtcagttgtgagaattttaattgcattagtgagacggagaggcctgaagacccggctgccctggaagaccagtcccagacacttcagtcccagagacaatacgcgtgtgaattatgcgggaaaccttttaaacacccaagcaacttggagcttcacaaacggtctcatacaggtgagaaaccttttgaatgtaacatttgtgggaaacatttctctcaggcaggtaacttgcagactcacttacgacggcattctggtgaagaaccatacatctgcgagatctgtggaaagaggtttgcagcctctggcgacgtccagcgtcacattattattcactcaggagaaaaaccacacttgtgtgacatctgtggtcgagggtttagtaacttcagtaatttgaaggagcacaaaaagacacacacggctgataaaatcttcacctgtgatgagtgtggaaagtcttttaatatgcaaaggaagttagtaaagcacagaattcggcacacgggggagcggccttacagctgctctgcctgcgggaaatgtttcgggggatcaggtgacctccgcaggcatgtccgcactcacactggggagaagccgtacacatgtgagatctgtaacaagtgctttacccgctctgcggtgctccggcggcacaagaagatgcactgcaaagctggtgacgagagcccagatgtgctggaggagctcagccaagccatcgagacctccgacctcgagaaatctcagagctcagactctttctcccaagacacgtctgtgacgctgatgccagtgtcggttaaactccctgtccacccagtggaaaattctgtggcagaatttgatagccactctggcggctcctattgtaagttacggtccatgatccaacctcatggagttagtgaccaggagaagctgagtttggatcctggtaaacttgccaagccccagatgcagcagacacagcctcaggcctatgcttactcggatgtggacaccccagccggtggcgaaccactgcaggccgatggcatggccatgatccgttcctctctggctgctttggacaaccacggcggtgaccccctgggcagtcgagcatcttccaccacttataggaactcagagggtcagtttttctccagcatgactctctgggggctagcgatgaagacgctgcagaatgaaaacgagttagaccagtgatgtaccgcgcttctccacggtagaggcgtgttctcagtttagcaggctggtgttaaggctgtaggaggacccagtttccccatgacagtgccttctaactagccagagaataggtagcttccctcctgatgatggctcataatctgaagcatcttgagctgggggtgtgagggggagggcctgctggctcaccgtgaggcagccgcgggagggagcgctgacgtcacagaagcgaaggcttgatgctgtctcagcagcctcagctgtgggggggaagcgcgtgtgcatcgtgtcaactactgtacatgttggtcatgtgaaaggaattatatatgtatagtattacaagtatttttgcatttttacaagattgaaatttgtagcattttgtattatttacacagaatttatttgtatatgaaactcataccataatttaattcgaataaatgaaacttttctatat

SEQ ID NO: 897 - DNA, 3655 bp, Homo sapiens
tcctccttcatgtttttaatacagccactttgactgtaaacaattaaatgtatgtgttcactgttactgaatttactgtctcaacacttaaggttaatgtggattattttgggtctgatatttcaagtagtactaactgccatcctatatactagtttgttttttcagggacgcttacctctcttccaaattttataagtatttattttgcttatttaccaaatccccatgaaaaaaaaaagtcttaattagatgatctgttgcatagttctattactaaagctctaacctaaagtaagtagttatatatacttggaccttacatttcagtatctttcaaaaactgatctagacttttacaactatgataaattggactcattaagtaaatacatgagtcagtttaatttagcatggcattctgcgtaccttcccacataaaataatatcactcagctctattgttgatggtcttacttaacatttctctctctcaggcattgtcttgggaccacttgcacctccacctcctccaccactcccaccagggcctgcacaggcttcagtagccctccctcctcccccagggccccctccacctcctccactcccatccaccgggcctccaccgccccctcctccccctcctctccctaatcaagtaccccctcctcctccaccacctcctgccccacccctccctgcatctggattctttttggcatccatgtcagaagacaatcgccctttaactggacttgcagctgcaattgccggagcaaaacttaggaaagtgtcacggatggaggatacctctttcccaagtggagggaatgctattggtgtgaactccgcctcatctaaaacagatacaggccgtggaaatggaccccttcctttagggggtagtggtttaatggaagaaatgagtgccctgctggccaggaggagaagaattgctgaaaagggatcaacaatagaaacagaacaaaaagaggacaaaggtgaagattcagagcctgtaacttctaaggcctcttcaacaagtacacctgaaccaacaagaaaaccttgggaaagaacaaatacaatgaatggcagcaagtcacctgttatctccagacgggattctccaaggaaaaatcagattgtttttgacaacaggtcctatgattcattacacagaccaaaatccacacccttatcacagcccagtgccaatggagtccagacggaaggacttgactatgacaggctgaagcaggacattttagatgaaatgagaaaagaattaacaaagctaaaagaagagctcattgatgcaatcaggcagggactgagcaagtcaaatactgcatagagggacagactaaggagagataggactttaatctggaggaaaaatatcctacaaacaacaactgttcacaacagcaaacccctacatttatgagctgtaagaagaaaatggagacaaacagaaggagggaaaaaccaacctactctgaaagccttcagacattatgactctggtgataagctctttccctctccgtttgctgcttttttctggcctttacaacagaatggaagagaatcatttaagagttcctgtaacagttatgcagaaaatactaaaacccatcaggcaagatcaccacgcattgaaatattttcatatcaagataaagtcgcacattttccacaatacattgctaaaataaagaggagaaaggcttaggaagtttttttgcagagagtgctggtaaagaattgagcaagtttgctattgtattgtaatgtttctctcaggtttgttcttcctatcatgtttgatattccatgaataattgagatcagccctatgtaagttaagatcataatatgtggaacaaatggaattgtaagtgctttcaaagggtaatatttataagaaagtgtccgaaaaatgtttcttcagcttgaggaattttagaatgataggaagtttctcgagttagccttcatgcaattttgtagattaaaacataaaatttgtccagaacttaaagatttagatgccttcctaaattgttacaatgctttaccaaatctatgacttctacataacacaaaccagtggtcaaatgtaaacactatattgtagatttactgtaggttttcaacctttttagatttatgcatgtggacatttttataatgtaattacaatcaccacaaggttagcttttttaattgcagacagtaatgcatgtcacactaatatgtagtggccttttcaaggcctagtcccagggaaaacattttgtagagtataggggagtgggaggaaggggaggaataattttttatttaaagttgatttctgcactatctttttctcagttacctgcatgaataaataatgagaaatattttgtgactttaattggtaaatatgttacaaaaccaagtacttaatcttttacatcatgtcttcagctatttgtattttaaccagtaatttcaatggtctgaaacatgattctgagcttcacataatatcttaactgtggaactcaaaagtttgatcactgaatttggcagttattattacctaggtacccccgctgttacacaggtgtttagatacgtgttcctgaatgaagctgcttttgaattttgttatgttgaaatgcaagaaataacaatgatggcagcaattaaggtcacagaaatcattaggtaaaggaaaaccaatgaggagttctgcagttttcttttaataagtaaagtgagacttgggtggtgggaagaaggaaggtgggaagaaggaattagacactctgcctgccactctgcgtgtgtgtgctctcgcgcacgtgctgtctatatggaagccactcccttttctttcctttgaaactggtaaggttaaaataggggagaaatcctacatgttggaatgatagctttttggaaaatttaagaaacactccaggctctccatcttgatttatgcttgagttgttatgtgccatatttgctttgaactctgattatcagaagttttactaaaactttgaaataattcactttcatctgctttctagattttgtacatctcagtccataaagcaaagcttgttgatagtgtagttttctaaacgctgcaaatttgcagcctttaccactacaaagaagtttggatgagggatttttttttttctttgtcaaaatagttcctgtttctgtagaaatttcatttttagattaaactgtgatggatgagctatcataattcaagtatacatttcttttttctatcagatattcattgtcatgcagtagtagtaaaaacatcaaagatgcagcaagcttattaagtattattttctaaaagaaataggaggcattttcatctttattattgtacttttggttatgcaaacactttgataatataaacagttatgtcccctataaatctggtcagcaacctcttttgattttgttgggtaagttaaatagtctgtagtaggtagagtactgggtacaagtggtccaaactaagataagagactaaaataaaatgctaaatcttaaaagaaactgggtttatgcactaaacgttttgtgccttggtctaatattaacatgatgtatgtgtaaactg

SEQ ID NO: 898 - DNA, 2630 bp, Homo sapiens
cttcttcccccgctggccccctccccggagggataatatggtctccggcgatggacgccccaaaagcaggatacgcctttgagtaccttattgaaacattaaatgacagttcacataagaagttcttcgatgtatctaaacttggcaccaagtatgagatatagatcagctatcaggaagggacttctgccattcaaagaaaatgacaggaagtaacactgaggaaatagactcaagaatccgagatgcaggtaatgatagtgccagcactgctcctaggagcactgaggagtctctttctgaagatgtgttcacagaatcagaactttcccctatacgagaggagcttgtatcttcagatgaactgcgacaagataaatcttctggtgcgtcatcagaatctgtgcaaactgtcaatcaggctgaagtagaaagtctgacagtcaaatcagaatctactggtactcctggtcacttaagatctgatactgaacattctacaaatgaagttgggactttatgtcataaaactgatttaaataatcttgaaatggccattaaggaagatcagattgcagataactttcaaggaatatcaggtcctaaagaagacagcacaagtataaaaggtaattcagaccaggattcttttcttcatgagaattcgttacaccaagaagagagtcaaaaagaaaatatgccttgtggggaaacagcagaatttaaacaaaagcaaagtgtaacaaaggaaaacaaggaaaggagcaaaatcaggactcacagacagaggcagaagagctacgcaaactttggaaaacccatactatgcaacaaactaaacagcaaagggaaaatattcaacaagtgtcacaaaaagaagctaagcataaaattacatctgctgatggacacatagaaagttctgcacttttaaaagaaaagcaaaggcatcgattacataagttcttgtgtctcagagttggaaaaccaatgaggaaaacgtttgtatctcaagcaagtgctacaatgcaacagtatgcacagagagataagaaacatgaatattggtttgctgtgccacaagaaaggacagatcacttgtatgccttcttcattcagtggagtccagaaatatatgcagaagatactggcgaatataccagagaacctggatttatagtagtaaaaaagattgaggagtctgaaacaattgaggattctagtaatcaagcagcagccagagaatgggagcttaccaagcatcttccaccaagaacaattggctatccatggactcttgtttatggtactggaaaacatggcacaagcttgaaaactctttatcgaacaatgacaggtttagacaccccagtgctgatggtgattaaagacagtgatggacaggtttttggtgcgttagcatctgagccactgaaagtgagtgatggcttttatggtactggagagacctttgtttttacattctgtccggagtttgaggtctttaagtggacaggagataatatgttttttatcaaaggagacatggattcactagctttcggtggtggaggaggagaatttgcgctttggcttgatggagatctctaccatggaagaagccattcttgtaaaacgtttgggaatcgtacactttctaagaaggaagatttctttatccaagatattgaaatctgggcttttgaataaataaaatgctctctgtcttagcaggagaatggcccaaacctgacatggacaagcattgtttggaaagttcaagaagcaatacagtgtaacatgtcacttgtgctttaaaattagtctgtatcaccatttattacagttataattttggagtttatttttcaaatcatgtcttgtcccagagttctttaggttaacactagggactgcgtccatgtactagtataacagcttgggtttgttagaatttgggcaacattttgattataatgacaacttcattttcacatgttagtcagttccctaataggatggtgctcttttgttgaacctgtattgattttttttttttttaactatattgattcgtttactagaacagtctaattggggcattgaggaaatgaagactggatacttctgtatctgtgaagttggcacaggtaacatttggacatgttcatcttattcttaggaaggaaaaaatcacttgccaaaataatacatacttcatagaccactgagttctagtttttattcacactacaacattctctttaacgatgttgcaggtattctcaatttccttttaagaaaaatgaaatgtgaggagaattctggttgtaatagatgacagtacatatgatctgcaggtttgggcgtatgctttcatcattaaattatctgataaagttacaagtcacaaaggagaatgagaacttaatgattctattggatttaatatattagcaagaaaacatgctatttacatatgtgtagcttagtaaggcattaacataagtacaaaaactatgaaacagatgcatatttcctcaacatactgtgtcaggtatactgttttataatttggttgttttagccttattgcacaccaactcccaaaatataggttactcttgttc

SEQ ID NO: 899 - DNA, 1287 bp, Homo sapiens
gacatctccgtttccctccctcagccccttccccccctacccccccgccccggcctcctttccccttcacgaagccggctctggggcgcgctcacccctgtgaggaggccggaggtcggactcaggaggctccttctccactcccggaagatcatgtaccagcccagccggggtgcggcccggcgtctcggcccttgcctgcgcgcctaccaggctcgaccccaggaccagctttatccagggactctaccattcccacccctttggccccactccacgacaaccacttccccatcttctcctctattctggtctcccctgcccccacgccttcccacccagcgtcttccccaggttcccccactacctctccctcagatccaggccctcagctcagcatgggtggttctccctccaggaaagggggaggagggaccaggacctgagttgcatagcggctgcctggatgggcttagaagcctttttgagggacctccctgcccctatcctggggcttggatacctttccaagtccctggaactgcccacccttcccctgccaccccgtcaggagatcctagtatggaggaacatctgtctgtcatgtatgagagactgagacaagagcttcccaagctcttccttcagtcccacgactacagtctgtattccttggatgtggaattcatcaatgagatcctcaacatacgtagcaagggccggacatggtacattctttcactgaccctctgccgtttcctggcctggaattattttgcacaccttcgtttggaggttttacagctgacccgccaccctgagaactggaccctgcaagcccggtggcggcttgtggggctgcccgtccacttgctctttttgcggttctacaagcgtgacaaagacgagcattaccggacctatgatgcctactccactttctacctgaattccagtggcctcatttgtcgccatcgtctagataaactgatgccttcaccctcacctccaacgcctgtgaagaagctgctagtgggagccctggtggccctggggctgtcagagccagaacctgacttaaacctgtgttccaagccctgatccttgaccttggagtggaggcagcactgaagactgctacgcccaagagaaggaggtggaggcagccaagaatctcaggagccagcttcctctcctcgtttctctccttccttcctttccatctcatgctgtgtaaagctgctgtgtaatttaacttgtaaataataaagtttaactgactatatg

SEQ ID NO: 900 - DNA, 2376 bp, Homo sapiens
acagagagctcaggtagcctgcctagatggcggcgcgcaccctgggccgcggcgtcgggaggctgctgggcagcctgcgagggctctcggggcagcccgcgcggccgccgtgcggggtgagcgcgccgcgcagggcggcctcgggaccctcgggcagcgctcccgcagttgcagcagcagcagcacagccaggctcgtatcccgcgctgagtgcacaggcagcccgggagccggccgccttctgggggcctctggcgcgggacactctcgtgtgggacaccccctaccacaccgtctgggactgcgacttcagcactggcaagatcggctggttcctgggaggccagttaaatgtctctgtcaactgcttggaccagcatgttcggaagtcccccgagagcgttgctttgatctgggagcgcgatgagcctggaacggaagtgaggatcacctacagggaactactggagaccacgtgccgcctggccaacacgctgaagaggcatggagtccaccgtggggaccgtgttgccatctacatgcccgtgtccccattggctgtggcagcaatgctggcctgtgccaggatcggagctgtccacacagtcatctttgctggcttcagtgcagagtccttggctgggaggatcaatgatgccaagtgcaaggtggttatcaccttcaaccaaggactccggggtgggcgcgtggtggagctgaagataatagtggatgaggctgtgaagcactgccccaccgtgcagcatgtcctggtggctcacaggacagacaacaaggtccacatgggggatctggacgtcccgctggagcaggaaatggccaaggaggaccctgtttgcgccccagagagcatgggcagtgaggacatgctcttcatgctgtacacctcagggagcaccggaatgcccaagggcatcgtccatacccaggcaggctacctgctctatgccgccctgactcacaagcttgtgtttgaccaccagccaggtgacatctttggctgtgtggccgacatcggttggattacaggacacagctacgtggtgtatgggcctctctgcaatggtgccaccagcgtcctttttgagagcaccccagtttatcccaatgctggtcggtactgggagacagtagagaggttgaagatcaatcagttctatggcgccccaacggctgtccggctgttgctgaaatacggtgatgcctgggtgaagaagtatgatcgctcctccctgcggaccctggggtcagtgggagagcccatcaactgtgaggcctgggagtggcttcacagggtggtgggggacagcaggtgcacgctggtggacacctggtggcagacagaaacaggtggcatctgcatcgcaccacggccctcggaagaaggggcggaaatcctccctgccatggcgatgaggcccttctttggcatcgtccccgtcctcatggatgagaagggcagcgtcgtggagggcagcaacgtctccggggccctgtgcatctcccaggcctggccgggcatggccaggaccatctatggcgaccaccagcgatttgtggacgcctacttcaaggcctacccaggctattacttcactggagacggggcttaccgaactgagggcggctattaccagatcacagggcggatggatgatgtcatcaacatactccaaatagttgggttcttcagggaagctattagaaactcaggtgacttgttagagcactaacttggtcagagccaaatcctggcaaacgctgcctgaccttcactctgtggttggggcagtgagaaccactgaggtccaatgatgagacttggaggtctggatccagtctctctttgttttaatgtgacttaggtgctgtcaacattagcaagataatggaaatcacgacgccagtgggtgcttacctccctgctaggcatgcaggggctggcggttggcaggggaaggaggcccagtgagccgggtcccttaggggagggagagtttgtcctctttgccccacagtctacccttcagggccttgtggcagtgccagtgttcggggggtgtctgggccactgagtacccactcggtcgtggttgtgctggcctcttgggtgagtgaacctgtgaagcccaggaggtggtgttggctgcagggtacacaaatactgagtggtggtcttttgttacaggcttagcaacaaagctgtgccctgggcatggggggctgtagtgtagctacagttgtgcgtttgtgaaatggcttagctttccatgttgctgagaggaacctggacatggtcccgggcatctgaatgatctgtaggggagggagttcaaataaagctttattttgttc

SEQ ID NO: 901 - DNA, 3199 bp, Homo sapiens
ctttcctggggggcaagcacctcccaccccatttccactttcctgcgggggcaagcaccttcttttcaagggcctgtttcccttgcctccataactgttgtgagtattgacagccaggcttctaaacctcttaaaactccccaactctggtgccaacttggacaacattctttaatgaactcctttttagttatcccacctgcccagctcgcttattagttcaaaacattgtaactaaattatctgcttccctgactattcctgggttaaagccacacctcactactgccttttgccccagttcaatgcctcctgcacatcctctccttgcatctccccaccttaatccacaagtgtaggacacctctactccctccttggcgatggatgatgcaccccttaccatcctattaaaatctaatcacccttaccctgctcagtgccaatatcccatcccacagcacgctttaaaaggattaaagcctgttatcacttgcctgttacagcatggccttttaaagcctataaactctccttacaattcccccattttacctgtccaaaaactggacaagtctcacaggttagttcaggatctgcgtttatcaaccaaattgtcttgcctatccaccccatggtgccaaagccatatactctcctatcctcagtacctccctccacaacccctccataacccattattctgttctggatctcaaacatgctttctttactattccttgcacccttcatcccagcctctctttgctttcacttggactgaccctgacacccatcaggctcagcaaattacctgggctgtactgccacaaggcttcacggacagcccccattacttcagtcaagcccaaatttcttcctcatccattacctatctcgacatagttcttcatgaaaacacacgtgctctccctgctgattgtgtctggctaatctcccaaaccccaaccccttctacaaaacaacaactcctttccttcctaggcatggttggatactttcacctttagatacctggttttgccatcctaataaaaccattatataaactcacaaaaccaaacctagctgaccccatagatcctaaatcctttcaccactcctctttctgttccttaaaaacagccctagaggctgcccccacactagctctccctaactcatcccaacccttttcattacacacagccaaagtacagggctgtgcagtcaaaattcttacacaagagctgggactgcaccctgtagcctttctgtccaaacaacttgaccttactctttttggctggcccccacccccatgaccgtatctctctgatccacctgacattcactccatttccccgtatttccttctttcatgttcctcaccctgatcacacttggtttattgatggcagttccaccaggcctaaccgccactcaccagcaaaggcaggctatgctatagtatcttccatatctatcactgaggctaccactctgccctcctccactacctctcagcaagccaaattcattgccttaactcgaacactcactcttgcaaaggaattatgcatcaatatttatacagactgtaaatatgccttccatatcctgcaccaccatgctgttatatgggctgaaagaggtttcctcactatgcaagggtcctccatcattaatgcctctttaataaaaactcttctcaaggccgctttacttcccaagaaagctggagtcatacactgcaagggccactaaaagacatcagatcccattgctcagggcaacgcttatgctgataaggtagctaaagaagcacctagtgttccaacttctgtccctcatggccagtttttctccttctaattggtcactcctatttactctcctactgaagtttccacctatcaatctcttcccgcacaaggcaaattgttcttggaccaaggaaaatatctccttccagcctcacatgcccattctattctgttgtcatttcataacctcttccacggtaggttacaagccgttagtctgcctcttcaaacctctcatttcctttccatcgtgaatatctatccccagtcctccactcttgactccctcttggagtggatagatgatctttgctgacaggacacattccaacactttcaccctgatgaagtcctattctttacttttatactcactcttattcttgttcccattcttattgccaccctctacctctccccagctatctccaccacactatcaatttcactcactctctcctagctatttctaatccttctttaacaaacaattgctggctttgcatttctctttcctccaaaatcaccaaggcctcaatttactcactgctgaaaagggaggactctgtatatttttaaatgaagagtgttgtttttaccttaatcaatctggcctggtatatgacaacataaaaaaactcaaggatagagccccaaaactcgtcaactaagaatataattatgctgaacccccttgggcactctctaattggatgtcctgggttctcccaattcttagtcctttaatacttgtttttctccttctcttattcagaagttgtgtctgtcatttagtttctcaattcatacaaaaccacattcaggccatcaccaataattctatatgacaaatgctccttctaacaactccacaatatcaccccttaccccaaaatatttcttcagtttaatctctcccactctaggttctcacaccaccccaatcccacttggagcagccctgagaaacattgcccattatctctccataccaccccaaaaatttttgccacaccaacacttcaccactattttgttttgtttttcttattaatacatgaagacaggaatgtcaggcctctgaacccaagctaagccatcatatcccctgtgacctgcatttatacatccagatggcctgaaccaaatgaagatccacaaaagaagtaaaaatagccttaactgatgacattccaccattgtcatctgccctaccctaactgagaagatatattctcccccgcccttaagaaggtactttgtatgcctatcccaaacctataagaacttgataatcccagcgccctttgatgactcttttttctgactcagcccacctgtacccaggtgaaataaacagccttgttgctcac

SEQ ID NO: 902 - DNA, 2869 bp, Homo sapiens
tttctaccagacagatacaacagacagaaataacctcaagagcacagacactagtgaataattaggaagtggtgaagtttatttgcctttgtctttaatataatctatttaactatgtttatataacttaattgttaataatgtctgtaataaccggcccacaaatttcctgaaagtgtgacaatctgctctcatacgctgctggaccagttccagcacgccactgttcctgccccagttgtgggatctgctctaacctccagctgccccacgcctcagcatacagtcacagcgaaggcatggtgggcaaacttctgagttacatggccacagcggttttttgtttgcttgtttgtttttgtatgtttgtttgtttagagacagtttgctctgtcccccaggctggagtgcagtggcgtaatcgtggctcactgcagcctcaaactcctgggatcaggagatcttcccacctcagcttcccgaggggctgggactacaggcacataccaacacacccagttaatgtttttaatttttttttaagacagagtctcactctgtcgcccaggctggagtgcagtggcacgatctctgctcactgcaagctccgcctcccaggttcatgccattctcctgcctcagcctcccagctagctgggactacaggtgcccatcaccacgcctggctaattttttgtatttttagtagagacggggattcaccatgttagctagaatagtcacgatctcctgacctcatgatccgcccgcctcggcctcccaaagtgctgggattacaggcgtgagccaccgtgcccagccaattttttaaaattttttgaggccaggaacagcagctcctgcctgtaatcccagcactttgggaggccgaagcaggaggatctcctgagcctaggagttcaagacctgcctgggcgatatggggagaccccatttctacaaaaaatttaaaaattagcagggtgtggtggtgcgtgcctgtggtcccagctactcgggaggctggggtgggaggattacctgaactgggaggtgaaggtttcagtgagctgagatcacaccactgcactccaatctgggtgagagaccttgcttcaaaaaaaaaattgagctcctgggctcaagcaatcctcctgccttggcctcccaaagcactgggacttttacaggcaccaccagttattacagaactcaaaagcaactgtgcactggaccactctgtattgtgttcggtgaggccatgcccgcgtatagatacaggaatgctgaggaacagcactgaagagtgacctaaacagcaatcaccaactgctggtgtttggctttgttcctcatatgaaaggatttgaagcccagggagtaggctggttgaatgaaaaatatttgcttgacacgatagttgctatttctagatgaattcagggaactatgggagcctctcacaagcatgaaaaatccaagtattcagatggaagttggggctcttattttccagcttgggcctgtaccagggctacaaggacatacaatgctaaatcaattaaaaaccaaaatctactcaaaaccatttatttcaaaaaagttctggagatggatggtggcgatggttacacagcaatgtgaatgtgcttaatgtcactgaactgtacgcttaaaaatggttaggatggtaaagttttttttttttttccttagggggatcctttatttcattcacttcctccttacaaggtgaaatttcaatctgtacaggttgtgtctgccagttcagtccacagctcagagtatcaccttgtcctcattccatggtataagctgttgtggggggacaggtctgagggtcgtggattcactggactggatgggacatgatccagaactccactccgtttggcttcccaaggatcccaccacctcattctaatcagtgatcattgaggaaatgcattgtattcctattcactatttcaaagatcaggcctacctcattggcatattaagaaagttttctcaagtatatttagtgtttatcattttactatagttcttcaaatgtctgacattcatcctttccctacctctacattcctttctttttcacattatctttcttgattgctttttaatagaaaaacaaacaaagacatggatttactgtgcatattagcagatccatactggaaaatgcatggaggtttcatatacaccacttacaggtttccaaagccacaatttccttcatatgttcaaactcttcaggatgcagaaaggcagtgaactcctccggagtagctgtcaggtcaccattgaggtctgcagctttgaatcttctctcatcacgtggcagcatctttttaaaggtgtgatgatctgaagaatcatgaaactctgcggggtttcctaggttttcagctcctcagtagtgacaaagccatacccatcattgtcgattcgatcaacaatcttccctagcctctccttgctctcgtccggggtgagctcgtcgaagttcttggagtcctccttgcccaggaaggcctcgtggtcgtactggaagctctggttgtcctcagggggccgctcgcccagctccgagtcgggccgcaccacgcgctctttgcgcaccgtgggcttggcccgcagaacccgcggcgccagcaccagcgccagcagcagccccagggctaaccccaggcggccaccgcgcgccatcgtcccgaggagagggcggccgggagggagacgctgagcgagcgacaacagcggcagctcgggaatgggggctcggagcgcggcggccaagttttatgttatgtatattttacaagtaaaaaaattttttcacctc

SEQ ID NO: 903 - DNA, 2941 bp, Homo sapiens
atcattgaggaaaaaggttatctgcctgaacagatctttaatgcaggtgaaagtgctctattctgcagcgggggttgggggtggggaagccacaaaggacatttttttagtaaggaagagcaccaagcaccaaaatttaaggcagggatgggtaagctaagtttactgttttgtgcaaatgcagagaggggtttatgatcgggactgtctttacctataaagccgctgacccctaagccttgaggggaaaagataaacaccaactgctattttgattgtacaacaagaaggcctagacaaagagaactcttcctggtttggttccaccaatgctttgtccctgaagtcaggaagtaccttgccagtaaaggaccttcttttaaagttcttttgatattggacaatgcctgtggccacccagaacctcatgagttcaacactgaaggcatggaggtggtctgcttgcctccagataacatctctaattcagcctccagatcagggtacgataaagacctttaagactcattatacatggtactcaatggaaaggattgtcagtgctatggaagagaaccctgatagaacatcatgaaagtctagaaagattacaccattgaagatgcccttgttgttacagaaaaagccatgaaagccatcaaatacaaaataataaatttctgctggagaaaactccagatgttgcacatgacttcacaggatttatgacagagctaatcaaggaaatcatgagattgtggatatggcaaaaaaaaaaaagggtgatgaaggattacaaggtgtggctcttggacaaattcaagaggtattaagcaccacactagaagtattaacagaagataacttgatggagatgagtgcttccaaaccagcgccacatgatgaggaagacaaggaagcagtgccagaaaacaagttgactttacacagtctggcagagtgattgggattattcaagactgattttgacttcttttacagtatggacccttctgtgatatgggcactaaaactaaagcataaggtagaagaagaattggtactatatggaaacattctcaaagaaatgaaaaaggaaaaatgtcagaaaagtacaatgttttttggtaaagttaaaccaagtgtgcctgcttctcttccctctccttccacctcctccacctctgagactgcaagaccaacccctcctcttcctccttctcagcctgttccaaatgtgagatgacaaagatgaagacctttatgatgatccacttctacttaatgaacagatcattttacttctccagatgaatatgatgaccctactgtgctctatgaagccatagtatctcatgagaagaacctcgtaatagcccatgaaggggaccctgcatggcggagtgcagtacttgccaactctccctccttgcttgctctgcggcatgtcatggatgatggcaccaatgaatataaaatcatcatgctcaacagacgctacctgagcttcagggtcattaaagtgaataaggaatgtgtccgaggtctttgggcagggcaacagcaggagcttgtttttctacgtaaccgtaacccagagagaggtagcatccaaaatgcaaagcaagccctgaggaacatgataaactcatcttgtgatcaacctattggctacccaatctttgtctcacccctgacaacttcttactctgacagccacgaacagcttaaagacattcttgggggtcctatcagcttgggaaatatcaggaacttcatagtgtcaacctggcacaggcttaggaaaggttgcggagctggatgtaacagtggtggcaatattgaagattctgatactggaggtgggacttcctgcactggtaacaatgcaacaactgccaacaatccccacagcaacgtgacccagggaagcattggaaatcctgggcagggatcaggaactggactccacccacctgtcacatcttatcctccaacactaggcactagccacagctctcactctgtgcagtcgggcctggtcagacagtctcctgcccgggcctcagtagccagccagtcttcctactgctatagcagccggcattcatccctccggatgtccaccactgggtttgtgccttgtcggcgctcttctactagtcagatatcgcttcgaaacttgccatcatccatccaatcccgactgtcgatggtgaaccaaatggaaccctcaggtcagagcggcctggcctgtgtgcagcacggcctgccttcctccagcagctccagccaaagcatcccagcctgcaaacatcacactctcgtgggctttcttgcgacagagggaggtcagagcagtgccactgatgcacagccaggcaacaccttaagtcctgccaacaattcacactccagaaaggcagaagtgatttacagagtccaaattgtggatcccagtcaaattctggaagggatcaacctgtctaaaaggaaagagctacagtggcctgatgaaggaatccggttaaaagctgggagaaatagctggaaagactggagtccgcaggagggcatggaaggccatgtgattcaccgatgggtgccttgcagcagagatccaggtaccagatcccacatcgacaaggcagtgcttctggtccagattgatgataaatatgtgactgtaattgaaactggggtactagaacttggggctgaagtgtgagccagtgtttattataaagacatttctttttccctctcaattccaaggcattggaaaaagagaggaacaagcagaagatgcctgcaggtatcactttgatcctatgtgggagcgactgaaaatagaatgagcttggttaagcacctctcctttgcccttcaccctgactcctgtcactgtctccatccccaaataaagctgaaatattttttt

SEQ ID NO: 904 - DNA, 2873 bp, Homo sapiens
acaaagacttcaagggcaaagcacagaaacaagtgcagttcaacccaggccagaccagggccacatggcgagtgcggatcctgagtgatggggagcatgagcagtctgaaacctttcaggtggtactctcagagcccgtgctggctgccttggaattccccacagtcgccactgttgagatcgttgatccaggagatgagccaactgtgtttattccccagtccaaatactccgttgaagaagatgttggtgagctgttcattcccatcaggaggagcggagatgtgagccaggagttgatggtggtctgttatacccaacaaggaacagcaactggaactgtgccgacttccgtgttgtcttactctgattacatatccaggcctgaggaccacaccagtgttgtccgctttgacaaagatgaacgggagaaactgtgtcggatagtcataattgatgactctttgtacgaggaggaggaaaccttccatgtccttctgagcatgcccatggggggaagaatcggatcagagttcccaggggctcaagttacaatcgttcctgacaaagatgatgaacccatcttttacttcggtgatgtggaatactctgtggatgagagtgctggctatgtggaagtgcaggtgtggagaacgggcactgacctgtccaagtcttctagtgtcacagtgaggtctcggaaaacagatcctccctctgcagatgctggaacagactatgtgggcatcagccgtaatttagattttgcacctggagtcaacatgcagcctgttcgtgttgtcattctggatgaccttggacaaccagcgctggagggaattgagaaatttgaactggtgcttcgcatgcctatgaacgcagcccttggcaagcccagcaaaaccacagtgtccataaatgactctgtctccgatttgcctaagatgcaattcaaagaacgaatatatactggcagcgaaagtgatgggcagatagttacaatgatccataggactggggatgtccagtacagatcttcagtgagatgctacacccggcaggggtctgcacaggtgatgatggactttgaagaacgcccaaacactgatacctccatcatcacattcctccctggtgagacagaaaagccctgcattcttgagctgatggacgatgtgctctatgaggaggtagaggagctccgcctggtactcggcactccacaaagcaactctccctttggggctgcagttggtgaacaaaatgaaactctcataaggatccgagatgatgctgataagactgttattaaatttggagaaaccaaatttagtgtcactgaacccaaagaacctggagagtcggtggttataagaattccagtgattcgccaaggagacacttcaaaggtttccattgtgagagtccacaccaaggatggctcggccacctctggagaagactaccaccctgtgtcagaagaaattgagtttaaggaaggggaaacccagcacgtggttgaaatcgaagttatctttgacggggtgagagagatgagagaggccttcactgttcacctaaaacctgatgaaaatatgatagcagagatgcagttgacgaaagccattgtgtacatagaagaaatgagcagcatggcagatgtcacttttccttctgtccctcaaattgtatccctgttgatgtatgacgacacttccaaagctaaggagagtgctgaacccatgtctggctatcctgtcatctgtatcacagcttgcaaccccaaatattcagactacgataaaacaggctctatctgtgcaagtgagaacatcaatgacactttgacgcggtaccggtggctgattagtgcacctgcgggccctgacggtgtgaccagccctatgagagaagtggacttcgacaccttttttacgtcatccaagatggtcacactggactccatatactttcagcctggctcccgggtacagtgcgcagctcgtgctgtgaacaccaatggggatgaaggcctggagctcatgagccctattgtaaccatcagcagagaagaaggtccttgtcagccccgtgtacctggggttgttggagcagagccgttctcagctaaattgcgctacacaggccctgaggatgcagactacacaaaccttatcaagctcactgtcacaatgccacacatagatggcatgctccccgtgatctccactagagagctttccaactttgagctcaccctcagccctgatggcacaagagttggaaaccacaagtgctccaacctcctggattatactgaagtgaagactcattatggtttcttgactgatgctaccaaaaatccagaaataattggagagacatatccttaccagtacagcttgtccatcagaggttccactaccttgcgcttctaccggaacctgaacctagaggcctgtttatggaagttcgttagctactatgacatgtcagaactccttgctgactgtggtggcaccattggaacagatggacaggtacagatttataacatctgagtttggtcactggataaaccaattggtttgttttgtcacatagatttgtactaagtcccaactccagttttccatcttggtgttgtaggtaattattgacagcaagggaccagacaactggcatggatggtgtgaaaatccgtgtctatttcttaacaatgggccagaatatacgtagtttttgacaatgggctagaaacattatatctatgtgaaaaggatgctgtataattattgccttaagctcaaaatctactctgatattataaaaatccaaatactgacttctcttcaaagtaaaaaaaaaaaaag

SEQ ID NO: 905 - DNA, 3740 bp, Homo sapiens
tttgagggtggcgggcttgaggcgggcaggctgcttagttgcggcccgaggcgcctaagtggggatgaccaacccgtgggcgttggcgctgacccctaggcgccgctggtggccccgcgcgcggccctccggccagccccgcccctctcggggctcctccttggtccccgcgccatggcgcgtccgcgttgaccgctgtcttccctttcgggctgtgctgatcgcgaacgctgcgcagtccgtggtggcgtcgaggcacctttctcgtgcctttacctgtgttcactcctttgctttaaaaaacagccctagaagtacacatcgttggccccgaaggagccccagcagccatgtcggaccgcgaggtgaccttggagggcgggaggacggacgaggggcctggcggagctagactgagagggcgccgccggcgtcctgaaggccctgctccccgaatgtgtgggagtgtgtctgacggtgcgagggtggctgtggcggggcctgagcagcgtgtccgtgtcccgatgccgcccgcctgttactgagttaggcaggagtgcccgagtctggcgaacttcagcagttctcgttccagagctccacacgaggttggccaaagctttgcgggacttacatacccttcttcctccgcccagtcctgcttccttccccttcctttcacgggtgttgataccatgtcaacatcctcgtaccccaaactcagtcgcagcgtctgcttctggagaaaccattctgcagcattaaagctggtgagaagatgggattcgaggctgcatcactcaccagtggtgaagtaggagggtgaactagtgaaatggaatccacgagtgggtgaagtatcagacatttcatatatggtgaacgtagtagatgaaaggaaggaaagggggattggatagctattgcttagtgccaaccgagactcttaagaatagtggtcagctgaaggcaagcaacaaacagttgtaagccagtgaatctgtcccgttacatatagagaagcttcatttactgcagcaggtcaaagacaagaaccaggcccaggaattaacatccctgtttgactgaactccaaaaatagcaaaacacccaaacaaggcaatactcttccactaagtttggatccctgctaagaaaagatgaggctgggcacagtggctcacgcctgtaatcccagcactttgggaggccggggcgggaagattgcttgagttcaggagttcgagaccagcttgggcaacatgacgaaaccccatctctgctgaaagcacaaaaaattagccgggcatggtggccacggctgtggtcccagctgcttgggaggctaaggtgggtggatcgcctgggccctggaagtcagggctgtagtgagctgtgactgcactccagcctgggcaacaggagtgagactctgtcttttaaaaaaaaaaaagaaagaaaagaaaagcccgtcatacatgggttggagatacctgggtagatgccttcaaaggttttgactccccaaactgccttaaacctttttttcgtagacagtgtctcactctgttgcccaggctggagtgcagttgctggatcatggcccactgtagcctcaacttcctgggctcaaacgatcctcccacctgagcctcctaagtaactgggactacaggtatgtgtcaccacacctggatacattttttattacttgtagaggcaaggtcttgctatgttgcccgggcttgtctcaaacttctaggctccagtgagccatcacacctggcctgccttgaacctgaagcctgccggggtggctcacctctcctattaacctgacactactcctcctccctccacttactgctcagtagatgtataattatggttgtttcttttgcattattcagctggaaacaatgagatagaaaagagaatatagctccctccccctcagaagaactgcgttattagtttgctggggcttcagtaacaaactgggcagacatttattgtctcccagttctggaggctagaagtctgagatcaaagttttcacagggttggttccttctggggctgggagggagaatctgtctcatgcctctctcccagcttctggtggtttgctggcagtctttggttccttggcttatagaggcattgtcccagtcctgcctttatattcacatggtgatcttgttgtgtgtgtctctccagacgaaggcataagtaacatcattgacaaaggtcattcgacatgggcctctttttagaaggacaccagtcatactgattagggcccactctaatgagcgcatcttaacttgtctacaaagacccatttccaaataatgtcacattcacattgaccaggggttagggcttcagcatcttttgagagggacacacttcagcccataacaagctgtaccacccagccaacatgtactgacaggagctgggaaagtttggggctggattatgagggtgcttgatgaagggagctggaatgtaaacctgcatagatgtgtttattgaaatacgtgatttaacaccttggcaaagagtggctgcagacttcctgcaaggatggctcctagaatggcggtatagctactgctgcctaacaaattactccacacttcgtggcttaaaacaagaatcatttcttatctctaggttactgtgggtcagacatagtggggatcggtgatctctctaggttactgtgggtcagacatagtggggattggttatctctcttccacaatgtctgaggcctcagctggagcagttcagaggctagaggttggaatgagtgaaggttcatctgctcgaatgtctgacagctgatactggagattggctgcagcccagattggggatgtcagccagcacacccctacacggccggtccctgtggccgaggctttctcacaatatgatggctggattccaagggcaatctaaagacaaaggacaaaagaaagctgtatcctttttgtgaaccagcctcagaagttgcataccatcacttcggctacttcctatttggaagaaatgagtcactaaattacccatattcaaaaggagaggaattaggcttcatcttctaaagggaagaatatcaaaaaatttgccagtatatttttaaaacaccacacttggaaaaagccatgggccatggtaagcaaaattgaaatggcaaaattgctatggcagacagtggtggaagggagtaaaaggttcaggggtgtgggcatgttgaaatttatatactccgtgcatctagaagacatttgagacgatcatattccacatgaaggtgtaaataacacgtcatttataaagatcattagacataggatgatgaaaggggcactgatgtcactaaaatattcagtgatggctcatctctgtaggcaagaatgacaatagaaaggctgttccagaacttggctgggtgatagcactggggatgataggatcctaagacaaaagaggccattctgggacatagtggggaccaaagaaaaaaacccaagaagccaaaggcaacacttagctggcagaagtcagaggattgcaattatagcagccagcagggtctgagtggcagccaaggggacctcacttgtatggttatagaactggtcaataaacatggcatccctggaggcaaaacaggtgggcagctaagaagggtactactcagctggcaaaaaaaaaaaaaaaag

SEQ ID NO: 906 - DNA, 5075 bp, Homo sapiens
gtgtacgggcccgcgggccacggccatgcagcccctggaggtaggtctggttcccgctccagctggggagccgagactgacccgctggctgcggagaggcagtgggatcttggcgcacctggtagctttgggcttcaccatctttctgacagcgctgtcccggccaggaaccaaaacaggtcccctgatggaggatagaagtgaaggaggccgggcgcggtgggtcatgcctgaaatcccagcactttgggaggccgacgcgggtggatcacttgaggtcttttctcctggcaccctgtattcatggccttggcggatgtatgagagcacctcctttttctcaggcctccaagccagacatgaggcttactggctctctcctatgttcacagttctgcctctgcatggctgaagccatcctactcttctcacctgaacactccctgtttttcttctgctcccgaaaagcacggatccggctccactgggcagggcagaccctagccatcctctgtgcagctctgggcctgggcttcatcatctccagcaggacccgcagtgagctgcctcatctggtgtcctggcacagctgggtgggagccctgacactgctggccactgctgtccaggcactgtgtgggctctgcctcctttgtccccgggcagccagggtctcaagggtggctcgcctcaagctctaccatctgacatgtggactggtggtctacctgatggctacagtaacggtgcttctgggcatgtactcagtatggttccaggcccagatcaaaggtgcggcctggtacctgtgcctggcactgcccgtctatccagccctggtgatcatgcaccagatttccagatcctacttgccgaggaagaaaatggaaatgtgagttcctgcgaacgctgaatctaggtgggacgcttgccttgaacatcatggttcctttggtgatctataagggatctatttaagaagtggtcaggttttcgcacttcttggctggtccagggactgcagaaaccaaagctgctattgttgaggaataattcagtgggtcaaaatggggagatgtactgggtatgagtggaaggtgatggagagcctgatcctgaagcccctacttgatgagagacagagttttgggtggtgatagtgatgtgctggtggtcatttcttgcttgtgtgcctgatgaaaaactgggttcctgtaagttatgaatggcatccagggatatttgggttacttttaagaaagcagtgtgatgtagtggagagagcccatgggtcttatttatgggatatggtcctcttaggctctgttgtacaaccttaggtacattccatatcttaagaccactgtttcttcatctgtgaaatgtttctaaacaatctctaagtcccttccttctctaatatacagcgtctgtcaggtcgatgtctcagaacactctcccagctgtggaccacgtggaccacttagcagactcagggggtagttctttactctccctttactaccctggagggacagctctgcccttgaggcccttcagaaatttgtgctgatttggtccctgtgccagggcacagggggtcaggcactgtggaaagaagggactcaggtgagggtcttctggactctaagacggtaaaggcactaaagtcactttaaagcttttggagaagcaggagggcattggcttaaccaagccgaaggctgctggctgggctgcctagcccagctaagatcttccttcagcccacctcaggatccgggcttgagggctgcagggcctgcgtgcgctccctcccccgaaatcacttctcagggcaaaggagccccaggcatctcatgctttgcccttcttagggctcaggttcttgccttagcacatagcttctgggagcttttttgaagcatttcataagggccaaggaagtggggcagggcttttctgatccaaagaaaacaaagtttctctggttacccctcttcccttgttatctaagctttcctcagttgtcatctcttcccagctctttggtccaagagggggctgagtttggtgccagctggcaaatgagggctggactctcttccctccagagaccaccccgctccttgctgcagctgaaagtagttccccaggctgccctcggtggtgaggactggatgctagactgctgagctgtggtctgggctcagttgagaagataggatctccctagatcatggcaaggcctgacaacagctgagccaggaaagtgctgctgaggcaagtcgacatagctcacagggaactctgggaagcctgggatgtaggcgctggagctccagttcccaggagcaggggcaggtgttcctagatgttagtgttgtggatgtccttggtcttctgaagattcaggtcctcctctccgggtagcttagaagtaaggaggttggtttgattcaatagtatggggacagaatggggacagcaagggcagaagtgtcctctccacgtaactcattatgcccctcctgggggagattgcatctccaggacaagcatctaaaggaggcccctgctgtgcagaggggtattgttcctgtctctttcattgtcctccctcctctcaaactctccagtgtggtgtgaactcagaagaaacggttactggggctgcatggagaatttcacctgtggtgattttgatccagggactgcatctcctctttcctcatcacagccagtgctgagaggctccttctacctgccgcagggtaggagggccaggcaaagttcaccagcttgctctaagagcaagcaggcaatgccgtaaagcctgagcctgcctgaggtgctgcctcctcccaggtggtgcgggggctggtgggcgggcgggcaggcgtgctgacagccggcagtttgcgtgggctgtgccatctgatgtctattcccagccctgggaggaagggggagtcatttatattctgcaggaggaaggggccccagctgtcgcctttctgaccagcaggcctggagggcaggggcacagagcagaggagggcactggtggtctcctgcttagcctggtctgactgcagtgtagggaataggtcaccatgaggagcccttcatcctggcaggccggattgtggagggacttccctccccctcttttccatttctccctccatcaccacctgccctcacatcctggggcagcagctggacagccattagacctcagtgccagggcactcttcctccagctgggatctcagtggctcccagctgcatgggctcctgcttgtgtgttccctcctccgccatcctctgttccccgcacctcccttattctgctcatgtctggggtattcacttggctcctcagcaaggaagcaaacgccttggaggagaagcacatggttgcccttttgtccttgctccctggctagggaaagctgctagtggtcagcctgttttgcctttttttaaaaaaaaaaaaaaagccagggcagggtgcttagattttaaaaatttgcgtgtcatttgcacaaattttcatatcaagctaagtcctgattccaaatttgattatattccaaatttgattatattccaaatttgattatattcagattcaaccttgaggacattagaaatatagatggcttctgtatccaaatctgaatggaaatgagattacccttctgggttcagatacccctcccgagcccccgtcttttctgtaaccacccctcctctgagccccatcatggctggggttggtatggaatgggagcagctctgtatctggggaagtcctccagcctcaccttcttggctcttaagtggtaggctgttaccacttgccagcctgggcctcctctctccccaccctttcacaaggcaggctgcccttccgcactcactggcccatcccttctttctcatcgtcccacccttccacccccgtgcatggctgctgtaggtctggtttttttggtttttgttttttttaagacggagtctcactctgccgccaggctggagtgcagtggcagaatcttggctcactgcaacctctgcctcccaggttcaagcgattctcctgcctcagcctcccgagtagctgggactacaggcacgtgccaccatatccagctaatttttgtatttttagtagagatggggtttcaccatgttggccaggatctcttgacctcgtgatctgcccgcctcggcctcccaaagtgctgtgattacaggcgtgagccaccgtgcctagccaggtcttgttttgaaaacctcactgtgggagattcaggcatcctccctaagccagctggccgctgtgctaaagcctgttcagagttaataataatcattagctgaatggtgctggggcctttcagcttcagatctctaagcacttgcaggctgagtcagtcagccctcaccttccccctccttcctgggctgcagagtgtaacagaatgggaaggcactgtgggaaggaagtcaggaatcttgctgctagccacgccttgcagtgacttctcgtctgggagtgggcactgagtcctctcagtaaactaataagacttgcacctgacaaaggtcaagatatgtagggaacacagtgtatgctaggctgagacctatggtggtggcaggggtggctgttgagcctgaacttccagtactcctgcccttccttctgtttacctggcttggcctacagggggcacccctggtcttgatgcctcaagcccagcatttctgggtcccctctgcaagctcagagagcagggaggcttctggtagtgctcttgatgctcctgtgtctggttggcacaaagatcctgtgtaacatgaaatgaaaggtgcatcagcttgggggctgggaaacctgcagtatgggtttactccgtccctatcactggtgtggctgtgggcaaaccacttattgcctgacctacctcacagggatgttgtgagggtttgatgagagaatgaatgttaataggaattggaaaattcaaagcattaaacacatgtaaacaggtggtattatt

SEQ ID NO: 907 - DNA, 3070 bp, Homo sapiens
gggccacagggtgccggtcacagctgctggctcaggctgcctgggtggaggcagcttcggtaatgagtccatgtgtggctgaactgcggccggtcagctctactcacaggcactgaactgtgaatttcatgtaatttccacatcgtgagacagtcttgttttgatccctttctagctatttaaaagtcataaaaacaattctcagctcaaaagcagcagcaaaacaggcggcggcacgtgtacgcggtgggaccaccagccaggaagaggagcgaggctggcgcaggccacagcgcggatgcgcctgaggacgcacctgaggacgtcacgctcagtgagagacgccagacacagaaggctgcgcaccgtgagatcccatttctatgaaatgtccaggacaggccaatccacaaagacagggaggggatgcgtgggtgccagggccagggatgggacaggcagtgatggctgatggggacaggacttcctgtaggggagacagagtgctccgctctgacagcggtgatgactgcgctgcctgacctgtgctgagtccctcagtgagttcacggaatacaaaagaacaaatcccagccctgctgcttagggcttgcggggagcaggcaacagagatgctctgagacccaggtgcaaaggcttcgggggctgagacggtctctgtggcttctctctccacgctgcctgccccacccctcaagcttcgccgccttgggccacaacttgccaccttaggttagggctctctgacccggtggtgatctctgccatctgatcctgctccgcagtgtctggtgacactgagaagggtgaagggggagctgtgtgtccccagcagaggccagcccaccctccctgcctgggactcccctccactgccctgcaggctcctgcagccgaggcccagcagcagctccacctctgcgctcactgaggggcgtcccgcagccaccccctccctgctctccttcttacccgtcatctttcaggtgcttcctccagacaccaacccacagcccttacggtgctgccctctgcacgcccacgccaatctcaggaagcaggcaccaccaatctcgggaagcaggcaccaccaatctcgggaagcaggcaccccgggcattattctgcctgcctgtctcctcccaaggcagggccgagagcccgtccacggctgctccacacacaccgagggccgccctgtgcggtggtgcagggggagggtctgcaaactacgacccccaggtgaacctgcccgccgctcctctctgtaagtcagagtctcgctggcccaccaccacactcgcccgctcaggcgctgaccagggtggctctcctgctctgctggcatagctcagtggttgtgacagagaccatctgggctgcaaagctaaagatatttgccgtctggccttctacagagaaggtctgcccgcctgcatacaagcttccgtccacctccacaggcttcagcttccacctccacggctccctctctctttgctcaagtccctcccctgcaaaatgaaactcacctataagatggggtcagatgcagatgttcaggtccttggcaccagcctgaccagtgagcccgccctcctcacggggagagatgtgagcactgaggtaggtaggtctctaacatggagccaaggtgcccctcctctggagtgtgggctagggcctgtgactctgacgggacaagatgtcactcctgcgcttaggttatgtggcaaagacaaggaactttgcagctgtaattagagcccctgaatcagctgactgagccaatcaagagagaaacaccctgggtgggcctgactgcatcaggtgagcccttcagggaccaaaccctttctgctttttgtgtgtgtgtgtgtgtgtgtgtgtgtgtgtgtgtgtgtgtgtgtgtgtgtttgagatggagtcttgctctgtcgcccaggctggaatgcagtgtgaccagcaagagcggccgctcactcatgtccttccatgtccggagtcagcatggtgtagactgagaaaacattttattcatattcctttttctttttgttttgagacggagtcttgccctatcgccaggctggagtgcggtggcacaatctcgcctctggggttcaagcaattctcctgcctcagccccccgagtagctgggactacaagcgtgcgccaccatgcccggctaactctttgcatctcagtagagacagggtttcaccacgtaggccaggatggtcttgatctcctgacctcctgatctgcctgcctcggcctcccaaagtgtcaagattaaaggcatgagccactgtgcctggcctcctttttctcttttgagactgggccttgctctgtggcccaggctggagtgcagtggtgcggtcatagctcactgcagcctcaaaccctagggtgaagccaccctcctgcttcagactcccaaattgctgggattacacacgtgagccgccccgtccggctggggcactgtgatttttaataactctcatgccacccagttgtctacaatccagggacaaagaggtttgggtccccgtcttacaaaaaaaagaaaccaaagatccaagaggctattgaataagtgacgtgttgtctgactgcttacttcctgctgagagctgcctcaattacattacatgcctgtaaccattcattctcaccaccccctgtgaagtgggtggagttaccagccccatttgacaaatgaggaaacggaggctaggagaaggcagctcacttgcccagtcaaaaatgctaggctgggcatggtggctcatgcctgaaatcttgacactttgggaggccgaggcaggcagatcaggaggtcaggagatcaagaccatcctggcctacgtggtgaaaccctgtctctactgagatgcaaagagttagccgggcatggtggcgcacgcttgtagtcccagctactcggggggctgaggcaggagaattgcttgaaccccagaggcgagattgtgccaccgcactccagcctggcgatagggcaagactccgtctcaaaac

SEQ ID NO: 908 - DNA, 3683 bp, Homo sapiens
ttgcggttatgacagacccgggttaaaaatcacagctgtgccatttgctttgatattttgagcaaggtagctaaattttctgagcttctattttctcatctgtaaaatgaggatacgtacctgttcttttttttctttctttttatttcttttagagatagggtctcgctttgttgcccaggctggagtgcactggcatgatcatggctcactgcagcctcaaattcccgggctcaggcaatcctcccgcctcggcctccccattagctgggactgcagggccatgccatcatgcccagctaatttaaacatagttttcagagatggagctcactatgttgcccaggctggtcttgaattcttggtctcaagcaatcctcccactgcagccttccaaagtgctgggcgtacaggcgcaagccactgtgcccagctgtcagacgctgagttttaattatgcaccaaactccagcccgcagatcctcttcaccaaagcccctggctggtctagcccatcatgacttctctaggaacagtccttctttaggactataaagtattaacaaaagtctgtagattaaggagcctgcataaagaattctggatacaggcccctgtctttccaaagttcctctccaatatcccttggggtcctcatgtttttgaagcagcttcactctgcacaggcagcaggaggttgggggagccatagctctgggccacgggggcagatttatttggatgataggactaatatttgtgtaacctgctgagacctgtgtgggagagtttagggtggtttttcttttggtgaggggatttgctctggtttcacatccattaacacaaaacatgagctagtcagggcccttgtggtctgcggtaaggggatgcctgtggagaaatgggcctgagtgagtcaggccaagagaatgtcttccttcagaatggagtcaactggataactgatgagccaatggtgggattaaggagggggaaatgggaggggaagagaacagctgacatcttgaggaaagctttggggtagtggagaggtaagggggtcatggtcagtctgaactcaacaatagggctgaatgaatttaccaaaggaagttgccttatattatatgccaggctgctggggaaagcctcaggtcctggccagcccctgttctcacaagaacatgcaggttaccacataaataatggcatatgccttccataggacgtcaacctgacttaaatctacctataccctactctctattctttggtttttggttctcatccctgtggaaggaaatgggcctcttctggcatctcatgctactctgtgcttttccttgggctccaaattctagctcataaagatgcaagttttgcaatttcctataaatggttaagaaaagaacaagctgtccagagagtgagaagtttgaaaagagaggtgcataagagagaaatgatgtccatttgagccccaccacggaggttatgtggtcccaaaaggaatgatggccaagcaattaatttttcctcctagttcttagcttgcttctgcattgattggctttacacaactggcatttagtctgcattacacaaatagacactaatttatttggaacaagcagcaaaatgagaactttatttggtgcagtcagggctccatttagttccctcactctgcttctaatcaccccttctcccagccctcttctatttgatagaggtctgtccctcagatcagcaatgtcttagcccctctcctctcttccattccttcctgttggtactcatttcttctaacttttaataaacatttaggtataatacattacagtaagtgctatttagatacaaacttaaaacatactatatattttaaggatctaagaatcctttagagaaggcacatgactgaagtacctcagctgcgcagcctgtagccagtttttttaatgtaaaagtaagaatgccagccttaacctagccctgcagataaaagctaacttttattagtaccagccctgaataatggcactaatccacactcttccttagagtgatgctggaaaaataaaatcaggggcttcagattaaaaaaaaaaacaaaaaacaaaaaacaaaaacaaacattgcctggccctgagggtctgtttgcaaaacttcttgtagatctaatttctgaacactcactgcttcatttctattcctcctgttgcagggagtaatttcttctcctttgtctcacttcccttatcaagaacaccaaccagtaagtctttgccaaattctcagacccactcaggacacgagtctctacatggcttaacagaagagagataattaggatttttttttttcctcagtctttctgaggtttttatttaaatgcactcagtggtcatagggcagaagctcaagctagctggggcgaagggaggacgccagggagagtatgtttctcatccctgggaggcattcagcctagctcctgcagccaaattacagcaccagagaacaatgtgatgcattcctgggcaggtcggtgggaccctgggcgcctgggccttgtggagagaggtgccagacacagagttctccgtaagcaatcctgcagagccgccccctgggtgcagaaatgaaatacgggagagcttcacattacacagagacctgtagctcacacctggttattgatggccttggtggaggcctctgccccgaccctccacttgggaactgcctgctactacgggggttgggcatctttgaagcaatgttggataacaagaaagagatgcttccttttcactctttgccctccctgtcagcctgagcacaaccatgaggttacacacacacacacagaggtgtacatatacagacacatagagaacttctctcaggctgcataggagttctgctcatcctcctctccccaacaattaaaaaaaaaaagcaattagatttcgatccagtacttcaaaaaggataccaatagggtctggctttaatcaaggaatatctacaaagtcacattaccaacctgcaggcaactctttggtttggggaccagaactcctctggtgggtggttgggggaaggatgcaggaagggcatggtgaggagagatcattgattggctttacacaactggcatttagtctgcattacacaaatagacactaatttatttggaacaagcagcaaaatgagaactttatttggtgcagtcagggctccatttagttccctcactctgcttctaatcaccccttctcccagccctcttctatttgatagaggtctgtccctcagatcagcaatgtcttagcccctctcctctcttccattccttcctgttggtactcatttcttctaacttttaataaacatttaggtataatacactacagtaagtgctatttagatacaaacttaaaacatactatatattttaaggatctaagaatcctttagagaaggcacatgactgaagtacctcagctgcgcagcctgtagccagtttttttaatgtaaaagtaagaatgccagccttaacctagccctgcagataaaagctaacttttattaataccagccctgaataatggcactaatccacactcttccttagagtgatgctggaaaaataaaatcaggggcttcagatt

SEQ ID NO: 909 - DNA, 4505 bp, Homo sapiens
gagactagggagtctgtccgccattgtggacccgagaagcagagagcgagagggggaagaggagcgtgcaagcggaaaagacgggcctcttcctccgactcccgagcgcgaggccctcattttgggttctcagcgaacggcggcagcggcggcggctggaacaatcactcggccaagggcgacagccaactgctgtgagtgcacggggagaggcccaggcagcggcggcggcggcggctctcgggttgcggtgaagaatgtcagccactagcgtggatcagagacctaaagggcaaggaaataaagtttcagtacaaaacggttcgattcatcaaaaagatgctgtaaatgatgatgattttgagccatacttaagtagccagacaaatcagagtaacagctatccaccaatgtcagatccatacatgcctagttactatgctccatccattggatttccatattctcttggggaagcagcgtggtccacagctggagaccagcctatgccatatctgacaacctatggacaaatgagtaatggagaacatcactatataccagatggtgtatttagtcaacctggggcattaggaaatacccctccatttcttggtcaacatggatttaacttttttcctggtaatgctgatttctctacatgggggacaagtggatctcagggacaatcaacacaaagttctgcttatagtagcagttatggctatccacctagttctcttgggagagctattactgatggacaggctggatttggcaatgatactttgagtaaggtgcctggcattagcagtattgagcaaggcatgactggactgaaaattggtggtgacctgacagctgcagtgacaaaaactgtaggtacagctttgagcagcagtggtatgactagcattgcaaccaatagtgtgcccccagttagcagtgcagcacctaaaccaacctcctgggctgccattgccagaaagcctgccaaacctcaaccgaaacttaaacccaagggcaatgtgggaattgggggttctgctgtaccaccacctcctataaaacacaacatgaatattggaacttgggatgaaaaagggtcagtggtaaaggctccaccaacccaaccagttctgcctcctcaaactataatccagcagcctcagccattaattcaaccaccaccattggtgcaaagccaactgcctcaacagcagcctcaaccaccacaaccacagcagcaacaaggacctcagccacaggcccagcctcaccaagtgcagcctcaacagcagcagctgcagaatcgctgggtagctcctcgtaacaggggagcaggcttcaaccagaacaatggagcgggcagtgaaaactttggtttaggtgttgtacctgtcagtgcttcaccttctagtgtagaagtgcatcccgtgctggaaaagctaaaggccataaacaactataatcccaaagactttgattggaatctgaagaatggacgtgtgtttataattaaaagctactctgaggatgacatacatcgttccattaaatactctatctggtgtagtactgagcatggtaataagcgtttggatgcagcttaccgttccctgaatgggaaaggcccactctatttactcttcagtgtgaatggcagtggacatttttgtggagtggctgaaatgaagtctgttgtggactataatgcgtatgctggtgtctggtctcaggataagtggaagggcaaatttgaagttaaatggatctttgtcaaagatgttcccaataaccaattacggcatattcgcttagaaaataatgacaacaaaccggttaccaattcaagggacactcaagaggtacccctagaaaaagctaagcaagtgcttaaaataattgctactttcaagcataccacctcaatctttgatgactttgcacattatgaaaagcgtcaagaagaggaggaagccatgcgtagggagagaaatagaaacaaacaataaccgtatgaagatgtcctgttaaatttacaacactaacgatgtagactctggaaatgcctaataagtcaaagaagacgtattaaagctcttttctgcttaaggtgacatctttgaacactttaacacaaagttgactcttctcgtaatggttttcatcagcgcatctgcccttatactcttcaccaaacacacttgagaactgtaacttcgtcaagcactttctgtcctgaagcttttaccagtatctgctgtcttttgtaattatgcatcctagctaaggcacagaagactgaatgaatgcaaggattcattaactctttgaatttgttaaatactaacagttaaccattagaagtggttcaatgatgtaagagtcacactgcttcaactttttctttgttgtagtttttaaattgtcgatttttagctatttgacagattaaaagcaaaataatcatgccatatttagtcctggagttcaagtctaaatgttgatgtgaaaaattattgtagtaaacttttaatatggcaaagcaaccttaagctctattttagccaaatgaaacataatctgaaattatattagaacatttcccttgtcttcaaactgtttggtgtaacagaatattgatatgcagcttggtggatttcaccagttaatgcacattcttcttccctcctccccccattaatatgtatactgaaaaatgtgcatttgtctgaggaattattttgtttgctaccacttaatgaatctcaaaattttgagtaaatgtacctcagtctaatcagactttttatgacctttataactacatttaaaacccttaattcctatttctgggtgtttgcgagcctgattgctatcatgaagtaaaaatttattactctaggtattcactagctaaataaacatagttcttgtttagcaagcatatgttgttcctcagctcttttctccagcttttgcagtgtcctggcatccttaaaatactttgaaaatatggccttgatccatggattaaatcagtatctaagtgaatgtgttgatgttttattgatcagatctatataagtgggaatacagcatatatctggatattcttatagttatctttttaacatcttatttttttcattaattacatatcaacattaattttgtatcttgaagcaaattgattttgtataattaaatgtgtcaagcatctgtattaattgatttgatggcataaggttatgaaaataatgtactgccccatgtattactgttccaaaaggagaaagctatgtagaaagatacattaagggtgaaaatagcaatacagtagatttgaataccttgatgttttgcattacttcatttatgtttacatcatgtttagaaatgttttcatttactgtggtctttggtcacttcagctcaaagacctagtgatggatatttctttgaggctttcatttatataattttattttgtacaatgttttttttaaatgtgcaaatactgtattcaagtgaaaaaaatacagtatttgtagataaccatagctactacacagttcttcggtagtcccagtgtagttatatcagtgtttactgaagggaacatcaaaatattaatggtatattataaaataaagactttcttaaaggaaaattgcacctattttacctttttaagagtaagccatgaaatcttgtaacatgtctcttaactatttataatgaaaagtggcatttgggtatagtcaccacagcaatgttctacatccctaagattatctaggtaggacatgtcaaagatgactgttgtcattctggaggtcctattagagaatattataaaagggtgaccttgtaggaaggatctgagtcctccccctgaggttctctttttcttggtgctttattagcaactctggatatttttataaaactagttacattataaacggtttcaaacatgtttaatttacattaggtttttatgtaagagtgtcatggaagcactcagcaagcaggctgattgcaatagactcagacatgcgaataaatgtaattgagagtctattcatggtgaggagtacatcccagtgcctttaacctggatttctaatcttaagtgaaatgggtgcagcattcctttggaaaaaaaaatctttttattttcaagtgataattttgtgtttttctcatataagttttctccagagcacccaccttctcttccttcttggtctgtcattatattgcaaaatatttttcctctgaatgaaattatcacaggttgtctcaagcacaaccaactgaatgtctcttaactgtggggaccaaaagggagagagcctggggtctacaagaggagacacatcatcaaatgtttgaatgatcacaaattaagacattatcagcccagtaaatttcttgcttaatgtttttccaagttctggcttgaatatttcttattaaagctatcttatgtgggt

SEQ ID NO: 910 - DNA, 4728 bp, Homo sapiens
gtcatttgggcctagaattttctttaaaggaaggtttttgataacaatttcttacatagatatagggctatgcagattttctattttacttgtgtctgttttactaagttgtatttattacggaatttgccatttcacttaagttttttattgttggcatgaaattgttgataatagttttttgttatccctttaatgtctgtagaatttgtggtaatgtctccactttcattcctgatattggtgatctgtgttttctttttctgtcttttaaaatcactctacctagaggtttgtcagtttcatggatttgtttcaaagacccagcttttggtttcattggtttttctgttttagatttcattaatttcaggtcttttttatatccttccttctgtttactttggggtttacttggttcttcctttactataaagaaaatattgataaatttgactccataaattgttttttaaagttgcatggcaaaagccactgtggacaaagtcaaaatatagctatcaaatagctgtgataaaatacttacaacatatatcagagggctggtatgcctgatatataacaacctcttaaaaattaagggataaaggaccaaaacctgatggaaaagttaaaggaaagttatcaacagacaattcacacagaaaagatcaggaaatgttcctcaaacatattaaaaaatgtggaactcatacttgagaaacattaattaaaataacactgagataccatttctcattcatcaaaactggcacaaaattttaaatttgtattttattttagttttgagacagggtctcgctctgtcactcaggctggagtgcagtggcatgatcacggctcactgcagccttgacttcccaggctcaagtgatcttcccacctcagcctcctgagtagttgggactacaggtgtgtgccaccatgcctggctaatttttgtattttttgtacaattttggtttcactatgttgcccaggctggtctcaaacttggactcaagcaaccttcccgcaaacgaaaaatttaaaagtctggctacacattctgttgatgaggctgtggagaatcaggcactcctgcaaatgttctttttcagtgttttctggatttcttctgtgtttgtgttttttcaatatatttttagctattcttgtatattgatatgaactttaatagtttgtctagctctgtaaaaaaccatgttgatatttttattgcaattgtgtttattgtttattgcaatttataagctaatttagggaggcagttataggaagaaaagcatggaatgagacaggagtgaggacagagccataaagttctctaatatttagagaagggaaatctagaatgggaaatggaaaaggggtggttgatgagagttttaaggaggaggagatagttttaaagagcgtagatgtgctgaatactgatgagaagtgtcttcaggtaatgtattgtttaatacatgaatgagggacactgttcttaggcccttttggggatccaaataatcatatatacattgaataaggtgtaatgtatacattttattcattgatgtattgaataagatgtattattgaacacatgaatgagggacactgttcttaggtgcttttggggatatgaatgattatataaacattgaataagacccaaatcctattcttaagacattattgtctaaaaaggagcaggagatatgctaacttgacttttaaactttatgaggagaggtactaagtttgcagtattcatcactgcatccttagcattgagtctagtgtatatagttgatttttaatatatatttgttgactgactaataaatgatcaaaatgctctttcacaggtttatttaattattccacacttaaagatatacattgaataaggtataatgtatacattttattcattgatgcattgaatattattccacacttaaagatatataccagaaatgaacagttcattcacctaggtttttttttacatttgtaaaaatgtaaaccctatgattttaatttatttgaatcattcatgttaataattagcgaagtctgagggaataacataatctatggagaaagcatagagtgatcagaaaacctacttgaatatgccatgtgccgttagggattcattttagggccaggtgactttcattggaagatactgataagggcctattggaatagacacgagttacactgaaaaggattatttgaatttgggcaggtggagacaggaagaagtatgttctggatgaagagagagattaattatgcaaatttttcttttatagatatatttcagtatgctttgaattattgctatgaagtagatgttatatttattcattcagtgtattctcagtgctaggcactatagagaatatcaaagtaggtataagtgccatattgtgtgtcacattttactggacattttgaaatggtgtaacttgagatataaagaatgtggcagagctttaaacaaatttctttacctgaattaatttatattttgggatatgttaaaaatgccaaaatatttttagggcttctattttcttttgtttcatctcctttttaagtaagagactatgaagccaaatactatttaatttaggtaatatactttttcttttaatagtttgctaaataaggagacagttttatattttatttgtaaaagaataaggatttattctatttgtcacaagtacatttgtcaccttgttaaatcaaggtctgataagaggctgaattcacaaaattttgtccttgaacttcatgtgtctatctcagctgtaatttctgatgccagcaatacttctcaactgagtgatgagtcttttgggagtggagattctattaaaacacttgagtttgaaaaatacttattatagttcatgttctcagaaaatattttaaaccctgacactcttctcttttggattttgtaaaaaagacgttgctgttttcctgacagtagaccattgtttttgattggaattctattatcttttatttgcagttccttaagtcaagctatgaccaaggtaattatgctagtgtatctcattgtaactatttattctaaggaataatttaatataaaaaagtccttagatcttatccaataatggcataaacttggaggttaatgttatatttggactcctcgttttacattctctccaggtgtgtacactcatttatgcatttacctttcgcttgtatgataaatgacttccagatctatatctattatttaaatgttcctgggaaatctctattactgccctttctcttctttactgtttggtaattactgatttacttgcctgtctctggctagtctgtaagctccttgagggcagggattacattcaacatcttctggaagacagttaatgcacaagcagaatattttaatcatattgttagttttagacttagtgctgtattgtacttcagtttgcccttctacagtgtaacccttttggggtcttactttaagcctgaagtacatccctgggcagtttcaccttgtctgaccttgaattccaacttatcttcccagtaccaggcagctggctgctaaagtatctgctcagctctttggcctctcagctaatgctgtctgctaggcttttggattctcatccttcttatgtatgcagagtttagggattggtaaattcccccagggcaaattgcacgaggattttagggctcacttccatgcgacatcctcctctttgggctgtattgacctcaggtccttacagctttggccttctcacattccaacctatggctccttatcccccctggacttctgctttctattcccctgtgctgtgaatttaggtacatatcttcacaagaaaaagcaagggtaaatgtggaactcactttattcagctttttttctcttgaatagtagccccatcaggttctgcctatttcagttgtttcccagtgtcttttagcagttactttatgtacttctgtcttttgttgattttggtgagagactgagtcctgatataagctatttaatcatgactggcctgaagtccatgggcatgtatttaaaaaaattttttttttaaaaattgagttcaaattcacataaaattagctgttttaaaatacacatttcagtgacgtttagtactctcacaatgttgtgtgtggatgtgtttttaatttatataaatgatagtacactatggctcttgttttgtgtctcattttcacctaacagtatgttctaagaatttttcactttttcttttctattctaaatattgcatagcatgcatttaacttatctattccttttgtgatgaatatatacttttcttccacctccccacactgtattgcaactagtaagaatttattcttgataccattttccccaagcaggtaggttatgtaggggtcttctttgaaaatttgatccccagaatttctagtttaagtcattatctgtgttctggaggaactgactcttggggaaattcctggattctttggagctgttctagacttgaaagttctcctcccagatttattttggcattagcctaatttcttgagtatatctaaacatctgtgaacactgtgcattttgccacataaaggaataggagcactctctaccccttgaggtcttggtcccag

SEQ ID NO: 911 - DNA, 2505 bp, Homo sapiens
atttgatcggacaagacattacgatcaggattactatagagatcctcgagagcggactttacaacatgggctctattacgcttctcggagtcgaagtccaaatcgctttgatgctcatgacccccgatatgaacctagggctcgcgagcagtttacactgcccagtgtggtacacagggatatctacagggatgatattacccgggaggtacgaggcagaaggccagagcggaattaccagcacagcaggagtcggtcaccacattcatcccagtctagaaatcagtctcctcagagactggctagccaagcatctagacccacaaggtcccctagcggcagcggctctagaagtagatcctccagtagtgattcaatcagcagcagcagtagtaccagcagtgacagcagtgattccagcagtagttcaagtgatgattctccagctcgatcagttcagtctgcagcagtccctgcacccacttcccagttgctttcatctctggaaaaagatgagccccgtaaaagttttggcatcaaggtccagaatcttccagtacgctctacagatacaagccttaaagatggccttttccatgaatttaagaaatttggaaaagtaacttcagtgcagatacatggaacttcagaagagaggtatggtctggtattctttcggcagcaagaggaccaagaaaaagccttgactgcatcaaaaggaaaacttttctttggcatgcagattgaagtaacagcatggataggtccagaaacagaaagtgaaaatgaatttcgccccttggatgaaaggatagatgaatttcaccccaaagcaacaagaactctctttattggcaaccttgaaaaaaccactacttaccatgaccttcgcaacatcttccagcgctttggagaaattgtggatattgacattaagaaagtaaatggagttcctcagtatgcgtttctgcaatactgtgatattgctagcgtttgtaaagctattaagaagatggatggggaatatcttggaaataatcgcctcaagctgggttttggaaagagcatgcctacaaactgcgtgtggctagatgggctttcttcgaatgtgtcagatcagtatttaacacgacatttctgccgatatgggcctgtggtaaaggtggtgtttgaccgcttaaaaggcatggccctggttctctacaatgaaattgaatatgcacaagcagctgtaaaagagaccaaagggaggaaaatcggtgggaataaaattaaggtggattttgcaaatcgggaaagtcagctggctttttatcactgcatggagaaatctggtcaagacatcagagacttttatgaaatgttagccgaaagaagagaggaacgaagggcatcctacgactataaccaagatcgtacatattatgagagtgttcgaactccaggcacttatcctgaggattccaggcgggactatccagctcgagggagagagttttattcagaatgggaaacttaccaaggagactactatgaatcacgatactacgatgatcctcgggaatacagggattacaggaatgatccttatgaacaagatattagggaatatagttacaggcaaagggaacgagaaagagaacgtgaaagatttgagtctgaccgggacagagaccatgagaggaggccgattgaacgaagtcaaagtcctgttcacttgcgacgtccacagagtcctggagcgtctccctctcaggcagagaggttgccgagtgattctgagaggaggctttacagccgatcctcagaccggagtggaagctgtagctcactctcccctccaggatatgagaaactggacaagtctcgtttggagcgctatacaaaaaatgaaaagacagataaagaacgaacttttgatccggagagagtggagagagagagacgcttaatacggaaggaaaaagtggaaaaggacaaaactgacaagcagaaacgcaaaggaaaggttcactcccctagttctcagtcttcagaaacggaccaagaaaatgagcgagagcaaagccctgaaaagcccaggagttgtaataaactgagcagagagaaagctgacaaagagggaatagcgaaaaaccgcctggaactcatgccttgcgtggttttgactcgagtgaaagagaaagagggaaaggtcattgaccacactcctgtggaaaagttgaaagccaagcttgataatgacactgtcaaatcttctgccctggaccagaaacttcaggtctctcagacggagcctgcaaaatctgacttgtctaaactggaatcagttagaatgaaagtaccaaaggaaaaggggctttcaagccatgttgaagtggtggagaaggaaggcaggcttaaagccaggaagcacctcaagcctgagcagcctgcagatggggtaagtgctgtggatctggagaagctggaagccaggaaaaggcgctttgcagattccaattt

SEQ ID NO: 912 - DNA, 2342 bp, Homo sapiens
gacactgagctagggtggccatgcctcgccctgacctcaggcccatgggccccgtggatgagcaggggcatgcaggacaggcctgcagggcagggcagggcagtagggttttcatcggcaaagccccgtgatcctcacagtagccccaggagttggaccagcctggacccttaccccattttacagccagaaacaagataagcgccttgcaggggcccttaactgactgctgggttcgatggttcaaagagaaaaagcacgtgataactttgaaggaggctgcctggctgagctgatcggatcacctagagactggaaatgctttctggcagtgcctgatcctctactgggtgttcaacactggctgcatttatggagaccacagacaaaagatggaaacagcctccaccggcatggggatcaggcatggggcaaacacaggagacaaaacagtctgaagtcacctgccctatctggacattccatagactaccacttttacccacgacttcgatgtggcatgctcattggaccagataagcaagcagtggcaagtggattggaggtcttggtaaccagttcaaccaaaatcctgggacagctgttccctgatgcggcacacttcctagaagaagcaagtgaatttaaagcagagtgaactgtagaggagttcacgaccaaatctctgatgctttccccagatctttcttcagggccaacacatccattgctcagctgtgatagacagcagtcaggagtggctcacctctctcactgggaattgctctcagcagtagggaactcattcagggttaaggcatctccttgaggaggcccatgttcaattactggttgacacaggaatatgaaggcctggccctcgtctcagcttggaataaatctgaaggcccatcacagcttcagagatgcttggagaaggctgaggtctcccctgcaaccttatgagaaccttgagttgttgaactcattaattctttgggaccatcttcctgatgttcaagtttgcgaaacaggctttccctttaagatttgttttcctcaaaatacaagactattgatgcttcagttttgaagtggattctgcactcaagaaatgtaccattgaagaatgggactggtaggaagggaaaaaaactaaaaggaaacgcattttcgagttgcacatcatgatcaggcacagagtccagatacacttggagtagcaagcatccatccttgtggagacgcacatgaaccaggactctctgcacccacccctctcaagttttattttccgacggctgtaatgttccaggacacctgccatcatggagggttatccagcacctggaggatacctgctacctggtgaaggactttagtacgatggtcaagacaagaaccgtggagtcagaatgcctgcatgcagatctcatcaccatggagtctcgctctgttgcccaggctggagtgcaggggtgtgatctcagttcgctgcaacctctgcctcccaggttcaagtgattcttctgcctcatcctcctgagtcgctgggattacaggtgtgaggtatcatgcctggcccaagatttactttatttgatattaatatagccacatctgcttacttttaaaattaatgtctgcatggcatattattgctattccttaatttccaatttacctctatcattatagcttacccactgatgtagctttagcagctgctgtcccagttctcaaatatccaggctagcttggtggcccctttatccatgggtcatttatttaatccaatctgccaatccctgcctttaattagtgtttttaaaccatttacatttaatgtaattattcatagtttaatctgatgtctgttattttattttttgtcttctccttattttctgtttcttttttgctcttgtctttcttgtcttgttttttctcttccctttaacattttttagatctccttttgattaatttatagagtttttgattatatctctttgtatgaactttttagttattgctcaaatatcacattttatatttataacacaggctactgatgttgacattttaacagttcaagtgaagtgtagaaatcttacccattatccctccctattaataatataattgtcttaaatgtcttttcctacatatatttataacaagtatatgagatagccttacaatttttgctttaactatcaatcatgcattaggaaactcaagaagaaagggaaatgtatttaattcatattttcactctttttaaaatgaatttcataaaatctagattggcaaatttagaaataaaatttctaaatgtt

SEQ ID NO: 913 - DNA, 2188 bp, Homo sapiens
ctttttccgctcggctgttttcctgcgcaggagccgcagggccgtaggcagccatggcgcccagccggaatggcatggtcttgaagccccacttccacaaggactggcagcggcgcgtggccacgtggttcaaccagccggcccgtaagatccgcagacgtaaggcccggcaagccaaggcgcgccgcatcgccccgcgccccgcgtcgggtcccatccggcccatcgtgcgctgccccacggttcggtaccacacgaaggtgcgcgccggccgcggcttcagcctggaggagctcagggtggccggcattcacaagaaggtggcccggaccatcggcatttctgtggatccgaggaggcggaacaagtccacggagtccctgcaggccaacgtgcagcggctgaaggagtaccgctccaaactcatcctcttccccaggaagccctcggcccccaagaagggagacagttctgctgaagaactgaaactggccacccagctgaccggaccggtcatgcccgtccggaacgtctataagaaggagaaagctcgagtcatcactgaggaagagaagaatttcaaagccttcgctagtctccgtatggcccgtgccaacgcccggctcttcggcatacgggcaaaaagagccaaggaagccgcagaacaggatgttgaaaagaaaaaataaagccctcctggggacttggaatcagtcggcagtcatgctgggtctccacgtggtgtgtttcgtgggaacaactgggcctgggatggggcttcactgctgtgacttcctcctgccaggggatttggggctttcttgaaagacagtccaagccctggataatgctttactttctgtgttgaagcactgttggttgtttggttagtgactgatgtaaaacggttttcttgtggggaggttacagaggctgacttcagagtggacttgtgttttttctttttaaagaggcaaggttgggctggtgctcacagctgtaatcccagcactttgaggttggctgggagttcaagaccagcctggccaacatgtcagaactactaaaaataaagaaatcagccatgcttggtgctgcacacttgtagttgcagctcctgggaggcagaggtgagggatcacttaacccaggaggcagaggctgcactgagccaggatcacgccactgcactctagcctgggcaacagtgagactgtctcaaaaaaaaaaaaagagacagggtcttcggcacccaggctggagtgcagtgccacaatcatggctcactgcagtcttgaactcatggcctcaagcagtcctccctcagcctcccaagtagaggggtttataggcacgagaccctgcacccaacctagagttgccttttttaagcaaagcagtttctagttaatgtagcatcttggactttggggcgtcattcttaagcttgttgtgcccggtaaccatggtcctcttgctctgattaacccttccttcaatgggcttcttcacccagacaccaaggtatgagatggccctgccaagtgtcggcctctcctgttaaacaaaaacattctaaagccattgttcttgcttcatggacaagaggcagccagagagagtgccagggtgccctggtccgagctggcatccccatgtcttctgtgtccgagggcagcatgttttctcgtgcagtgctcagacacagcctgccctagtcctaccagctcacagcagcacctgctctccttggcagctatggccatgacaaccccagagaagcagcttcagggaccgagtcagattctgttttgtctacatgcctctgccgggtgccggtattgaggcacccagggagctgttactggcgtggaaataggtgatgctgctacctctgctgctgcactcacagccacacttgatacacgatgacaccttgcttgtttggaaacatctaaacatctagtagatgacttgcaggctgttggctaccagtttcctgtctgaggtgtatatgttaacttcgtgatcagtttgtatgtttgggactcttgtcctatgtaaagttaaggtgggccgggtgcagtggctcacgcctgtaatcctaacactgggaggccgaggcgggtggatcacctgatggtgaaacctcatctctactgaaaatacaaaaattagctgagtggtg

SEQ ID NO: 914 - DNA, 3923 bp, Homo sapiens
gtgcgcgccccggcctctccctccccgccaccctcctcggctcccgcgcggcggcggcggttcctctcccactccccccagccctggctccgggggaccccgcgatgccggtccgcaccgagtgtcccccgccggccggtgcctccgctgcctccgcggcctcactcatcccgccgccgcccatcaacacccagcagcccggcgtggccaccagcctgctctacagcggctccaagttccgcggccaccagaagagcaaggggaactcgtacgacgtagaggtggtgctgcagcacgtggacacggggaactcttacctttgtgggtacttgaagattaaaggccttactgaggagtatccaacccttacaaccttcttcgaaggagaaataatcagcaaaaaacaccctttcttaactcgcaagtgggatgcagatgaagatgttgatcggaaacactggggcaagtttctggctttttatcagtatgcaaaatcatttaactcagatgactttgattatgaagagctgaagaatggagactacgtcttcatgaggtggaaggaacagtttctggtcccagatcacacgatcaaagacatcagtggtgcttcttttgccgggttctactacatctgctttcagaagtcagcagcctccatagagggctactactaccataggagttcagaatggtatcagtccctcaatctaacccatgttcctgaacacagtgcacccatctatgaattccggtgacaacggttcagaacagcaaccaaataaaactgaacttggcaaaaaagaactttgccgagaaaattgtgtacctgccagaaccaggagaagtgtgttcctgtttcttcacgagcagactcgcatcacaaagcatgaatgttaacccacagaatccaaggagcatggctggcccgtggggcaggtggagggagcagtcttcgttcttcctcccctcagtggcagtttggtcttcacctgtttttaagctaccttaaacgcacttttccttcctgcacagctaacttctacatcactgaaatgcccattccttcctccgtcccacctccagccgaatagaaggtctgctcccggatcaccctcagccttggtgctcagtggtcccgaggccctagacccccaccccccgccagttgctttgtctggtagctcaagagaaggcagagccccagcacctctgtgccccccagagctctgtgcagggagttggccagctgccgcatcatcggccaccaagggcacaagaggcggaggctccagtccctgctgggctgcctcagtcttcagtgctgattgtgtcacgggtcagcgtgcgctgctgagccctgtactgttaacagtgcaaagctagtgagtagctgtcaggttccctgggcctgccatcagggatcactaaatttaaggcttccagatccctggcaggaacagattccagtcctgcttactcagtacatttgctccaaacttttcaacttgagggcaatactaaacttaaaaataagagtttttttattacaaaattatttttatggtccctttaacgaggaccctatggcaaatgcacaattattcagaattacattttatcgttttcacattgaaaacagcaaatgttgacttagtaatttttatatcgatatctatatgtatatgtatatttaatcaaccagcagttttgaaactagtcatcctggtacaaaagttttgcagcattgcctaaattatagtgctcaacacaagaactgtttttggggccagtttagcatttgtgccgcctccttttgctactcaaaacagcaatgcttggcggcagccttccatgaggcagaaggggtcgtcgttctctgaaaacagtgactctgaaatgttgggacaggggaaggggtgggaaacatgaacatgctcaaataactcgaggctcacgtgccaaagtgtgtgtgtgtgtgtgtgtgtgtgtgtgtgtgtgtgtatgatgttttgtttttttaaatgttttaaaagcttaataggttggcatcagttgtagcccacaaacatggctagggctttggggatttggcatttttctggtggtttacaagacttactccgaatacaagaggaaaagctttaaaaacaagattgcatcataacccccaggagcaaagcaacctggaggctgcatatccatgggcgggcagcataagagaatgtgaagcccttcagtgagacgagacgagcaatgggaaaccttttctgttcttaagaagtgactttaattttattgacatatgtactgtatgttactgagattgaatgttaggggaagccttaaggtagaggtatttgggaaagtagccagtgggcacttgtgatatctaaaatctgttatcccaggactgtgtacagaggggcaacctacccattcaggaaggtcagggctttggaaccctaaaaagttggcccgatgacttaaagggaaaaataattcattcccagagatgagtcagaacagtctcctcaatcctgaaattcaacaaggcatcagaagggctggctgtggtcaagcccagctgctgtcatgtgaggagatgctcactgtggtcttgttgagctgatggccttggttgagctgatggacaagtgaaggaggccatggggctgtgctgtccttcctgccgtacgtgccattccactctcttcagctctcccctcaacagcatgcgagcccataccttctgcatttttccaggcctgtgagggatataggcctccccttggagcactgagtccggaggtcatccctgagctcatccacggctcatgctgtggctccgagtagtggtttgagtgggcaggaagggccatttgcaaacactgctgtgttctagacaaacaacccaagtcctatggcaggatttcttccttccttccttttttacccaggtgatgaagtgcacccattgtactgggaagaatgaagaggtgatacctttactagatccttcagacacatctatgagaagatttgttcatttaaaagtctgcccactgaggatagggaaaggattaaggatttttccacctcctcttagtaactcctgaattaccaacatcaacttctttctctccgttcctgaaggaactttggggaatcatcttcatccgtagttacgctttcctgaaccttctcagtggtttacatgcctctgaaactatgtgcaatatttttggttgacacttgtatccatccttaagaaattagtgcagattgcagatgttctgtcttccatcccaaacaagcctgccatgaggtaggatcctaggggtttggctgttcttactccactgctcagaaagcttccattctgctgtcctcagcctcgaccctcttctgtgctggacttccacccacccacccttttcaagtttagatagtgtttcagctgctgtcccaaagtaacaaaacaatacctactgttaagtaggaagtcaatctgtgtgctggttttgttggttatgtggaaatcacaaactccagaggagcaaaggggtttttcaatgtcttttgctttcagaaacagagaatataatattctcactaaggccttgaattgatttttttctcataaaatagtctgataagctaatttttaaaaagaaatgccattaactgtgttgtatcgtggtttaaaattactaacaagttgtgggaaagaaaaataatatttgattttgaatcttaaatgtttttaaaaattagacttgaatgggcacaaagtataaatattttgtttctttatggaggacatgtggaaggagtttgagggtttgggatgggagaagtattttgcagagctatcaatgtccaaataatttaaaaaaaaaaataaaggtatttaagcagtg

SEQ ID NO: 915 - DNA, 3215 bp, Homo sapiens
agcaatggtacattaggagcagcatctaatgtttttgaatctagagcaccagaaggtaagaagctggatgagaggataatatttgatgcactaaagctaagcagtgatgtgcagaagtcagcacctgtgccacccagaaggcggccaaatgcagaacgcaaagacaatgttaacaggagatcgtggaagtccttcatgccacccaacttcccagaatttgcagagaggatagaagcttctctcagtgaggtttcagaagctggtgcttcaaatccttccttgcaagagaagaaggagtccagttctgcattaacagaaagttctggtcatttggaccacagggaacctcagtcagagtcagtaactctggaacatgtgtccaaatccataggtattccagaggtgcaagattttaaaaacttaagtggagactgccaggactttagatttcagcagcacagtgcaaaccctcctcataaattccagcccgtagaatcagaagctgtagcaacaagtggtaacacagatgtaatgcaggaatccagattctcaagtgcaacctggccgagggccacaaaaagtttagctaagggaggcttcagtgagaagcagcacccccttggggacacagcctgcactgtggaaatgccacctctctccccttgcctgagtgaagagctgttagatccagaattgcatgttctcataacccccagcctgagagagaaaacagagtctgagctaaagtttgaggaggatgagcgatggattatgatggaggctgagggagagtgggaggaagagaaactgtcagacagggaaaagacttttctgatggcagatgagaagaacagcctggcagatatttttgaagaaagagaacaagcaaacacagcagtggtggaggatggatccgattgcttagctgctgtcttgaggacttttggccacctatctcttggtcagatttgttgccctgatgacccacagccagccaaggaccagttggctactgttcccaaggatatacccctggattgcgattgtgttcttacaggtgaggatattctcggtgaggtggcaaacagaactgctcaggggttagagggacttgtttcagattcagcatgtactgtgggtactattgatgcagaacagctctctgacacagactcagtgcagatgtttcttgaacttgaaaaggagtgtttatgtgaagaaggagtaactcctctagttgagctacagaatcaaatctcttctgaagggctggctgcatcccaggatgcagaaaatttactcgtaattagtcatttttcaggggctgccttagaaaaggaacagcatttaggccctttacatgtaagggcaaaagattatgatactagattggattgtggatattttaataccctggattcttctcaggtgcctaatgctgtggaacttattgcccacgttgatatcatgagagacacttccactgttagcaaggaggaatgtgaaaaagtgccttttagccccaggactgcagaatttaagtccagacagccagctgatctggattcactggaaaagctggacccaggaggactgctgaactctgatcacagggtttctcatgaagaaaaattatcaggcttcattgcttctgagctggccaaagacaatggcagtttgtcccagggagactgcagtcaaactgaggggaatggtgaggagtgcattgagagggtcaccttcagttttgcttttaatcatgaactaacagatgttacctcaggacctgaagtagaggtgttatatgaatcaaatttactaacagatgaaattcatttggaaagtgggaatgtaactgttaatcaagaaaataacagtctgacatcaatgggaaatgtggtcacttgtgaattgtctgtggagaaagtttgtgatgaggatggtgaggcaaaagagctggattatcaagccacacttttggaggatcaagctccagcacatttccacagaaacttcccagagcaggtcttccaggatctccagaggaagtccccagagtcagagattctgagtctgcacctgctggttgaagaactgagacttaatccagatggagtggaaactgtgaatgatacaaagcctgagctgaatgtggcatcatcagagggaggggagatggaaaggagagattcagattcattcctaaatatttttccagagaaacaagttaccaaggctggtaatactgaaccagttttagaggaatggatacccgtcctccagagaccttcccggactgctgcagtacccactgtcaaagatgccctagatgctgcactgcccagcccagaggagggtacctcaattgctgcagtgcctgccccagagggaactgctgtagttgctgctttagtgccctttccacatgaggacatcctagttgcttcaatagtctccttagaggaggaggatgtcacagctgctgcagtatcagccccagagagggctactgtcccagctgttacagtatctgtccctgaagggactgctgcagttgctgcagtgtcctccccagaggagactgctccagctgttgcagcagccatcacacaggagggtatgtcagctgtcgcagggttctccccagagtgggctgctttagctattacagtacccatcacagaggaggatggtacaccagaagggcctgtcaccccagctaccacagtgcatgctccagaggagcctgatactgcagctgtcagagtgtccaccccagaggagcccgcctccccagctgctgcagtgcccaccccagaggagcccacctccccagctgctgcagtgcccaccccagaggagcccacctccccagctgctgcagtgccccccccagaggagcccacctccccagctgctgcagtgcccaccccagaggagcccacctccccagctgctgcagtgcccaccccagaggagcccacctccccagctgctgcagtgcccaccccagaggagcccacctccccagctgctgcagtgcccaccccagaggagcccacctccccagctgctgcagtgcccaccccagaggatgccccccaccctaccacacattcgaagaacccgtatacataaaatctagacaaaaaaggaaggaatcgaaccccccaaagctggtttcaagccaaccccatggcctccatgactttttc

SEQ ID NO: 916 - DNA, 2408 bp, Homo sapiens
ggccttttttttttttttttttttttttttttttttgagacagggtctgtctctgttgcctaggctggagtgcactggcaccatctcggctgactgcaacctcgaccttctgggctcaagccgccctgccacctcagcctctcaagtagctgggactacaagtctgccatcactatgcccagctaatttttgtgtttttagtatagagaaagggtttctccgtgttgcccaggctggtcttgaactcctgagctcaaatgatccacctgcctcggcatcccaaagtgctgggattaacaggcctgagctcccatgcctggccttttctttcctatggttagtatttttgtgacctatttaagaaatctttgcctgcccaagatgttcatgttcttctggaagcctgttttagcattcacacttatgtctatggtccctcttgaattagtttttgtacatggtgtgaggctcagcctgacctccctgtatgatgtctgggatccaggctacctgcctatgcatccttctgggtattggcagaccctggtgataatacagcacacccctgaggtgatcccaagactgccaggagggagaggttatccatggagctcagcatcatttattgacttaattcctaccatggtgcttggctgtgggagaagcagaaaatgccctggacagccttcaccaggagcagctgctattggaagaactttacttaacccttcaaatctcattcctacacctgcataggccaagaggccctccccaaatcctcagttcctggccctcagggctttgcccatgaactctgtgcagctgctcctggaccatggtgctgatcctaaccagcgagatgggctggggaacacgccactgcacctggcggcctgcaccaaccacgttcctgtcatcaccacactgctacgaggaggtatgtggtttcttcccctctctgtcctctttctccccctcacccccagaatgctcacctcagctggtacctgcaggggcccgtgtagatgccctggaccgagctggtcgcacacccctgcacctggccaagtcaaagctgaatatcctgcaggagggccatgcccagtgcctagaggctgtgcgtctggaggtgaagcagatcatccatatgctgagggagtatctggagcgcctagggcaacatgagcagcgagaacgcctggatgacctctgcacccgcctgcagatgaccagtaccaaagagcaggtggatgaagtgactgacctcctggccagcttcacctccctcagtctgcagatgcagagcatggagaagaggtagcaagagaggctccctgccttcctgccactgccccaccctgccccactgctgtctcagtaccaagaaaaagcccaacatctgggacttggagctgcacttgtctggtgaggaccttgccctcacccgcagatgccgtggggcagagatgctctctctccacggcctcagagccactcccagccacagtttccagcatctctgtggacagggaccacagctcccagcttcttccagttctcgcagcaccagaccagcctctgcagctgcacttcagctccgcagacctgcgctatctcagcagacctcacttgccccatggccttcatggcgcgctccaggcctcagacccttctctgtgttccgtcctggccatgggcttgttgcagtcagcaggtgtgggcttaggcgggcaccctgtggccaggggtactgcgtgaggccctcagttggtcctgtgcctctcaccagcacttagacagacacgtcaccagactttcaaggagatactgcagtgagtttctctggttggaaggggagggttggtgagtcccagaccttaaaaatacaaggttaagagggaccccaaagcaaaaaattccaacccttttcctcccagtcattgaaacaccaaaactattataccggagggtgtaatagttttgctgcccagttgtggtaggccagtagtggcctcccaagatgcccatgtcctaatcccaggaacctgtcaaaattaccttgtatggccaaaggggctttgcagatgtaatgaagttaaggatctttcgccaggaagattatcccagcttgttcaggagggcttgatgtcctcacccgggtctgtataacagaagagcaggtgacgggagaggaggttggaggtgtagcgatggagcaggaaactggagttgaggagggcagctcaagccacagagtccaggccacctcagagccaggaaatgcatcctcccacagagccctggaaggccccagccctgctcccacctggactggctcagtgaggctaattttataattctggctgattttagaactctaagggaataaatttgtgttgttttaagtc

SEQ ID NO: 917 - DNA, 2297 bp, Homo sapiens
aaaaaccccagcaggttagcttctcattaaatagcttctcctgagggcagaccttgttaagaagaacaaaatgctctggcgtatttcaaaatggctccttttccccacccactaccagaggcatggataatcaccctgaggacctgtgagagatccaggagcttaaaaaaaattggggagcggggaagagggaatggctaggtccctctgacttgtccacactgatccttcaggtttacctatcctggtacttgttccattggaggcttcagcggctagtttctgctctgtggttaccaatgacacaggagctgagcttccaaaaatttattgaacaatctgacttactaggagaacttaaatatgacttcaatgaaaaagatgaattcagacatactgagacacaaaggccttttgtctttaactattatgaaaatgtccttgagaaaaatagcaagcgctaccaggcccttggccatttgcttgaacaatacatttatgagcttttggagaaagtgtgcaaattagaaaaagtatatatcccacctgaggctgataaagaagaaccaagaagcttctttttcatgagcgagaaagcattaacaaatcaccattctgctcttcttatccttcttcaagaccatggggtctttcgagctggtcagtggagtcaacaggcaataatacatcatggtctccaacatggaagtcagataccatgtattcaaatggcattgcaggcacactatgatgtaattgtgctaaaccccaatgataattttgtggaaccaaaggtggaaaaagagtggaaaggccttttaacacaaaatattgagtcatcttctctaaaaatggttcaaggtgggagctttttctctctccagcatcctcccaaatgcattccaaaaagatgcagcaacacccccgaagaacacacggcttacatatgggattacttcatttcaaagactgaaggcaaggatattgccttcattgtacatggttatggaggcttggtttttatggacttgcttgttcgtagaaggtgggaagtgatgagcaaagtatatgctgttgcacttatcgactctgaacatcacgtaggacaccagctgggaagtgatgtacaattattagcatggataaagcaccactgccgtgaatgggtgacaagtcctaagcctttggataaacctgcagctactgttttcaaaaaggaatttcctatggtttctgctggcacagaaaagtacatcttagccccttcctctagccttcagtcaatttttaagtactttaaaaaagctttaaaagccagaacaaccattaatttctctcgaatgccaatagtgactagaagctccacaaaaagaaagcaaagtgcttaaactacttttgtcatctaagatttttttgtccttctgcaactttgctaatacagattctggaagaaaaaaaaacactttcaactcacacacaatatgatgttctggcttgaggtttgatttgttactttttattatttggtttttatgaggcagggtctgactttgctgcccagggtggtatggaaatctggcctcaagcgaacctcccacctcagcctcccaaagtgctgagattataggcattagccactgcacatggccatggccaggtttgttgctttttttttttttggaggaggaggaggaggagtctctgtcacccaggttggagtgcagtggcaccatctcagctcactgcaacctccacctcctggtttcaagcagttctcctgcctcagcctcccaagtagctgggactacaggcacatgccaccacgcccagctaatttttgtatttttactagagacgggctgttcgccaggctggtctaggactcttgacctcaggtgatccacccaccttggcctcccaaagtgctgggcttacaggcataagccactgcacctggccattttgttgtttttttgaaaagtgaacatattctctcttttgtagcctgttgatgaactgggaattcagtgtcatcgttaatattttacagtgttagttaagtgtgaagatctttcttttaaaaagctgtggtttgatataatgacaacaaaatggcaattgataaaaattagatattgaatcaatctttgatttctataataataccatagtaaaattacaagtgaacataaaaattaaacatcataagcaaactgcattctttgtgtgtttatgttttttgttaagatttgttgtactccctgttcaccaggtctgaagaaaaataaattttaaat

SEQ ID NO: 918 - DNA, 2211 bp, Homo sapiens
agtgagcgacacagagcgggccgccaccgccgagcagccctccggcagtctccgcgtccgttaagcccgcgggtcctccgcgaatcggcggtgggtcgggcagccgaatgcagccgccggcatgagatgagcgagagccgccagacccacgtgacgctgcacgacatcgaccctcaggccttggaccagctggtgcagtttgcctacacggctgagattgtggtgggcgagggcaatgtgcagactctgctcccagccgccagtctcctgcagctgaatggcgtccgagacgcttgctgcaagtttctactgagtcagctcgacccctccaactgcctgggtatccggggctttgccgatgcccactcctgcagcgacctgctcaaggccgcccacaggtacgtgctgcagcacttcgtggacgtggccaagaccgaggagtttatgctgctgcccctgaaacaggttctggaactggtctctagcgacagcctgaacgtgccttcagaggaggaggtctaccgagccgtcctgagctgggtgaaacacgacgtggacgcccgcaggcagcatgtcccacggctcatgaagtgtgtgcggctgcccttgctgagccgcgacttcctgctgggccacgtggatgccgagagcctggtgaggcaccaccctgactgcaaggacctcctcatcgaggccctgaagttccacctgctgcctgagcagaggggcgtcctaggcaccagccgcacacgtccccggcgctgcgagggggccgggcctgtgctttttgctgtgggcggcgggagcctgtttgccatccacggagactgtgaggcctacgacacgcgcaccgaccgctggcacgtggtggcctccatgtccacgcgccgggcccgggtgggagtggctgcggtggggaaccggctctatgctgtgggcggctatgatgggacctcagacctggctaccgtggagtcctacgaccccgtgactaacacgtggcagccggaggtgtccatgggcacaaggcgaagctgcctgggtgtggccgccttgcatggactcctgtactcggccggcggctatgacggggcctcctgcctgaacagtgctgaacgctacgaccccctgaccggaacgtggacgtccgtcgctgccatgagcacccggaggcgctatgtgcgagtggccacgcttgatgggaacctgtatgctgtgggcggctacgacagctcctcacacctggccactgtggagaagtatgagccccaggtgaacgtgtggtcgcccgtggcgtccatgctgagccgacgcagctcagcgggcgtggccgtgctggagggtgccctgtacgtggcagggggcaacgacggcaccagctgcctcaactcggtagagagatacagtccaaaggctggagcctgggaaagcgtggcgcccatgaatatccgcaggagcacgcatgacctggtggccatggacggatggttgtacgccgtggggggtaacgacggtagctccagcctcaactccatcgagaagtacaacccgaggaccaacaagtgggtggccgcatcctgcatgttcacccggcgcagcagtgtgggtgtggcggtgctggagctgctcaatttcccgccgccatcctccccgacgctgtccgtgtcctccaccagcctctgacccacctaccaccagaggcctgcagcctcccacatgccttaaggggaccgtggcccccaccagggacgtcctgcgccatccgttcacgtctctgcatccattccttcatgtctttatttagttgtttatttatttagttatttatcttatttattgaggggtgaggagtgccacggctgcccgtttacacctttagcgtctggtcctcctgcgtgtcctcccctccactgcctgcatggggggcgcggggagtgaccaggcgggggcctcaccgccccagggccgttgcctgctcagaccttgcaggctgtggagcaagaggccctgggtctctccaagcagctgcagaccccagctcgaattttgcacatggcggggtcccgggaagggtggggagcaggtgtccttcctgtcgtcgtctgccgtgtgccatctttcctggatcttgtagcgggtgcacacgcgtgcactgggaccccacacagcaatacgagtccaacttaataaacacatttctggggttaaaac

SEQ ID NO: 919 - DNA, 2340 bp, Homo sapiens
aaaaggcctcagcctgatgcccacaggcagagcacacaggaagccgagtggccgcagccctgcagtggaggagtgcctcgtgcacctggtggttttctgcaccccaacaggtgtgtctggccactgctcctctcactgcagcccccgctgctccacaccatgcccttctggcccatcaggtgtctgaagaggagcaggcgtatgcccaggggtggtgctggggagcgggagaaggtgccggccaaccccgaggcgctcctgctcatggccagctcccagcgtgacatggaggactgggtgcaggccatccgccgagtcatctgggccccgctgggcggagggatctttgggcagcgcctagaggaaacagtccaccacgagcggaagtatggcccccgcctggcgcccctgctggtggagcagtgtgtggacttcatccgggagcgcgggctcactgaggaggggctgttccgcatgccgggccaggccaacctggtgagggacctgcaggattccttcgactgtggggagaagccactgtttgacagcacaacagacgtgcacacggtggcctccctgctgaagctgtacctgcgggagctccccgagcccgtggtccccttcgccaggtacgaggacttcctcagctgcgcccagctgctcaccaaggacgagggggagggcactctggagttggctaaacaagtgagcaaccttcctcaggcaaattacaacctgctcagatacatctgcaagtttctggatgaagttcaggcatactcaaatgtcaacaagatgagtgtccagaatctggcaaccgtttttggacctaacattctgcggccacaggtagaggacccagtaaccatcatggaaggcacttccctcgtccagcacctgatgaccgtcctcatccgcaaacacagccagctcttcacggcaccggtcccggaagggcccacctccccgcgcgggggcctgcaatgcgcagtggggtggggctccgaggaggtcaccagggacagccaaggagagcccggcggccccggcctgcccgcgcacaggacctcttccctggacggggcggccgtggcggtgctctccagaacagcccccacggggccggggagccggtgcagccctgggaagaaggtgcagaccctgcccagttggaagtcctccttccggcagccgaggtccctatcgggaagcccgaaggggggcggctcatccctggaggtgcccatcatctcctccggcgggaactggcttatgaacgggctgtcctccctgcgcggacaccgccgggcctcgtcgggagaccggctcaaggactcgggctccgtgcagagactctccacctacgacaatgtgcccgcgccgggcctggtccccggcatacccagcgtggccagtatggcgtggtccggggcctcgtccagcgagtcgtcggtggggggctcactcagcagctgcacggcctgccgcgccagcgactcgtctgcccgcagttccctgcacaccgactgggccctggagccctccccgctccccagcagcagcgaggaccccaagtccctggacctggaccacagcatggacgaggcgggcgcgggtgccagcaacagcgagcccagcgagccggacagccccacccgggaacacgcgcgccgctccgaggccttacaggggctggtcactgagctcagggccgagctgtgccgccagcggactgagtacgagaggagtgtgaaaagaatcgaagaagggagtgctgacctgagaaaacgaatgtcccggttagaagaagaactggaccaggaaaagaaaaaatacatcatgctggaaataaagctgcggaactctgaacgggcgcgggaggatgcggagaggaggaaccagctgttgcagagggaaatggaggagtttttttcgaccctaggaagcttgactgttggggcaaaaggtgccagggccccaaagtaaaaggaatggcagagctcacttctgtaccacatctgctggtctccagccttgtatggagttagaagcgtctgtatctctggagcagccaggcactctggagccagctggagagagagagatcctgatacctctgtggggactgtggggacttttgggaccccacacactccaggtgggatcagatgctgctccaaccatgcagttcctggtgagggtcagaaggggacggtaccaagagtagcgcttagcccttacccaggaaatatccttcatggccacagaaatggagggcgcccaggatccaggcagccaccgggaacagtcagctttctttattaaatgtgctcacaaagc

SEQ ID NO: 920 - DNA, 2530 bp, Homo sapiens
acagctctggtcctcacagccagtgcaccggaggggcgcgctcccgagctggcgcagtttcccagcgcggtgcccgcccctcatcctcctccagtctccctcccctcgccgactgccgccccaggctccgccatggggaatgtgccatccgcggtgaagcactgcctcagctaccagcagcttctccgggagcatctctggatcggggattcagtggcaggggcgctcgaccccgcgcagacttctcttctaacaaaccttcactgctttcagcccgatgtctctggcttctcagtctccttggcaggcacggtggcttgtatccactgggaaacatcccagttatctggactccctgagtttgttaaaatagtagaagttgggcctagggatggattgcagaatgaaaaggttatagttcctacagatataaaaattgaatttatcaatcgactttcccaaactggcttgtctgtaatagaagtgactagctttgtgtcttccagatgggtaccacagatggctgatcacactgaagtaatgaaaggcattcatcaatatccaggagttcgctatcctgtccttactcctaatcttcagggttttcaccatgctgttgctgctggagctactgagatatcagtttttggagctgcatctgaatcctttagcaagaagaatattaactgttccattgaagaaagtatgggaaaatttgaggaggttgttaagtctgcaagacacatgaatattccagcacgagggtatgtgtcttgtgctctgggctgtccatatgaaggaagtattacaccgcaaaaagtgacagaagtgtctaagagattgtacggcatgggttgttatgagatctctctaggagacacaattggagtgggaactccaggaagtatgaaaagaatgttggaaagtgtgatgaaagaaatcccaccaggtgctcttgctgttcactgtcatgacacacggacaagccttagcaaatatccttacggcccttcagatgggaattaatgtggtggactccgcagtatccggattaggtggctgcccttatgcaaaaggtgcttctgggaatgtagccactgaggatttgatatatatgcttaatggcctggggctcaatacaggtgtgaatctatacaaagtgatggaagctggtgactttatttgcaaagctgtgaataaaaccacaaactctaaagtagcacaagcctccttcaatgcttgacttgaatggatttatgacgtaccgttgagaagatcaatttcagctacaatactcatctgaaaatcattaatgccaacttgctctgatatgtgaagtaatggacaagagtgggaaaaaaagagatccttttcaaaaagattataactggatagattaagtcaacaaaatgcaatatcagtcatcaggtaaattgcaagctgaggataaataataaaacttgtcataattttgaacttggaaaaaagtttcttttgctctcatagaaataactttttaatttagtagatgggaaaattgacttcgtatttccccaagtatcaaatactgtgttaatacttaatcaagcaggcttaacactgtgtacatattgtcagtagtttatgagctcctgcatagtatgcagagtgtgtggcctcaatattatacattatgcctctggatctcaactactcatttgccaagtcagttatgttatggaccaaaagccaaatctccatctgaccctacataattttagcaatagaacttttatatttcaagtatggctaacatctgttaactatttcagtgactttatctggttccaagaggctgtggccaatggcaagatgccatatcctggaaacatattacgacctcccatgtttgttacatgcatccagtttaccacactttacctgtcatcagttatagtaaaaaccagcatggtgttactcaactattgagaaattgtaagctattttttttgtcctgatgtctaaattgcagtgataagaataggttgatacatgtatcataatctacctttataattttcagatcactttcaaattgcccaaggaaatattgtgatcctaagaatattaagataattttaggttaatgaaatacccattttccttttattcatggtgctttgcttacccacattattttttggtgtattttttagtggttattttagaagttgaagtggctgaaattttgtctattgtcttagaattgattgccagaaattgcaagatgtaatatatcaaagtcagggatgaggagcaggaggactattcaagataaacttctgtaacctatgcatattttatgggggcagtattattacaaatggatctgaaatgtcagttctagtatttagagagacttctctaataataccgggtgatattatctttgagtaaatttgaatataaattgaaacataaaaatgagtattgtgaactttctcggaaatattcattaaaaccattgaaataaaaataaattcaagaaagt

SEQ ID NO: 921 - DNA, 2729 bp, Homo sapiens
ttataaatcaaccaagtttcttgaaaacaataatttttgttcagaagtactgttgtgagtgaggagaacattgtgcagctcagcctgtggacatacagtggctgcagcgtgggccccaggctgctctcatgctcgctgggcctgctgggtctgctgggcctgctggaacaggaagcagcaacgcaattccaccagaggaaccacagggaaaccaaggctgactgaagtctgagaagaaagcctgtctagagtcacaggagtgaaaataagaaaacaaaatttagtcaggaaattgcaccatggaaatgtctggcgtcaggttctataaattccgacccgactatagtcaagtatttgccgagccacctcgtgtttgcttcagatctgtgtttgctgcttctttttgcacagatttgtcttttgtttccttcccattaaaaacaggaggcagcgggttagctgtgctgggttacacagcagcagatggtgttgcccaccatgggcagagatctcacatgagagagcggggagggagggtggacatgtcacacccatgccattttcctgctggaaactctacctcacacatgcagggaccacaatggatttgacaagaaccactcatataaaggcagaaagtcttttaattacataaaatctgaaactatgtgttagaagcagtggtctcttgccatttctgtggatacccatcttccatatagtcttactcaaagttaattgaagacaagcagaagtgaggcctggagtcagtgtgggggtgatttgtaatgacaagttggaattgaatcctggtgggacaacacagagctgggtgatatgtggcgtgtggtggtggtggtggtggtgaagaagacgggttcttaagaatacaaacccttgaacatgtcagatttagtctactttcccttcttgattctctgggttccccttctgttagtcttcaatcaagtcctttttggaaagattcctttccctttgtttagagaacattggtcaactttgaataacaaatgagaatagaaatgacaaaaacgtctccaggtctcagctgtgggaccttatgagcagtgttgcacaaagacattccccccaaagcctgctactgttacttttaggatgttcatttaaaaaaaaaatctcttttccctaggtcgggaagatgaccttcaccatataatttcggactaaaatctgcagattgtaaccatagttaggaggcagttcttcattaaaataccccgcatttaatctttcacatattgtacaaaagtaaaaccaaaacaaaataatactgaatggtaaagtaatattatttttttattttgctaaaattccatggggtgttcattttctttatgactcgtctcttattcctagctcattctcgtgtgtctatcacagtgaagttgctgtagacaccctcagatttctagaaatagtatctgaagtgttcccagagggaataggatttagggccaaggaattaggatggtcccactctgtgcccatgtataatgccacacagactgagtgactttcctccaaatggatatcgggctggcatattttgggacctattgaatgtttttggtcccattccagtttactgttaacagcctcatctatttgtgaacagacacaggagtagtatctatatgacacaaagggatgtttgacaacttttagctaatttggccactacagatggccatgggcaggtgagagccagaacaaagtgttggagcactgaggtttatcattcagcggtccccggcttcctgcccagctgagctcatgacctttgccaaccagagttttcctgaataaacaaacacaggtcccctaccagatggagaggtgcttaatagaaccaggctgccaggcctagcaattgtgccactagttgtgaccaggcttgggaaatttagaagctgtgtcttgtttgctggggcctctttccccagatctgctagttctggagattccagtaggcactgagcatctcactggttcctctgtgtgcatttttccttgtgctgtgaaccagcatcctggtaattcctgttaatctctgcacttcttcagagtgtcttctaaaccaggaatcctttatctggggaacttttaccctgataaatgctggtgcactgcaaattattgaatgtcattagggtgccccagaagctagattattctagactccagattgaacaatggcttatgtatttttctgaggagggcatatcctgcgaagggaagcccagacgttctggtgagttggaggtgcattgttaccgtgtccttacacactgtgtccattcactggtttagcacttgattgtaacagcatatattattttctaaaccttttatctacaaaatctcgcctcatcaacaaaattgttaaactcctcaagagtagtgatcctatgtttggtacattttgctccccccagagtactggtgagctttagttctccttagggttccaaggcattagaagtaagagtgtagcttggaaaccaacttctgtgatttaggaaagctgtctctttcctaaggtaatagggggtttatttcatttaggccccagttggtaggttttaaaataatttataaagtgttttaataatttggttgtcttttttaccttgctaaaccaagcctctaaaaactcaaattattcccttgataaatttttataatgg

SEQ ID NO: 922 - DNA, 2895 bp, Homo sapiens
ttaaaaccagaaacaccagcgttaaagcgccagggcccagcgcctctgccccacgcttcggtcacacctcagccacgcgggttcctggccccttctgaaaagccggaccccactgctcaaggttgctggatgcctggcccggggtgcagccagctcgggcacagctggcaaggcgtggggacctgcgggctcagggggccggggcagtgggttcatctcagttgctgatgatcccaccatcctgggatccaagaatcagacgatggagacggctaacggagaggagcctccagcaggaccacccgtgtccctccacggtagacggctcctgcgcgtgggaggcgcgtgccccacgcccctacctgttctccaaagactcccgccctccgctctgcaccacactcttcaccgtgtcccgcgacgtgtctgcgtcagcccccttggccaggtaactcggatcccacctgtccggaccgtgcgcagggcaccttctgggctgctgccgcaacgccgtggcgggccctcctggtggccgccctctggggtcgcgcgtggcgggccctcctggtggccgccctctggggtcgtgcgtggcgggccctcctcgtggccgccctctggggttgcggagccgagagaagcgttgggacttccatgactgtggccgccagggcagagtgccagccctgagggcgtccacatctcaaccccaggacccgcggactcggctcctcacgaggtaacgtacccggtgccctaagacgaggttgcatggaggacaccgaggtagggaggttacctcggatcgtccttgatctccggactgagagaacaagtgttttaggccccgagtctgcgcgacaggctgggccgcctgctccgggtcacagtcccccggccgagccgttttcctgttggaagatggagttttgagtcaggaggcgttgagggagacaaggctcgggttctgtgtgtccgtggtggttcttgggagttggagttggagctggagaggagggctgggcaggtgaggcttgcagcggcgggacctggagactcggaactggagggcctttgtcagagatgctgccggggtgtgcgcctgcctgtgaggctgggacttccctcgcgtggagtggccagaggagcaggaccgattggttcgccccacccaggcatgagcctcgggggcgctgggcccagaggacaccggcaccctggtgggggctgtgaggccgcattgctcgaggtcagacagcagtaagaagtggccgcccctggtgtcttccctgccccaggagcctgctgcacgacaggacagggccctggtaaggcccgcacccctgcgtccccgggcccctcgcgcctgcagccgtcctctccccatccgccctgccgctcaggagggcttcgtaagcggaagcacagtttgcaacagtttggggttgtcttattttcactgctggcgatttcctggggagccgctggttctgtgcccccaggccgctcctctctgttggggggcccccacctcactgcctgaggacaacgggggtccccaggtttgggcttgcgaataagctgctgagggctctgtgtgaaccgggatttcactgccctgggatgtgcggagctgtacgcccattccacgctctgttttagaaacaaagaaacaactgctgacctgtttcttttttttttttttttgagacggagtctcgctgtgtcgcccaggctggagtgcagtggcgcgatctcagctcactgcaacctccgcctcccggattcaagcgattccccgcctcagcctctcaagtagctggaattacaggcgcccgccaccacgcccggctaattttttgtatttttagtagacacggggtttcaccatgttgaccaagatggccttgatctcctgacctcgtgatccacccgcctcggcctcccaaagtgctgggatgacaggcgtgagcccccgcgcccggcctgctgacccgtttctacgaggcacatgttacgttcctgcgtggggtgccagcaagttttatttcagctgtggtgacctgtgcagctcccagtgacaactcaagtggcgacgccctccgactggccaacgtgggccgatctcccctcacactgccaacctggggacatcctgggtgcagccctgtcctccacccactccatgccagccaaagatgtccccagaggccgcctggtgtcccctggggtggggctcgcttctgtctgcagggtgagcagaagctctcgggccgggcacgaccctcccttcccagaagggttttcggtgtcaggctgctcagcacctcccagcaagtgcctcggcccagtcttcctgtatttatgtggaaggcggcggctggggacggagccctggccgtccccggggacttcaccagggcgatgctgctgtcgccccacgcacagaaggggagacgggcccagggtgtcactgcctggctccaggctgtggggctcttggctctgaccttttctctgagaggctggagtttgactcccagggctgtaggcagaagtcccagcggagtcaggatgtcaggagggcgctgggcacaggtgggggcgcccccacaccgacggccagccctctctgcgtcccgcaggacagcggcatgaagcccccaggcctgccctgcacccagcacggctcctgccctcagcctctgcccttcccggggggatttgaggagcaccgaggcgtcggcctccgcccttcccgggggatccgaggagcaccgaggcgtcggcctccgcccttcccggggggatctgaggcttattttgtcatgagaacagtttcagacaccgtgtgcatatttccgacgtctgctgtaacaaaagaccacaaagttg

SEQ ID NO: 923 - DNA, 3797 bp, Homo sapiens
ttctcaggttttgatcatcattctagaccctaggggacctcaactgggtgtcttgccccctaggctccggaaggggacctcccgtggatctcaggaagccctctggtgctcagaggcccctgggaaagtccctagccatgataccacatgctcagaagccccaccttcacagacgctggccccagatgtagctgccttcctgtgtcacagactctcgattccatggacacagtcctcatgggctccctccagcactgctgttgcctgctgcctaagatgggtgacacttgggcccagcttccctggcccgggccaccccacccagcaatgctgctgatctccctcctcttggcagccgggttgatgcactcggatgccggcaccagctgccccgtcctttgcacatgccgtaaccaggtggtggattgtagcagccagcggctattctccgtgcccccagacctgccaatggacacccgaaacctcagcctggcccacaaccgcatcacagcagtgccgcctggctacctcacatgctacatggagctccaggtgctggatttgcacaacaactccttaatggagctgccccggggcctcttcctccatgccaagcgcttggcacacttggacctgagctacaacaatttcagccatgtgccagccgacatgttccaggaggcccatgggctagtccacatcgacctgagccacaacccctggctgcggagggtgcatccccaggcctttcagggcctcatgcagctccgagacctggacctcagttatgggggcctggccttcctcagcctggaggctcttgagggcctaccggggctggtgaccctgcagatcggtggcaatccctgggtgtgtggctgcaccatggaacccctgctgaagtggctgcgaaaccggatccagcgctgtacagcagattctcagctggctgagtgccggggccctcctgaagtcgagggcgccccgctcttctcactcactgaggagagcttcaaggcctgccacctgaccctgaccctggatgattacctattcattgcgttcgtgggcttcgtggtctccattgcttctgtggccaccaacttcctcctgggcatcactgccaactgctgccaccgctggagcaaggccagtgaagaggaagagatctgacatgcctgcctctcatccctccatgctgctgaccgccacagctgctggccaccagacgccctccctgactgctcactctggttccatggtgacctggctgcctcagtcatggttcaagcaaggtggggacactcatcttgtatgagcatctgctttgggccaggcggcacgctaggaattgggaacatcagatgagctgactcagtccctgccctcaaggcacttccctctggtcaaggagagagatccaaaaactattccctttaagactatatgtcaggactctgagcacgtcattatggaggcccagaggaggagccatcatctgtatctagcaatgtccatgagaattataagattagagtgatttgtgaactgggtcatcaggaaatatctactttgtcaggtaggcaaagaagggtgtctgcacatggcagaggccagaatatgcatagtgtgctgtgttgagaagagtgaacagttcctggtcacttacttgtatagagggggtgtggcacagaactcaaacctacccctcacctcctgacaccaaaactgtcagctctcagcaatgccagccactgcctacagggagtaagaacacctctatgacagcccctggcctccttccaccagcagctaccaggtgagaccacctcccagtgactgcccccatatgaccaaatgtcaccagttggtgaggtcccaggcagcaggctgagaatgggcactttcaatgcccttgctcctgcctctcactcaagttttgcttcagaagagagaggcaggaggcccagcaactggggcagcaagagtcctggcaccttgggatcctaatcatgtgactgttcttgccacagtgctcatgccacagggtctcaccaggaaagtgcactgtgggccacagacccacagcctggcagcacccagagctaaaaggggacaaaggcagcacagttatgaccatatgaggctttgcattttcttctaagcaacttacccacgttaagcatgagggtgagagagctattaaatactaagcccttgccagtgtcaggtactttgaaaagctctctgcacaaaccattccctttgacacacacacacacaaatcttttgaggtgaacactgttgttcccattttacggatgaggcaactaaggctcagagaggttaaagtcacatgccactatgagcaagataaagtctgtgctctttctactgccccatccaagttggggaacatcaccattccctctagagttatataaattcaaattcaactagagctgacaaagttcctcataaggtccaggcactcctctgggcacttttatatctattgactcacttctttcaattctcacagcaacactgcctggtggtttttattatccccatttgacagatgaattaatcgtagagagttgagtgacttacccaaggttgtctggataagccctagaaggaaggcggtaggcagctccattcagggaaactgcatctaatcagtcagtcaaaaatcaagtaactttacgagcaaagcacaattatcatcatcatggtcttcttcatcagtttcgtcagcagcatcattatcttccctctatttgttcagcaccggatagttcatgagtatttttgcatcattctccttgacttttcacatccctgtgcaggaggtaaatcaaacatcagtaatcctgttttacagatgggggaaaaagtctcaaggttggatatgacttgctatgtggcaaggttggggctcaaccctaacacagttctctttccagtgctttctcaagtgcttggggaagagaatgcctcagaaggctgggtagtggggccctggaattcagcatccatgaatgtgctagtggataagctaaatagaaggcggccaaacccatctgctgtacagattgaactatgctcacggtagggcaaattgcaggctctgaaacagggactacacaggtaacacctgaataggagactcctgctttacaatgtgtagataaaacatcagcaatggtggccatggtggcagtcatgtgaaaagtaagatctttgggaatcaagaaaggaagctgtgttaaccactcctgctcaagccctgctgcgtgtgttgcaagagatactaagagagcaagaaagctataggtgagaacctctgcagtttaggagaagaacatcaaggcacagtccaacatgctgataagtctggccaggaggagaattaaaacaggggctttccacacctcccttgccccaagctccagcggtattctatcagcccatcctcctggaaagcctgaaaggaatgaaggaggctaataagtcatcttccaggaaggcatccctcactcgtgcttccctgagctagtcaaccaaaagagtcttcagaaactttgctagacctgaagtacttgaacctgtgtcccctgaatctttcttacagcatctgggacaaatccctggccctgtgacatccgaagcagaactgtgccctgctctctccttctgtgatgaccaaggatggtgaactcaagttgttctctacaagccaggccagcaacctaaatacttggagaggaacttttagaaactataatcctgac

SEQ ID NO: 924 - DNA, 2854 bp, Homo sapiens
atggagggcccgcgctctgcggcgtgtcgcgctcggccagcaacttccccgggcgctgtggacttgaccgcgccgccgccgccgccgctgctccgcattctcaacagccgggcggcccctgccactcgcacttttgcagacctctgtcggagtctcctgcagccggaatctcgggttctttgccggctgcagccagttaactgctacccgcccgctgcctccacaaagctttgtccagttggagtcattcgttgcccagtttgcagccaagaatgtgcagagagacacatcatagataacttttttgtgaaggacactactgaggttcccagcagtacagtagaaaagtcaaatcaggtatgtacaagctgtgaggacaacgcagaagccaatgggttttgtgtagagtgtgttgaatggctctgcaagacgtgtatcagagctcatcagagggtaaagttcacaaaagaccacactgtcagacagaaagaggaagtatctccagaggcagttggtgtcaccagccagcgaccagtgttttgtccttttcataaaaaggagcagctgaagctgtactgtgagacatgtgacaaactgacatgtcgagactgtcagttgttagaacataaagagcatagataccaatttatagaagaagcttttcagaatcagaaagtgatcatagatacactaatcaccaaactgatggaaaaaacaaaatacataaaattcacaggaaatcagatccaaaacagaattattgaagtaaatcaaaatcaaaagcaggtggaacaggatattaaagttgctatatttacactgatggtagaaataaataaaaaaggaaaagctctactgcatcagttagagagccttgcagaggaccatcgcatgaaacttatgcaacaacaacaggaagtggctggactctctaaacaattggagcatgtcatgcatttttctaaatgggcagtttccagtggcagcagtacagcattactttatagcaaacgactgattacataccggttacggcacctccttcgtgcaaggtgtgatgcatccccagtgaccaacaacaccatccaatttcactgtgatcctagtttctgggctcaaaatatcatcaacttaggttctttagtaatcgaggataaagagagccagccacaaatgcctaagcagaatcctgtcgtggaacagaattcacagccaccaagtggtttatcatcaaaccagttatccaagttcccaacacagatcagcctagctcaattacggctccagcatatgcagcaacagcaaccgcctccacgtttgataaactttcagaatcacagccccaaacccaatggaccagttcttcctcctcatcctcaacaactgagatatccaccaaaccagaacataccacgacaagcaataaagccaaaccccctacagatggctttcttggctcaacaagccataaaacagtggcagatcagcagtggacagggaaccccatcaactacccaaaatataaatacagcagcgtgcactgtatttgatgtgagggttcttcatcatataccctactgggcattaaatataagttcctctgaaagggactcgtttttgtggttttcatctgtctataatttggaatgaaaatgtgttgtaggattttgggagcaggcagctggggcgaattaatagtgattttttttttttttcctgaagcatctatctcatgtttttcttttgagagtcagaacatcaaacttaatctttgatctgacttctgattttattcttctgattgattgatagaggtacaaaagacttatcttctgaggacaagcatattcttaatgtgccagacctacccggttcagctgatatagatagatagatagatagaagaaaattgctgtgccatacattaatccagcatttgacacaatatctaaatggtttgccgaagttaatctgtatttataaaacattaactggagtaaatttttctccttaggatgatagaataaaaagagctcacttgaaagaaggctattatttgcattatatcacctgccataaatttaacacagtctggagtgatagctactgtagaaaggaaatagactttgtatgaactctttaagttgaaaagttaaatatatgtggtttggatgtgtgctttaattcagctttagaaattaataccactacccgtgaattatatggcctgacaatatgaattaggtgtactgtactgaagaacagtactccacaaacatgggtggtaacaagagttccatcccaggaggccaaacggtgcaacagaagggtaggttagatgctattaagaaggcacttaatagtacatcatgtaagatggcaactgtattaaagaaaaatccggaaaacaaatgtttgatttttgtttttgtttttatcttgtctgtagaggtattttggtatagcaggttttcaaggccgttttttatacatttctagatctagattttcaacttcttccactgagggaagtatatacatttgggtttgctgtgtgtctatgtgaggtttaattgtacaggtgatccttttacaacaagcctcattgtttgcagtatagcttttagtggaactacccaaaatataaaatacagggagaaaataacttgttagcaatagatccccattgtttatatatataggtcttgttcataatatgtcaattatgtattgttaaaaagtcctactcacttttcaaatatgtgttacatggtaatgtttgtcattgttgttttaaagttgcatttgacatttgttctccaaagagtgtttgaacagattttgataacagtgc

SEQ ID NO: 925 - DNA, 2169 bp, Homo sapiens
cgctccctcacagctcccgtcccgttaccgcctcctggccggcctcgcgcctttcaccggcaccttgcgtcggtcgcgccgcggggcctgctcctgccgcgcgcacccccggggcttcggctccggcacgggtcgcgcccagctttcctgcacctgaggccgccggccagccgccgccatgggtgcctacctctcccagcccaacacggtgaagtgctccggggacggggtcggcttctccatggaggatgctcacaactgtattcctgagctggacagtgagacagccatgttttctgtctacgatggacatggaggggaggaagttgccttgtactgtgccaaatatcttcctgatatcatcaaagatcagaaggcctacaaggaaggcaagctacagaaggctttagaagatgccttcttggctattgacgccaaattgaccactgaagaagtcattaaagagctggcacagattgcagggcgacccactgaggatgaagatgaaaaagaaaaagtagctgatgaagatgatgtggacaatgaggaggctgcactgctgcatgaagaggctaccatgactattgaagagctgctgacacgctacgggcagaactgtcacaagggccctccccacagcaaatctggaggtgggacaggcgaggaaccagggtcccagggcctcaatggggaggcaggacctgaggactcaactagggaaactccttcacaagaaaatggccccacagccaaggcctacacaggcttttcctccaactcggaacgtgggactgaggcaggccaagttggtgagcctggcattcccactggtgaggctgggccttcctgctcttcagcctctgacaagctgcctcgagttgctaagtccaagttctttgaggacagtgaggatgagtcagatgaggcggaggaagaagaggaagacagtgaggaatgcagcgaggaagaggatggctacagcagtgaggaggcagagaatgaggaagatgaggatgacaccgaggaggctgaagaggacgatgaagaagaagaagaagagatgatggtgccagggatggaaggcaaagaggagcctggctctgacagtggtacaacagcggtggtggccctgatacgagggaagcagttgattgtagccaacgcaggagactctcgctgtgtggtatctgaggctggcaaagctttagacatgtcctatgatcacaaaccagaggatgaagtagaactagcacgcatcaagaatgctggtggcaaggtcaccatggatgggcgagtcaacgggggcctcaacctctccagagccattggggaccacttctataagagaaacaagaacctgccacctgaggaacagatgatttcagcccttcctgacatcaaggtgctgactctcactgacgaccatgaattcatggtcattgcctgtgatggcatctggaatgtgatgagcagccaggaagttgtagatttcattcaatcaaagatcagccagcgtgatgaaaatggggagcttcggttattgtcatccattgtggaagagctgctggatcagtgcctggcaccagacacttctggggatggtacagggtgtgacaacatgacctgcatcatcatttgcttcaagccccgaaacacagcagagctccagccagagagtggcaagcgaaaactagaggaggtgctctctactgagggggctgaagaaaatggcaacagcgacaagaagaagaaggccaagcgagactagcagtcatccagacccctgcccacctagactgttttctgagccctccggacctgagactgagttttgtctttttcctttagccttagcagtgggtatgaggtgtgcagggggagctgggtggcttcactccgcccattccaaagagggctctccctccacactgcagccgggagcctctgctgtccttcccagccgcctctgctcctcgggctcatcaccggttctgtgcctgtgctctgttgtgttggagggaaggactggcggttctggtttttactctgtgaactttatttaaggacattcttttttattggcggctccatggccctcggccgcttgcacccgctctctgttgtacactttcaatcaacactttttcagactaaaggccaaaacctaat

SEQ ID NO: 926 - DNA, 2188 bp, Homo sapiens
gtgcggggccggcgcctgccggggaggtcgaggcgctccctcggcgagccggcgccgccggccgggtctcctactgcttgcaaccgggggagggggaccatccgacaactcagccggggctgagagggagacgacgccaaggcggtcttgcatcgcccccggctttccaaatgcagaccctaccggaaccggagcccttccctgacagccgtaggacgggagacggccgaggggtcgcctggactgccccgccctcgcgcggtgacccaccggggaccgtgcgagggtcgcttctaacccttaagagctagagagccgagtcaccctgaggagcgccgtatggcgctggttgcgcgttgttctttaatcagcctcactgaacgcgccgatcccagttttacctcccgggccccacctttccacgcctcctccggcttcccggggtgttttgtgtgtcactctcccacgtacagtccctccccgtccctcgtccctcggccctctcgcccggtctccctagtcgtccagacgctagctgccgcgggcgttcctggttcgcgctcccgccccctccgccccgccgactcgccgcttcctccggagccccagcgtcccgaaccagggactgcatttcccggcaggcgccgcggcccgcggccaatgaggggctgaggatttggcggcggcggcgccccgagagtcggggtgggggggctttgtgcgcggcggcggcgggagaggcggcggcggcggccagcacggaggcggaggccgagggggctgtgcacaggtcgccgcggagaggcgtgcgaattccgagccgagcgccgaggaccgtgctacccaggccgggctgccagccgcaggctcctctctggcagcagcggcggcgcggcgacccccgtccctcggcctccccttcccatcccacctcccgagccttcctcttcccgcagcacgcccggcccggcccggccgtggccctcctcagtgccggccgccatggcagaggcgtccggcgcggggaaaatctagcccggggatttcatgcggcctagctcggttccgcctcctcctcgcgcggccccagcggctgcccgcaccccagccccactccgggcctccgtgtctctcctgtgatcgcactgacacggccggggggttagaatggaacaaactgaaggcccgatgagagaaagggaaagttaaggatgctggagcagaacaatggatttctctttctctttcatgcaagggatcatgggaaacacaattcagcaaccacctcaactcattgactccgccaacatccgtcaggaggatgcctttgataacaacagtgacattgctgaagatggtggccagacaccatatgaagctactttgcagcaaggctttcagtacccagctacaacagaagatcttcctccacagccaccacctcctccttcggtaccacaaactgtgattccaaagaagactggctcacctgaaattaaactaaaaataaccaaaactatccagaatggcagggaattgtttgagtcttccctttgtggagaccttttaaatgaagtacaggcaagtgagcacacgaaatcaaagcatgaaagcagaaaagaaaagaggaaaaaaagcaacaagcatgactcatcaagatctgaagagcgcaagtcacacaaaatccccaaattagaaccagaggaacaaaatagaccaaatgagagggttgacactgtatcagaaaaaccaagggaagaaccagtactaaaagaggaagccccagttcagccaatactatcttctgttccaacaacggaagtgtccactggtgttaagtttcaggttggcgatcttgtgtggtccaaggtgggaacctatccttggtggccttgtatggtttcaagtgatccccagcttgaggttcatactaaaattaacacaagaggtgcccgagaatatcatgtccagttttttagcaaccagccagagagggcgtgggttcatgaaaaacgggtacgagagtataaaggtcataaacagtatgaagaattactggctgaggcaaccaaacaagccagcaatcactctgagaaacaaaagattcggaaaccccgacctcagagagaacgtgctcagtgggatattggcattgcccatgcagagaaagcattgaaaatgactcgag

SEQ ID NO: 927 - DNA, 2216 bp, Homo sapiens
actcccaagccccacctctgtcacccacaccccgctcctacagcactgctctcttcttagctcccatgccccaccgtctgctcagggacttcatttcataagttgggtcctgacccaacgagctggaggccttcctgctcttccagcaaggaaggaagcagggcaggacaggacagagcaggcactagcagggaccaggagggaggcgcctaggccagctggtagtcatggagcaggctgactacctgcctgccacctctggagtccctccatgcccctgggctccagggccatcccagttaccatcctgacctgccctctggcctttgcctccaatgcccagctctctccctccaaccattgccacacccccaaaactggcctctccagtcagggcttgggctctgcctggggtccctgctctgtctttcaagttctttgtcccgcaggaccctggggccggtctctgtctgcttcccacacatactgctcccacctgcgccctgccttgtgccaccccagccccagctggcccatgctggttgcctccatcctaggcccttttttctgcacagtgtcctggcttcctcagacctccactccggggagtttggcttcttcgcagcttcccgaggcctccttgaatctacgctggcgctcagggtctgacctctcctttcagatcctcagaatggcccttggtgctgcaggcgcggtgggctccgggcccaggcaccgagggggcactggatgactctccaggtgcaggaccctgccatctatgactccaggtcttcagcacccacccaccgtggtacagcgccccgggatgccgtctggagcccggatgccccaccagggggcgcccatgggccccccgggctccccgtacatgggcagccccaccgcccccgcgcggagccgcagtgccaagaggaggaagatggctgacaaaatcctccctcaaaggattcgggagctggtccccgagtcccaggcttacatggacctcttggcatttgagaggaaactggatcaaaccatcatgcggaagcgggtggacatccaggaggctctgaagaggcccatgaagcaaaagcggaagctgcgactctatatctccaacacttttaaccctgcgaagcctgatgctgaggattccgacggcagcattgcctcctgggagctacgggtggaggggaagctcctggatgatcccagcaaacagaagcggaagttctcttctttcttcaagagtttggtcatcgagctggacaaagatctttatggccctgacaaccacctcgttgagtggcatcggacacccacgacccaggagacggacggcttccaggtgaaacggcctggggacctgagtgtgcgctgcacgctgctcctcatgctggactaccagcctccccagttcaaactggatccccgcctagcccggctgctggggctgcacacacagagccgctcagccattgtccaggccctgtggcagtatgtgaagaccaacaggctgcaggactcccatgacaaggaatacatcaatggggacaagtatttccagcagatttttgattgtccccggctgaagttttctgagattccccagcgcctcacagccctgctattgccccctgacccaattgtcatcaaccatgtcatcagcgtggacccttcagaccagaagaagacggcgtgctatgacattgacgtggaggtggaggagccattaaaggggcagatgagcagcttcctcctatccacggccaaccagcaggagatcagtgctctggacagtaagatccatgagacgattgagtccataaaccagctcaagatccagagggacttcatgctaagcttctccagagaccccaaaggctatgtccaagacctgctccgctcccagagccgggacctcaaggtgatgacagatgtagccggcaaccctgaagaggagcgccgggctgagttctaccaccagccctggtcccaggaggccgtcagtcgctacttctactgcaagatccagcagcgcaggcaggagctggagcagtcgctggttgtgcgcaacacctaggagcccaaaaataagcagcacgacggaactttcagccgtgtcccgggccccagcattttgccccgggctccagcatcactcctctgccaccttggggtgtggggctggattaaaagtcattcatctg

SEQ ID NO: 928 - DNA, 656 bp, Homo sapiens
tttgctgggtccagacaccggttccgttgcaaacatttttaaagggctggttattcttcctgaaatgagtttggtgattagaaatctgcagcgagtcatccccatcaggagagcgccacttcgcagtaagatcgagattgtaaggaggattttaggagtgcagaaatttgacctggggatcatctgtgttgacaacaagaatattcagcacattaatagaatctacagagatagaaatgtcccaaccgatgtgctttcttttccatttcatgagcatctgaaagcaggtgaatttccccagcctgattttccagatgactacaatttgggagacattttcctaggagtggagtatatcttccatcagtgtaaagaaaatgaagattacaatgacgtcctgactgtgacggccacccgcggactctgtcacttgctgggattcacacacggcacggaggcagagtggcagcagatgttccagaaggagaaggcggtgctggacgagctgggcctacgcacggggacccggctgcagcccctgacccggggcctcttcggagggagctgagggccgcgttccttctgaaagcgggacgcgggaggggtggaggctgcggggagccggggtcgcacacaaataaataacgaatgaacgt

SEQ ID NO: 929 - DNA, 1976 bp, Homo sapiens
attacccagtctcaggtattttttttagcagtgcgagaacgaagggactaatacaggtttggagacacgtctttggagaaactattgatacttggcgtcctgtggcatttccttgccattagcacctccaacgttatgctggagaaaaagccgttccaactcttcaccgaacgccgagtcagagagatgtggggaaaccaccgaaagagcttgccctgtgtcttctggacagactagtgccaaacccatgcctggaaatgggtagaagttagggaccatggccgctcagcctctgcaggaaaatggattactgcatcaggaatgatgactttagagaaggccaaaggtgtaagtttcttccagcaggttctgaacctccagaggcagctggcctggggttatttgggattcccagtgcaggactgcctgaaaatgtgaggcgcccaaacggggctgctggaccacaggattcccaggacctgcaggcacactcaagagtggcctgccagaggagacacattgcctgcctcccaggaagcaaatttggaggttgccagtgggagaattgccaagaaccgccatccctcccctgggacacacaagctaaggaaagaaggaattggccctctaagtccagaaagcacaagatcacatcatcacaacaccagccaagtaaaacatccctgctcctcacctcttcagagcccaagggggctggggaggagaagaaatgagagtggaggaggaaagaggtttaatatgaatgaagtttggagttttgacatgactcgacattctaatgacttcatttagactgttgctacactcagaagtgacttggagacattttatttttataatcatcaccatattgttattggtcatgatctaagggtgaggagaagggctaaaggatcggcccaatggatcattcggggcaagtaaagaactatcccaccagttgtgtttgaatgggcagtgagagggaaaatcaagttgctacttgcacccctctaactcccaacttccactctttcaacataccagacatgaaagctgagtaaatgacctcaaaggtacagcgatgacagggtgtggtggtggtagttcttggtttcctacattgcatcttcaaatcgggttttagaatggatgacactggaaggctagaaatctcaggtactgacatgtgggctggtttataattgtcttcaaaaattcacccacaataggatcagacaagttagtatggccataggtgctacaatgggagaaagttttaaatgctgttcagatcggaagacatgggtcaaaaagatcaagaagagttgacatgaggcaaacattttatatctccattcaagagctacctgatgaggtttcacccatcagggatgcaatgagaatttactgggcgcctagcactgcgcagacacaattcaagcaaaaggcaaccaactctggcatccaagtgcaggccagcagccaagttcttcctccttatgagctgacatcggattgacagatggccccagagaaagcttcttggatcatatctcagtaaccactggcccagcctgtcaaatccagagatttaagatggcatagcaccttaaatctggaagaacttagcaactttataatgtcaaatccagggggaaaatacgcacacagagaaaccagaaaagcatagaatggtggggagaaagaaagaaagaaaatgaaaacactgtttccatcggcagaattagcctttgccaggaaaactgcaatgttgtcttggtaggcacataattcatttttctacatgttcagaagtaaagaaaaagccagacccaaaaagccagaccctgggggaaatcgtggatactgtttgtaactttggcaaagacaatatatttgtgaactcagcctcatgtgaaatgcttgataatctcaaaaagtaaatgccacagcgtgtcgtatactgtgtggtc

SEQ ID NO: 930 - DNA, 3739 bp, Homo sapiens
ttcttcaaatatttaccttatgtgaaatgcagatttactgggtgctaactgaagtctcacaagaatgtcaccattcacctcacctcaatgtctaaataccaaacctcttgtaagcctctttagaaaaacagccacagatgtgtctgtggcttgtgttttcctggacatgccctaacgctggcagaataaacctcggttgattgagatatttgcctcaattgcttctttcagttaccagacctgaccattgttaagcgtgtcccagaggatgttggggaccaattccaaggatcaagaaattctcaactggtaagggctcccctgccttccaccctccccccactgtccttcccagcagtccagggtgctgcccaccccgactgtctccgacgatggcgcacgcccctgcccttgccctccgtggactttctcagccgcctgggacgtgccctgctgtgcccctgcatcccacttgctgcccagggcgatgcttcatggtgacctgcgactggctcagcaatgatggactctcctgggagggtgaggccctgggtgccagaaacactgcctgtgttcagcagctggagttaaattccagctcccaaggggtgtggcggggaacatgctgcacttggccaccactacgggtggcccagaccccacattatccccatgtctggagctcacaggcccccttggagggggccagcaacaagagctggcttcagaatgagcaagcagctcaggactgcgttcttcagagtcccttggatctgttctcaggggcggggcacgttggaacgcacgggacagggaagtgatgacagttaacccaaactcagtgaagggcaccactgggttccaaatgaaccatcgctcctcccgactcagacccctggggtctctcagccaggctttcggttcccgcttccatcctggatgaggtgtcattctgcggggccacagggcacatggccagggcagtcacccagcacctgcgcccgagggtcgcgtgggttgagtgctccaccgtggctgtgtggagattccgagaagtgctctctttgcatctgtggtttgtaagggaagtccaggggacaatggagccggcactgagggactggaactttgtctcttacgtgattctgactccaccacctccccaggaggggcctaggttgtgctcccacctcagcccccctccccaccctgggaagtgacctgcctactgcccgtggtctctggtgggcctggcagctgcccctgccttggcagccagtgctacagcctcttctactgccctccagggacctggggtgtcctgtgcagagactgtgggtcaatgcggagccttgggaagggaggtgacctggcgcatcggagccctgtgggggacagcctgggtgccttgtgggcacagcctgcaagggacacagtgccctcacacctgcttctcacctggcccagctgtgctctgctgagtcaagactggagtggtcctgtggccatttagcagagtggtttttatgtctgttgaattgaataataataaatcagggctcattttttttcagttcgtagtttatcaagcaatttcgttttcttggattttacaagctggcgatgggagagctggctctgctctgagacgcacagtatagcagccaccaggccctgtattcgcggcagctcttggactctgaggtgcattcactgaggtgagcttccaggagtagtttttcctacctacagacaggctggagagctggagtcccaccttgagctcttttgttggccctgtcaccagcttgtgtttccatgatccggcatttttttgtcaacatgaataggagagtcttagtgatgtgcactaagcgcacacgtgcgtgacagggagagccacgcttccacaggacggcaagcgcagacgtgcgtgacaggcagagccacgcttccacaggacggcaagcacagacgtgcgtgacaggcagagccacgcttccacaggacggcaagcgcagacatgcgtgacaggcagagccacgcttccacaggacggcaagtgtgtgtgtctcagagctggctgtttgcagatggaaaatacctcagctatgctcaaatgaagatgtatttttatattgaaatcatgtacttttttccttaaaagtcataatgaaatcttccatccatgaatcaaggtgaatttccgctaaattgctttaaaaaaatagctgtgtgtatactcttcattttaaaaaaaggatcgactctccatttccaaaagttctcagggtttagctcagagggttcagaaatgggaagttgctcttcctttgtgagctgtgggagattttcttctagtactttagttcattgagttggggaaatagcgatcgccacctcaaagctgctgtgctgaatgctggctggtggctatggggtgaggaaggtccgctccggcccaccagccctgggcctctgactagatgaggcctcagaggggacagttctggagaggcagggggcagtgaatgcaaagaattttgtttatggaaaaagccctctgtgcatcctgtaatgatactgtgccatctgcgtcatccctcgcttgttcaccccatggatacgagtgctgcacacccagagggaagaggtgccctgtggtgagcacggggctggtgcccgtcctcagggatggcagccggcaggggctcagggcagcccaggccactgtgacaccagcgggagagggctggactggtgcctggagccaggtcagggagagagggaaagtgggaggctcccaggagcgggaagcattgggtggaggaccgggaaaggccagcacaagctgagtgcgctgcgtgtgtgggaaacacactccatccatttggtgtttagggaagttcttttttagcagaaatcttttaaatgtataaataacttgccattaaaaagagagtgagccaatctagtggggcagctggcacacagaagccgccacagccaggtctgttcctcctgtgggcttctccgcagagctcaagcaggaggcccctgagaactgcgggacacacagtgtgttgtttctgacctttgccctgctgctgtgagaggtccccaagtgaacttccacagcactccatccagagaaagcccgcaccatgcacatctggacggtcagcattctgaggacgtttgaaagcctggaccccaccatgtagttcccaaggtcagcacctttccccaccaccacggggtgtgacacctcctcgtcaaggacaaatcttaggacattctttaaactgcgtgatttataaaatacccagatggctgtttacttcagcttggccttctgtgcaaacaagggaccgagaggtaggccccttttctgctggaaatggtcttttcccagtatgtgtccaaacccgagaaacctcaatgtgtccaagcctgagaaaacccaaaacacacaacacgatttggaagttccctttttttagcgtaatggaagtgtaagcagaaatcatcaacattctctgagtgttctgagattttttaaacaaaaacattttatttcaaagggcagataagtattttgctagacacaactgaaaaaaacagccagagaacaattggagtttgtcttaataaataacaaaatgccatttatgtctcttaaacttcatatgacacaatacacatcttaaataaataacccagtctgttgctatgtatt

SEQ ID NO: 931 - DNA, 2570 bp, Homo sapiens
gattagctgggtgtggtgtcacacacctgtaatcccagctactcaggaggctgaggcatgagaatcatttgaacccgggaggcagaggttgcagtgagccaagatagtgccactgaactccagcctgggcaaaggagcaagactcgatcttggaaaaaaaaaaagttcctcaagagagtttagatccttcctcaccatgtttgagaaccagtcctaatctccgtcttacccccagtcaaagataatatataagcccacttggctgatgagcccttacatagagatacaataaacagtcctccatttttttttttgaaatggagtcttgctgtcttgcccaggctggagtgcaatggtgggatgttggctcactgcaagccctgccacccgggttcaagagattctcctgcctcagcctcctgagttgctgggattacaggagtgtgccaacatgcctgctggtttttgtatttttaatagagacggggtttcaccatcaaactcctggcctcgtgatctacccgcctcggcttcccaaagtgctgggattacaggcatgagccaccacaccgggccctcccttttaaattactatttaggaatagagaaaggcctcaagctgcttgcattaatttcacatcttcattctattatctgggttaggtagggcattgtgtttcaagaaagagtaattcaacctttaagtcagtacccaaagggttcaaatccagtagtgggctatagtgtctggagattcccagtgagataagaatcatcgccaagcatgtgacgcatccactcggagcaggactccagcaggtagcttctctaacaggaaacaagtcccagacaatgaggcgagcaggccaaccaaagttgggtgagagatggagtgcaactcaagcaattataataatggctagcttttatataaggcttactatgtgccaagcactgttctaagcacttccatgtattaaataatttaatcccgaagtggaccttttacatagccactattatgaacccctttcacaaatgaggaaaccaaagaagcacagaaggattaagtaacttgcccaaggtcacacagctagtaaggagctgagctgggattcagcctccagcagggtggctctagaatacacatctttaatcattaagccatattgcttctccagcaggctgatgattagtatagtgttgtgctcaacaggggaagtgaagcacaatagaaaagaccatcagaagccttaatatatgcacaaggccggtcattaaaagaaaattgcatcttggtgaacaccagaacacttcaagcacaatgaatcccacaccttataacagcaaggccaattctagaccaacctcaaccacaggatggagtaggggatgctcctgctgtccctgctctagcagggatgatggggtcaggaaaggatggggttggacattgtcttctcagcttaggctgccacaacaaaataccatagactgggggacttaaaaaaacagaaacgtaggctgggtgcggtggctcacacctgtaatcccagcaactcaggaggctgaggcaggagaatcgctggaacctgggaggtggaggttgcagtgagccaagatcgcaccattgcactccagcctgggcgacagagtgagactccatctcaaaaaaaaaaaaaaaataggaatgtatcttctgacagttctggaggctggaagtctgagatcagggtgctagtgtggttaggttctggtaaggtctctctttctggcttgcagacggccttcttcttgctatgtcttcacatggttttcctttggcatatgcacatggggagatagcaatatctctcactcttcctcttcttataaggccaccgatcctctcaaagtagggcctcatctcaccttaatcatctcctaaaagccctatctccaaatacagcaacattgtaggtcagggattccatatacaaatttggaaggggaagcatttcattccagagcaggaatttagctataatgagcatccaataatctaaaaaatgtaaactcatagaagcagaagaatgatggttaccaggggttttgcaggggttacgggggaaggaggagattgggaagatgttggtgaaaggatacaaaatttcagttagacaggaggaataggttcgagaaaacttgttctttgtgcatcctggtgactatagttaataaaagtgtattgtattcttgaaaagctctaagtagatgttaagtattctcaccacacacaatatattaaagtatgtgaggtaatgcatatgttaattaattagatttagtcatttcagagtgtatacatatttcaaaacagtatgctgtacaccatatgtatatacaagttttacttgtcaattttgaaagaaagaaaaaagagagaaagaaagaaagagaggaaagaaagaaagaaagaaagaaaaagaaaggaaggaaggagagagagaagaaagaaaaaaggaaggaaagaaagagagagaaagaaaaagaaagaaagaaagagaaagaaagaaaagaaagaaagaaag

SEQ ID NO: 932 - DNA, 1960 bp, Homo sapiens
aaagcgcaaggtcccagcgccccttggatcctcggtggcagggtccgggcaagtgtcattgcgagggttcaggaagccccggcctgtgatcgtgagcggaaacccttcctggagtctccccaaagccatggacagccctagtcttcgtgagcttcaacagcctctgctggagggcacagaatgtgagacccctgcccagaagcctggcaggcatgagctggggtcccccttaagagagatagcctttgccgagtccctgaggggtttgcagttcctgtcaccgcctcttccctccgtgagcgctggcctgggggaaccaaggccccctgatgttgagcacccccccaggcagcagcagcagttttcatctctggatgacaagccccagttcccaggggcctcggcggagtttatagataagttggaattcatccagcccaacgtcatctctggaatccccatctaccgcgtcatggaccggcaaggccagatcatcaaccccagcgaggacccccacctgccgaaggagaaggtgctgaagctctacaagagcatgacactgcttaacaccatggaccgcatcctctatgagtctcagcggcagggccggatctccttctacatgaccaactatggtgaggagggcacgcacgtggggagtgccgccgccctggacaacacggacctggtgtttggccagtaccgggaggcaggtgtgctgatgtatcgggactaccccctggaactattcatggcccagtgctatggcaacatcagtgacttgggcaaggggcgccagatgcctgtccactacggctgcaaggaacgccacttcgtcactatctcctctccactggccacgcagatccctcaggcggtgggggcggcgtacgcagccaagcgggccaatgccaacagggtcgtcatctgttacttcggcgggggggcagccagtgagggggacgcccatgccggcttcaacttcgctgccacacttgagtgccccatcatcttcttctgccggaacaatggctacgccatctccacgcccacctctgagcagtatcgcggcgatggcattgcagcacgaggccccgggtatggcatcatgtcaatccgcgtggatggtaatgatgtgtttgccgtatacaacgccacaaaggaggcccgacggcgggctgtggcagagaaccagccctttctcatcgaggccatgacctacaggatcgggcaccacagcaccagtgacgacagttcagcgtaccgctcggtggatgaggtcaattactgggataaacaggaccaccccatctcccggctgcggcactatctgctgagccaaggctggtgggatgaggagcaggagaaggcctggaggaagcagtcccgcaggaaggtgatggaggcctttgagcaggccgagcggaagcccaaacccaaccccaacctgctcttctcagacgtgtatcaggagatgcccgcccagctccgcaagcagcaggagtctctggcccgccacctgcagacctacggggagcactacccactggatcacttcgataagtgagacctgctcagcccacccccacccatcctcagctaccccgagaggtagccccactctaaggggagcagggggacctgacagcacaccactgtcttccccagtcagctccctctaaaatactcagcggccagggcggctgccactcttcacccctgctcctcccggctgttacattgtcaggggacagcatctgcagcagttgctgaggctccgtcagccccctcttcacctgttgttacagtgccttctcccaggggctgggtgagggcacattcaggactagaagcccctctgggcatggggtggacatggcaggtcagcctgtggaacttgcgcaggtgcgagtggccagcagaggtcacgaataaactgcatctctgcgcctggctctct

SEQ ID NO: 933 - DNA, 2131 bp, Homo sapiens
aggctgattcagagggtctgggtgaatgatttccaggtgattttaagactgtgctgagaaatagggcttttggggccttgtccttcaggatcaaagcatgatgctgtgtggcaatgcagaccacccaggaaccatcccaggagataagctctttgcacctcattgtctttttctgcttatgttggagcaggatgctgggggctgtcctgggatggggtgtgggacctcgtgctatttaaatacttttgcacttgaccttctgctgagtggagtggtggtttgccatcagctcagttccagtggagctgaagagacatctggtttgagtagttttagggccaccatggatatctcttcaatgcaggattggctctttccatctgctctttcattcatttgtttttgacagatagtattaaatgtttaccatgttccaggcactgtgtgaggctctgaaaatacaggggtgagcaaatccagatatcctccctgccatcatgaagtttggagtctatgagataggaccccctccctatggagaagccaccaatgcagtacagggtgacctggggccagagacaggacaaatgtcacctcctgcctccatgagatactctcactagtcatattgtgggcaagaatgtggcttacacccctagggttaacaggatgctacccaagctcatggaggaagttgaatcttaagttcccttgaaactttctaccttggtggcttttctataattttcttttttctttttctttttttttttttttttgagactgagttttgctcttgttgcccaggctggagtgcagtggcaccatcttggctcaccgcaacctctgcctcctgggttcaagtgattctcctgcctcagcctcccgagtagctgggattgcaggcatgtcccaccatgcccagctgatttttgtatttttagtagagatggggtttctccatgttggtcaggctggtttcgaactcccaacctcaggtgatccgcccacctcagccttccaaggtgctgggattacaggcatgagccactgcgtctggccttctataattttctggtagtcacgatggaaacaaacaaaacaccttagaaccagagatcgaccccctcaagcaatacatcaattcccttcacaagaaacgtcggggctacatgagtatctgtgttgaatgcggtctgaaatgatcctatggattttcccggctggttgccactactgtacaacattcagtgcccacatccatctgtgccattaagcttttttgagacatgagagatgcctcttccctgctgtatgacatgcatttgggaagttggaaagaaatgacaaaatcagggagaaaacatccaagcttcttacctgtagatagaatcagccctcacttggtgcttattaccagttattcaagaacaataacaacaacaaaattagtagacatccaagaagcacatattaggaccaaagatagcatcaactgtatttgaaggaactgtagtttgcgcattttatgacatttttataaagtactgtaattctttcattgaggggctatgtgatggagacagactaactcattttgttatttgcattaaaattattttgggtctctgttcaaatgagtttggagaatgcttgacttgttggtctgtgtaaatgtgtatatatatacctgaatacaggaacatcggagacctattcactcccacacactctgctatagtttgcgtgcttttgtggacacccctcatgaacaggctggcgctctaggacgctctgtgttcactgatgatgaagaaacctagaactccaagcctgtttgtaaacacactaaacacagtggcctagatagaaactgtatcgtagtttaaaatctgcctcgcgggatgttactaaactcgctaatagtttaaaggttacttacaatagagcaagttggacaattttgtggtgttggggaaatgttagggcaaggcctagaggttcattttgaatcttggtttgtgactttagggtagttagaaactttctacttaatgtacctttaaaatagtccattttctatgttttgtataatctgaaactgtacatggaaaataaagtttaaaaccag

SEQ ID NO: 934 - DNA, 1821 bp, Homo sapiens
gacacgcacacacatgcactcacagatacacatgcatatatacacacatgcacatacactcacatgcacacacatacacatgcacatatacacatgcacacacgcatgcatacatacacacgcacatatacacatgcacatacacactcatacacacacacatatacacacatacacatgcatacacatgcactcatgcacacacacacatacacatgcacatacacaaacatgcagagatatgcacatatacacatgcacatacatacactcacatgcacacatagacacacatacacatgcacatatacatacatgcacatacacaaacatgcacacagacacacatacacatacacacatgcacatacacagatacactcatatgcatacatatacacatacgcacatatacacatgaacatacacatacacacatgcatgcacatatacacacatgcacacacacatgcacatatacacacatgcatacacacacatgcacacagacacacacacatgcacacacatacactcacatatacacacattcacatgcacacacatacacagacgcacatatacacacaggcacacacatacactcatgcacacaaataaatacatatatacacacatgcatatacactcacatgcacacagacacatacacacgcatatatgcacacatgcacatacactcacatatacacacatacacacatgcacatacaagcgcacatatatacaagggcacatacatacacatatgcacacatatacacatgcacatacacatgcacacatacacatacacgtacatatacacatgaacatacatactcacacatgcacgcacatatacacatgcacatacacagtcgtatgcacacatacacacatgcacatatatacacacatgcacacacatacatgcatacacattcactcagacacacacttgcacatatacacacacacactcacatgcacacagacacagatacacacatgcacacacacacatatacacattcacatgcccacacatacacgcacatatacacacatgcacacacatacactcacatgcacacaaatacacatatacacgcacatatacatgcatgcacatacacccatacactcacatatacacacatggacacacacacatgcacatacatatacacacgcacatatacacgtatgcacacacatacacatgcacatacacacatacactcacatgcacactcacatggacacatacccacatacacatatacacacatgcacacacatgcactcacatgcacacataaacacacatacacacgcacatatacacatgcacatgcatacacatacccacactcacacatacacacatgcacatgcacacatacacataaacacatacatgcacacatacacatacacacacatacgcacatatacacacatacagatgcatacactcacatggacacatatacacacacatacccacatacacatatatgtatacactcacacacacatgcacacacctacacacatatacgcacatagacacacatacacatacgcacactcacacacatatatacacatgcacacacatatacatacgcacatacacacgtatatatacaggcacacacatacccacatgccgtgtgcacgcacacacataccatgaccagcctgggccagacccacagcgtccaagggatttaagaaaaatactgccgtctaccccaacccctcaccctgcttttctagtggggatggcgatatatgccctaacttcctccc

SEQ ID NO: 935 - DNA, 1996 bp, Homo sapiens
aggagtcgcggcctccccagctagtggtcgcgggcgcggtcgcaggggcagcggggtggccgccgcgccaggcgtggagctgggtctggcgggctccgagaggcccgggagcggcgcgcagagcagcctccggccgccgccgcgcagagctgccagagtggactgcactgcttctcccagcggggcaggatggcggtttcatgtctggttggataaggccttgcctgcggaaaccagctccatccccaggccctagcagaggctcgcgtgtccccgtccccaggtcaggtcaggatgggcaccgtgcgcccacctcgcccctcgctcctgctggtctccacccgggagtcttgtctcttcctcctcttctgcctgcacctgggcgccgcctgcccacagccctgccggtgccctgaccacgcaggggctgtggctgtcttctgcagcttgcggggccttcaggaggtccccgaggacatcccggccaacaccgtgctcctgaagctcgatgccaacaagatctcccacctcccggacggggccttccagcacctgcaccggctcagggagctggatctgtctcacaacgccatcgaggccatcggctccgccaccttcgcgggcctggccgggggcctgcggctgctggacctgtcttacaaccgcatccagaggatctccaaggaccccatcggcccggggccctagcgcctgttccggcagacccccgccggtggctgctgtcacttttgtagtaggtggtgactgatgctgcttttgctcttccctgaggcaggtgtcacagccatgtgtgctccccactgttgcactcaggcacagcagcacctccaggctgggtggttttgccacacatccgtgtgacggatgaggaacctgaagcttagaggaacggaatgactgcccgtgacgataccatcaggaaattatcccagtggaacttcaacccgggctgtccatcgtgacattccgcctccttccaccatgccagcctctcccacacggggccctgcaggctgtggatatgcactcagaggactaagggggtgctctgcaagcgagagggttcaccagagggagcttgggtgcaggttcacccgctgaaggcgctgataagtcctgtgctgaggagctgacttgcccttgtttacttacaaagtgcattgtaggtaaacatgagccttgttccagtgttcgaagtacattggaacgtaagccctgtttccagagcaaagtaacagagaccaggtttttctagagagctaagtgggatgtgtagctcaaacaaactgtcctacccttttttattctcaaatgtttgttttgagtaaccgtagtgccaaaatttcagttcagtaatggggtgaacaatatggagagagacctgggaaaagtccagggtagcttgcccaggggaagacagcagccacatacctgggggcccgcctgcttcctgcccctctgggtgtgcctgatgcgggaggccctgccccagggcgatctcagctcactgcaacctttgcctcccaggctcaatcacttctgctgcctcagcctccctagtagctggaattacaggcatgagccaccacgcctggctaatttttgtatttttagtagagaccgggtttcaccatgttggccaggctggtctcgaactgttggcctcaagtgatccgcccgcctcagcctcccaaagtgctgggattacaggcgtcagccaccgcgcccggccctgtgccttgctttttctactcactaagatataaaacagctctttttccaaggcccggagtactggggattgatgtttcaaggccaatcaatgggatgcttcgttttctccagcaacaggaactctctcttttcacctttgctgccaggaatctcagagataatttagtgctcaatttactaaccttacttcacattcaggttagatgttacctccacctatatgatagtaattcctaatttt

SEQ ID NO: 936 - DNA, 2515 bp, Homo sapiens
gttcaacaacaagcttccaagatgccgcccaaaggaaaaagtggttctggaaaagcggggaaagggggagcagcctctgggagtgacagtgctgacaagaaggctcaaggtcccaaaggtggtggcaatgcagtaaaggtcagacacattctatgtgaaaaacatggcaaaatcatggaagccatggaaaagttaaagtctgggatgagattcaatgaagtggccgcacagtatagtgaagataaagccaggcaagggattcccagcctgcagcaacatgctggtcaccatagagacctgagaagcaccctcatctcattggtatcatatttacaaaccaccccttaaagtggattattttgcagatggctgatctcatctattcaatgttgattctattagttccaatttcagaaggtgacattttctgactttgtccccttaagcacaaacaaaaactatggatttttgtttttgttttcagaaaagagaaagtacaaggtgtgcttggggaacagcaaggaaaccagacagatgtgggggcgggtttgtaggggaactgctggatgtacctcattaatttgttcatttgttcagcacccacagggtgccagtgaacgggctaggtgctggggatagagtggtgaacaagatgagccttatgcacctcacagtctcctgggggagacagccaaatagacaattttaatacaatgtggcaaattctatgatgggaagaagagagaaatggtgtgtgtgagtccctcaccttcccagaggtttcccaggggaagcaacgtttcagctgagacctgaaggatggatgacagtccaccagaaaaaagttagtggagcggggacaagcagggttgcagagtggaagaaaaatgttcctgtgagaagaaactgtccaaagagtctgaagagaaaagggaacagggtgaatttgaggccctacaagaaaaacaggagaccattcaacaggagacgcccagggagcaggtggctttgtgggcctgatgtccaagaaagaagtcgtggtggtaaacagagacttgggattgcaagctactgttgtctttctattgaaaaaatagctgagcaccacactagggaggccttgcaaggacagcccaaagaatttgaacttgattctacaggcagtgattttgaacaagaggttttgaagagaacgtgacacacgtcaagctgagctctagggagtgggcagcagcctgcagaagagggactaggctaggagcacagaaagtagcccacggcagaggtagcagaaggaatggaggagtgcccatgtgaggggtactgaggtggcacacttgccagaatcagggcagcctgcttggtctcataccagctggaaccagttcctaccagctcccaagggctaattgttaaactttcaggaattttctcagcattcattaaaaatgaaaaaaagtatcaatattaaaaatatttttgctggacatggtgtctcaggcctgtaatcccagctgctcagaaggttgatgcaagagaaacacttgaggctaggagttcaggaccagcctgggcaacatagcacaatcctgcctcttttttgtttgttttgtttttagagacagggtcttgctttgtcacccgggttggagtgcagtggtgcaatcatagctcactgccaccctgaactcctgagctcaagggatcctccttcctcagcctcccaaatagctgggaatacaggcacataccaccttgcctgactaatttttttttttttgagacagagtcttgctctgtcgcccaggctggagtgcagtggcgcgatctcggctcgctgcggactccgccttctgggttcatgccgttctcctgcctcagcctcccgagtagttgggactgcaggcgcctgccactgcgcccggctaattttttgtatttttagtagagacggggtttcactgtgttggccaggatggtctcgatctcctgagcttgtgatccgcccaccccggcctcccaaagtgctgggattgcaggcgtgagccaccgcgcccagcagcctggctaatttttaaaaaacattttggctgggtgcggtgttgcatgcttgtaatcccggcattttgggagcccgaggtgggcggattgcttgaactcaggagtttgagaccagcctgcacaacatggcaaaaccccgtctctacaaaaaaaaaaaaaaaaaaaaaaaaaaaaaattggctgggcatggtggcgtgtgcctgtggtcccagctgctcgagaggctgaggtgggaggattgcttgagcccgggaggtcaaggctgcagtgagccgaaatcagtgcagtgagaccccgtctcaagaaaaaaattttttttttttttgtacaggtggggtcttgccatcttacccaggctggttttgaactcctgggctcaagcagtcctcctgccatggcctttccaaagtgctggaattacagggataagccaccatgcccagccaaaaaattc

SEQ ID NO: 937 - DNA, 2721 bp, Homo sapiens
ctagaaatacacctcccagaaataacaccgtacggtgggtgcccctggaggtggctctgccatagttgacaaactgaggagttggaaagctgatgtcctaactactggctcaagatagaacacacttctcagccaaggcatctatttcccagtccccttcacaactaggtcatgtcactgagttctggaattgatttgggtagaaatgatgtgtaccactcctaagcctggtgcataaaaacaccctgccccaacctgcacacgttctcttcaccctcctgctggctggctatggacttccacgaggcccttaaatccacatcaaaaatagcagtggttcggctcaggcatggcggttcaagcctgtgatcccagaactttggaaggccgaggaggattgcttgaggccaggagttcgagaccagctcggacaacaaagagactcccgtctctaccagaaatacaaaaattggccaggcatggtggtgagtgcctgtggtcccagctgctcgggaggctgaagtgggaggaatgcttgggcccgggaggtggagggtgcagtgagctgtgattttgccactgcactccagcctgggtgataagagtgtgaccctatctcaaaaaaagaaagaaacatctttatattaagccactgagattttgagttttacgtggcagagtagttggtgtttcctcagctgataaaggaggggagctccaggagcccgccttgggcttcccaccttgagagcccttctccgagtcggcagagcatgtgcatgctggccagctgctcagaacttctactcaaataatatatttgagaactggggaggtggccgggcacagtggctcacacctgtaatcccagcactttgggaggctaaggtcggcagagtgcttgagctcaggagtatgagacgagcctgagcgacacgggctctataaaaaatttaaaaattagctgggtgtggttcgtgcctgtagtcccggctactcaggagactgaggtgggaggatcgcttgaggtcaaggtcgaggctgcagtgagtcgtgtctgtgtcactgcattcccgtctgggtgacagagcgagactctgtctcaggaaagaaaaaagacaactggggaaattaacacaagatggattcacacccccccacggtgtccattgtgcgatggactgtggcccaaaagcatgtctcacttgacttccaaagccctcctctgaccaagggactgtggagacatcatagcgtctgggaagtggcatcagctcagacccagtgcccagcaatccctgagagcctgggcgtcccttcctccagggcacagccatcctgccaagggctttgcctcccttcaggggagcctgggggaagccatccacagccttgggtgtttccgtcagatgtgtccctctagcagagggtctgggaatgactcacatccaggaattgcaagaggaacttccacccccctgccctgcaaccaagcccaggcctgactcaggatttttccaccactgctgccccttcaccccgttctgccctctgcttttgtcctggagggcaactccttggcaaatgagtccaacgtctgtgaggccacaccactctgcttgcccagcacggtgacctcgcctgcccggccggccatgtggcctcagccgccccagaatctcctcacttggtttcctggcagcattgtccccttcgtccccagcagccttctgagagtttgctaagggtgttgtcactcccctccccacttcacagtatgcctcttaaggtcttgttgagggttgtcccacaggccatctcacaggacagttaggggacagcagagcaggtgaagcacgatccattcttgtctccttcaggctttggatgcctttttccccaataaaccgaggattttctagtatgttaccttccttcccctgggctgcatggcgttggttttaagaaccagagcacaagcagtcccctcccagacaacccaccagcccctccaatccaggacccgtggtgattgcctccgttccaccggatttaggatcattttcctccaatatccattcctctggacttggctgaatgagatttacaaaatggtgcaattagtttggtgtctgttgcctcttcctgggttaaagttacccttgccctgccctgaaagactggactttgacctactcatgcgttcaccccacaaccttgcattccttgagctcttggacctgtgcaacgatggctgcctctcctctcatcacggccagatcttccatgggctttgcactggggaggtcttggctgccacagacaccagttctggaggcggctctctgcagccacttcagggcgtagatctgctttagaagagcttccttccaagctccgcctagttccttgaaagcaccggagaagccgggtacggtggctcacgcctgtaatcccagcactttgggaggctgaggtgggcagatcaagaggtcaggagttcgagaccagcctgaccaacgtggcgaaaccccgtctccactaaaaatacaaaaattagccgggcgtggtggcacatgtctgtaatcccagctactcgggaggctgaggcaggagaatcacttgaacccaggaggcggaggttgtgctgagctgagatcgcaccactgcactcctgcctgggcaacagagtgagactccatctcaaaaaaaagaaaaaag

SEQ ID NO: 938 - DNA, 3213 bp, Homo sapiens
gattggggtggtagaggcctgagtgggaaaagtttgcaacaaaacaaatttaaatccttttcattttgcagagcaaagtttcggctttaaggtggggaagatacccaaagataaatgcagaatgtaaatgtagagatgtctctgcttttgagttctggctttcttttttttttctttttattttattttctttttctttttcttttttgagatggagtctagctctgtggcccaggctggagtgcagtggcacaatctcggctcactgcaagctctgcctcccgggttcacgccattttcctgcctcagcctctcgagtagctgggactacaggcgcccgccaccacgcctggctaattttttgtatttttaatagagatagggtttcaccgtgttagccaggatggtctcgatctcatgacattgtgatctgcccgcctcggcctcccaaagtgctgggattataggcgtgagccactgcgcccggccgagttctggctttcttaagaaagtgtatctttgtctttcactacagacatggatgggtgcaaaaaagagctgccccgcttgcaagagccggaggaggacgaggattgttacatccttaatgttcagtcaagcagtgatgacaccagtgggtcttctgtggccagaagagctccgaagagacaggcgagttgcatccttaatgtccagtcaaggagtggtgacaccagtgggtcttctgtggccagaagagctccgaagagacaggcgagctccgtggtagtgattgactctgattctgatgaggaatgtcacacccatgaagagaagaaagctaagttattggaaataaacagcgacgatgagagtccggagtgttgtcatgtgaagcctgccatccaggaacctccaatagttattagtgatgatgacaatgacgatgacaacggtaatgatttggaagttcccgacgacaacagtgatgattcagaagctcccgacgacaacagtgatgattcggaagctcctgacgacaacagtgatgattcggaagctcccgacgacaacagtgatgattcggaagctcccgacgacaatagtgatgattcggatgttcccgacgacaacagtgatgattcatccgacgacaacagtgatgattcatccgacgacaacagtgatgattcggatgttcccgacgacaagagtgatgattcggatgttcccgacgacagcagtgatgattcggatgttcccgacgacagcagtgatgattcggaagctcccgacgacagcagtgatgattcggaagctcccgacgacagcagtgatgattcggaagctcccgacgacagcagtgatgattcggaagctcccgacgacagcagtgatgattcggaagcttccgacgacagcagtgatgattcggaagcttccgacgacagcagtgatgattcggaagctcccgacgacaagagtgatgattcggatgttcccgaagacaagagtgatgattcggatgttcccgatgacaatagtgatgatttggaagttcctgtgccagcagaagatttgtgtaatgaaggccaaattgcttcagatgaagaagagctggttgaggctgctgctgctgtctcccagcatgattcatctgatgatgctggtgagcaggatcttggtgagaatctcagcaaaccaccaagtgatcctgaggctaaccctgaagtttcagagagaaagctgccaactgaggaagagcctgcacctgtggtggaacaatcagggaaaaggaagtcaaaaaccaaaactattgtggagccaccgaggaaaaggcagacaaagaccaaaaatatagtggagccaccaaggaaaaggcagacaaagaccaaaaatatagtggagccactgaggaagaggaaggcgaaaaccaaaaatgtatctgtgacacctggacataagaagcgtgggccttcaaagaagaaacccggtacagcaaaagttgaaaaacgcaagactaggactcctaaatgcaaagtccctggatgtttcttgcaagaccttgaaaagtcaaagaaatactctggaaaaaatttaaagcgaaataaggatgaattggttcagagaatctacgacctgtttaacagatccgtctgtgataaaaagctgccagagaaactacgcataggctggaataacaagatggtgaaaactgctggcttatgcagcactggtgagatgtggtacccaaagtggcggcgctttgccaagatccagattggcttgaaagtctgcgactctgcagaccgaatccgggataccttgatccatgaaatgtgccatgctgcctccaggctgattgatggtatccatgattctcatggtgacgcatggaagtattatgccaggaaatccaacaggatacacccggagctgcccagggtcacccgttgccataactataagattaactacaaggtccattatgaatgtactggatgcaaaacgaggattggctgctacaccaaatcgttggacaccagccgcttcatctgtgccaaatgcaaggggtctctggtcatggtgccattaactcagaaagatgggacccgtattgtgccccacgtgtgaccatttgctgtgtatgtgcagaagtattatagaaaaattatgcaggagatggctaggattagccttggggatgtgatgaaaacacttggcaggaattacaaggcaatgaagaattcttaaggttatcttagagtatattaatgtgagctatatcctttactggtaagaagttttagaaaagtttgttttgtgaagttaggaatattagaatttaggtactgttaagtaagtaatgttagaatttaagattcatgttattaacgatgattgaccttaaatagggactctattgctaaccattctgtgcccttgacagggtatttctgaagcccttgggatctaccttgggtcttacttgagttccatatttttcacatgtagaacaaaatgcaaaagaaaagtgagttttcaagagtggcaggttgagagaggagaatgctggaaagaggacaagtttgagaggcaacacttaaacactagggctactgtggcatctatgtagacaggaaagacaaacgtgtttcataaaattcgttgttgatggtattgattgaaactatctgagccatgtaatcaaaaaataaaagttttctgcatctt

SEQ ID NO: 939 - DNA, 2400 bp, Homo sapiens
cttttttctttcgcctcagtctcgagctctcgctggccttcgggtgtacgtgctccgggatcttcagcacccgcggccgccatcgccgtcgcttggcttcttctggactcatctgcgccacttgtccgcttcacactccgccgccatcatggtgaagctcgcgaaggcaggtaaaaatcaaggtgaccccaagaaaatggctcctcctccaaaggaggtagaagaagatagtgaagatgaggaaatgtcagaagatgaagaagatgatgaggatgacgatgacgatgaggaagatgactctgaagaagaagctatggagactacaccagccaaaggaaagaaagctgcaaaagttgttcctgtgaaagccaagggggcaaagaatggcaagaatgccaagaaggaagacagtgatgaagaggaagatgatgacagtgaggaggatgaggaggatgacgaggacgaggatgaggatgaagatgaaattgaaccagcagcgatgaaagcagcagctgctgcccctgcctcagaggatgaggacgatgaggatgacgaagatgacgaggatgacgacgacgacgaagatgatgaagatgatgatgaagatgatgaggaggaggaagaagaggaggaggaagagcctgtcaaagaagcacctggaaaacgaaagaaggaaatggccaaacagaaagcagctcctgaagccaagaaacagaaagtggaaggcacagaaccgactacggctttcaatctctttgttggaaacctaaactttaacaaatctgctcctgaattaaaaactggtatcagcgatgtttttgctaaaaatgatcttgctgttgtggatgtcagaattggtatgactaggaaatttggttatgtggattttgaatctgctgaagacctggagaaagcgttggaactcactggtttgaaagtctttggcaatgaaattaaactagagaaaccaaaaggaaaagacagtaagaaagagcgagatgcgagaacacttttggctaaaaatctcccttacaaagtcactcaggatgaattgaaagaagtgtttgaagatgctgcggagatcagattagtcagcaaggatgggaatagtaaagggattgcttatattgaatttaagacagaagctgatgcagagaaaacctttgaagaaaagcagggaacagagatcgatgggcgatctatttccctgtactatactggagagaaaggtcaaaatcaagactatagaggtggaaagaatagcacttggagtggtgaatcaaaaactctggttttaagcaacctctcctacagtgcaacagaagaaactcttcaggaagtatttgagaaagcaacttttatcaaagtaccccagaaccaaaatggcaaatctaaagggtatgcatttatagagtttgcttcattcgaagacgctaaagaagctttaaattcctgtaataaaagggaaattgagggcagagcaatcaggctggagttgcaaggacccaggggatcacctaatgccagaagccagccatccaaaactctgtttgtcaaaggcctgtctgaggataccactgaagagacattaaaggagtcatttgacggctccgttcgggcaaggatagttactgaccgggaaactgggtcctccaaagggtttggttttgtagacttcaacagtgaggaggatgccaaagctgccaaggaggccatggaagacggtgaaattgatggaaataaagttaccttggactgggccaaacctaagggtgaaggtggcttcgggggtcgtggtggaggcagaggcggctttggaggacgaggtggtggtagaggaggccgaggaggatttggtggcagaggccggggaggctttggagggcgaggaggcttccgaggaggcagaggaggaggaggtgaccacaagccacaaggaaagaagacgaagtttgaatagcttctgtccctctgctttcccttttccatttgaaagaaaggactctggggtttttactgttacctgatcaatgacagagccttctgaggacattccaagacagtatacagtcctgtggtctccttggaaatccgtctagttaacatttcaagggcaataccgtgttggttttgactggatattcatataaactttttaaagagttgagtgatagagctaacccttatctgtaagttttgaatttatattgtttcatcccatgtacaaaaccattttttcctacaaatagtttgggttttgttgttgtttcttttttttgttttgtttttgttttttttttttttgcgttcgtggggttgtaaaagaaaagaaagcagaatgttttatcatggtttttgcttcagcggctttaggacaaattaaaagtcaactctggtgcc

SEQ ID NO: 940 - DNA, 2097 bp, Homo sapiens
ctcttcccttctgtgggacgtgttttgaggacttgtgtgttgactgcaccatgcagagcatacagcatggaggcacccctactgccatcggggggcaggtggaggggggaccgtcctgcagctcctccctggggctacccctctcttccctctgcacagacctggcagccacccagacgtcccgcctgctgcctagactctaagaagatgccctatcactccaattaccatacacagtactggcgggggagaggtcctgccttgccgctgaaaactgcactgcttcctccctccagggatgaaaggccaagagaacgagggcagtgtggagtctacgctctcgccagggacctgcagcctctcacttccaagcacaccaactccagctaacaggactgggcttccttacctgccgccttccgctgcctccccgcagacacagcttcagcgacgcccaggctgagacggcagaagaggttcccgccggccgcggcctgccctcaggcagtggctcccagagctcagcggttccccgcactcttctgcgcccgactccccatgcccctacatcctgcgtccccttcagccccggaggtaccgtggggcccgggcctgccagtcaccacctcctcctccgccggcgcctccgggtcctgagcccctcgccgggtccctctccctcctggggctccttcccgttcagcctccggggccctaccccgctctccccgactcccccgggcccggcctgcgccttcctgcggtgccgaggagcggtggcgccctgggtgaagaagtcccgccgagtcgaggggcgcaatggaggagcgccggaacaggtctctcattccgagtagctaccgttgcactgtgcgagtgtaaaagtcacttccacccggtctcagttgttccaacctcagttgaagtgaggaggttggactggaaggtttctggggtcactccagtgaggctggggttctagtcccaatctcaccgtggcaccccaaaggcccagaaacccggaccatcacctctctttccccggggccaacggagcactcctgaaggagggagggtttgtctcaggcctgacgattcctgatgaggacttgggcagaaacagccccaggcaagcggaccttcattcctgcacttgagccgtctcctccctgcccccaccccagaaggagaaaacccagcgctcggattcccagcggcggggcagcctgcaggccctgttcccagcccacagacccatgtcccagcccaaacggaggcagccctgggcagcgggcgcgtggagcccaagggctcagggccactcagcccttgttactgtccctcatctagaaaatggatgtaataacaaaacagttcacggtaggtggcaagatcagacacatcggaaactgtgtagggctggctctttctgcgctcacactgtccagcaatgggccccagggacttggccagagcgcagtagggcaatgagaaaggggtggcttctggaaacctacacgaggcccagtctgggtggatttgggtggcggtcccttgcctgcgaggtgggcagggcaactttctactaaattatctaacactgccagtaatggcagcccttccccagggagccaggaggctgggccaggaccacccccctgtcgcctggcttcaggaaagaaagtggggaagacaacagatttgggagaaggaaactgaggaggttttctcccagtctccctcacgctgcctcagtcatggccattgctaagactcacagagcccaactgtgcaaggccctgcacttcgcattcttctcatccaaccccatgacaacccaaggagacacataatatccccattttacacgtggcagaactgaggttctacatggccaagtgacttgttcagtgccatacagctggtagtagtgaagccaggattcaaatccagctttccgactctaaagtctaaggcacagaccgagtgtggtgactcatgcctgtaatcacagcactttggaggctgaggagggcaaatcatttgagctcccaagttcaggaccagcctgggcaacacggcaaaaccctgtctctt

SEQ ID NO: 941 - DNA, 2619 bp, Homo sapiens
attcatacttgatcatcgctgctgggttcatatactggacaatgacactatccctgacaatgaccctgggaccctcagccaggatgccctcctgagaatctccatcccattcgactcaaatctgaggccagagaagtgtcgtcgctttgtccatccccagtggaagctcattcatctgaatgggaccttccccaacacgagtgagccagatacagagccctgtgtggatggctgggtatatgaccaaagctccttcccttccaccattgtgactaagtgggatctggtatgcgaatctcaaccactgaattcagtagctaaatttctattcatggctggaatgatggtgggaggcaacctatatggccatttgtcagacaggtttgggagaaagttcgtgctcagatggtcttacctccagctcgccattgtaggcacctgtgcggcctttgctcccaccatcctcgtatactgctccctgcgcttcttggctggggctgctacatttagcatcattgtaaatactgttttgttaattgtagagtggataactcaccaattctgtgccatggcattgacattgacactttgtgctgctagtattggacatataaccctgggaagcctggcttttgtcattcgagaccagtgcatcctccagttggtgatgtctgcaccatgctttgtcttctttctgttctcaaggtggctggcagagtctgctcggtggctcattatcaacaacaaaccagaagagggcttaaaggaacttagaaaagctgcacacaggaatggaatgaagaatgctgaagacatcctaaccatggaggttttgaaatccaccatgaagcaagaactggaggcagcacagaaaaagcattctctttgtgaattgctccgcatacccaacatatgtaaaagaatctgtttcctgtcctttgtgaggtctgctggagtttgctggaggtccactccagatcctgtttgcttgggtatcaccagcggaggttgcagaacagcaaagactcctgcctgctccttcctctggaagcttcattttagaggagcacctgcctgatgccagccagagctctcctgtatgaagtgtctgttgacccctgctgggaagtgtctcccagtcaggaggcacaggtgttagtgacccacttaaggaggcagtctatcccttagcagagctcaagcactgtgctgagagatccactgctctcttcagagctggcaagcaagaatgtttaagtccactgaagctgcacccacagccaccccttccccaaagtgctctgtcccaggtgatgggagttttatctataagcccttgactggggctgctgcctttctctcagagatgccctgcccagtgaggaggaatctagagaggcagtctggccacagttgctttgcagcactgcagtaagttccacacagtttgaacttcccaatggcttccttaacactgtgaggggaaaactgcctacacaagcctcagtaatggtggacattcctctcccaccaaggttgatcatcccagttcgacctcagactgatgtgctggcagtgagaatttcaagccagtggttcttagcttgctgggctccatgggagtgggacctgctgagcgagaccacttggctttctggcatcagccccttctccaggagagtgaatggttctgtctcactgaggttccaggtcccactgggggaaaaaaaaaaaactcctgcagctagctcagtgtctccccaaacagccacctagttttgcacttgaaacccagggccctggtagcattggcacaaagggaatctcctggtctgcgtgttgcaaaaactatgggaaaagcataatttctgggctggatagcacagtccctatggcttccttgggtaggtgaggaagttccctgaccctttggacttcctgggtgaggtgatgccccaccctgcttcagcttaccctccgtgggctgcacccacccactgtctaaccagtcccagtgagatgaaccgggtacctcagttggaaatgcagaaatcactcaccttccgcattgctctcgctgggagctgcagaccagagctcttcctattcggccatcttgccagctgtctctatcgactacctcttattccaaaaaataaaaccataatgaagttagacaccattaaatatacataatataaaaataggttttcttattctaatctagatttgctacacaagaccatctacagaatgaatgccatgaatatacaatctgtacccaataagttgtacattttagtaaacattcctgattgtaagggtggcaaatggaaattttggcttcttagatctttactgtgagtttgactgatatcagtacatttttatttttaattgtatattttcattactgtgaatttttttgcagtgatttttgatgccatgtggctacattggttttagaatactaataaaatccattgcttttaaaataaataaataaaccccatagcacatcctccatacaacatctgttgtccctcaagatacaattgttaccactatcatctaaccattattttatgataactttaaaatatcaacttgcaagaaaat

SEQ ID NO: 942 - DNA, 2002 bp, Homo sapiens
tcagaggccagcctgcggggacgggccggccgcggccgtagccgtgtgaacgctcttcgggctcgcgtcgtcgacccgcagccgcggggcggactaagaagggagccgcctgctgcgaggccgccgggctcccgctatattcatccaacaagccataaagccataatgtggtataacatcctttttgagaggtgaatattattgaatgaaaatggctgacagaagtgggaagattattccaggacaagtgtatattgaggtggaatatgattatgaatatgaagcaaaggacagaaagattgtgataaaacaaggggagaggtacatcttggtgaaaaagaccaatgatgactggtggcaagtcaagccagatgaaaactccaaagcgttttatgtgccagcccagtatgtgaaggaggtcacgcgcaaagctctcatgccacctgttaagcaggtagctggtctgccaaataactccacgaaaataatgcagagtttgcatcttcagagatcaacagaaaatgtgaacaaattgcctgagctttcaagtttcggaaagccatcgtcatctgttcaaggaacaggtcttattcgtgatgccaatcagaattttggacccagttataatcaaggtcagactgtcaacctaagcctggacctgacccataataacggaaagtttaacaatgactcacattctcctaaagtttccagccagaataggacacgctcatttggtcattttcccggtccagagttcttggatgtagagaaaactagcttctcccaggaacaatcttgtgattccgcaggagaaggctctgaaagaatacatcaagattctgaatctggtgatgaacttagcagcagctccactgaacagataagggcaaccacacctccaaatcaaggaaggccagattctcctgtctatgctaaccttcaagaactgaaaatatcccagtctgctcttcccccacttcctgggagcccggcaattcagattaatggagaatgggaaactcataaagacagctcagggcgttgctattactataacagagggacacaggaaagaacttggaaacctcctcgttggactcgggatgcaagcatcagcgaaggagatttccaaaatccaggggatcaagagcttctttcatcggaagaaaactactacagcacttcttacagccagtcagatagtcagtgtggttctcctccaaggggttggtcagaagagttggatgaacgtgggcataccttatataccagtgactatactaatgaaaagtggctcaagcatgttgatgatcaaggtagacaatattactacagtgcagacggatctcggtcagaatgggaattgccaaagtataatgcttcatcccagcagcaaagagaaataattaaaagtaggagcctggacaggcggctgcaagaaccaatagtattaacaaagtggagacatagcaccattgtattggacactaatgataaggaatctccaactgcctcaaaaccctgctttcctgaaaatgagtcttctccctcctcaccaaagcaccaagatacagccagcagtccaaaggatcaagagaaatatggattattaaatgtaacaaaaattgctgaaaatgggaaaaaggttcgaaagaactggttgtcttcttgggcggtgttgcagggttcatctttactttttaccaaaactcaaggaagtagcacaagttggtttggcagtaatcagtccaaaccagagttcacagtggacctcaagggggcaacaattgagatggcttcaaaggataaatccagcaaaaagaatgtatttgagctgaaaactcgtcaaggaacagaactgctaattcagtctgacaatgacactgttattaatgattggtttaaagttcttagtagtacaatcaataatcaggcagtagaaactgatgaaggaattgaagaggagataccggattcaccaggaatagaaaagcatgat

SEQ ID NO: 943 - DNA, 2361 bp, Homo sapiens
attcttgtgctgtgcctttcagttgaacagaagaggctccatgtcttacctggcagcagtcgaggaagaggtggaagaaagttccgtgaagagcgataatggagatgagaaggcagagccatcgcctcagtcttggtcttcactttggaagcatgacaaggacatggaagaagacagagcttcctcatcctctggaacaattgttcaggaagcatatgggaaaataagcacctctgataattccatggcacaaatcctcacaccagactcactaaacactgagcaaggcccagaatgttccctaaggcccaaccaaacagaagagggcaccacacctcctattgaggctgacactctggactcttctgacgcgcaaggaggtttggagcccagggtggagaaaactaggccggagcccacagaagtcctgcatgcctgcaagacccaggtggccgagctggagctgtggctgcaacaagccaacgtggcagttgagccggaaacattaaacgcagacatgcagcaggtgctggaacagcagctggtagggtgccaggctatgctaacagagattgagcacaaggttgcctttctgttagagacttgcaaagatcagggcctgggagataatggagccactcaacatgaggctgaagcgctttccctgaaactgaaaacagtgaagtgcaatttagaaaaagtccagatgatgcttcaggagaagcacagtgaagatcagcatcctaccattctaaagaaatcctcagagccagagcatcaagaagctctccaaccagttaacctttctgaattggaatccattgtaactgaaaggccacaattcagcagacaaaaagatttccagcagcaacaggttctggagttaaaaccaatggaacagaaagatttcatcaaattcatagaatttaatgctaagaaaatgtggccccagtattgccaacatgataacgatacaactcaggaatcatctgcaagcaaccaggcatccagccctgaaaatgacgttccagactcgatcttgtcaccccagggccaaaatggagataagtggcaatatctgcatcatgaactctcatcaaaaataaagctcccactccctcagcttgtggagcctcaggtttccacaaatatgggtattctacccagcgtgactatgtataactttagatacccaacaactgaagaactgaaaacctataccacccaacttgaagacctgcgccaagaagcaagtaaccttcagacacaggaaaatatgacagaagaagcatatatcaatttggataaaaaattgtttgaactattcctgaccctcagtcagtgcctcagcagtgtggaggagatgctggagatgcccagactttacagggaggatggttctggccagcaggtgcactacgagacgctggctcttgagttgaagaaactttatttagcgctaagtgacaagaagggtgatcttttgaaagccatgacttggcctggcgagaacaccaacttgctccttgaatgttttgacaaccttcaagtctgcctggagcacactcaggctgcagctgtctgtagaagcaagtccctgaaagctggcctcgattacaaccgcagttaccagaatgaaataaagagattatatcatcagctcattaagagtaagacatctttacaacagtctttgaatgaaatcagtgggcagagtgttgctgaacagcttcagaaagcagatgcatatacagtggagctggagaacgccgagagccgagtggccaaactaagagatgaaggggagaggcttcatttaccttatgctttactccaggaggtttacaaattagaggatgtacttgacagtatgtggggaatgctaagagccaggtacacagaactcagcagccctttcgtcactgagagccagcaagatgctttgttgcaaggcatggtggaactggtgaagattgggaaggaaaagcttgctcatggccacttaaaacaaaccaaaagtaaagtggcgttacaggctcaaatagaaaatcacaaggtttttttccagaagcttgttgctgacatgttgttgatccaagcatactctgccaaaatacttccttctttattgcaaaacagagagacattttgggcagaacaagtaacagaagttaaaatactagaagaaaagtcacgccaatgtggtatgaagctgcaaagtttgttgcagaaatgggaagaatttgatgaaaactatgcatctcttgaaaaggacctaaattcttatatctacattgccctctgtgagtttggtggaagaaacagaggaaagattagtggaaaggatttcattttaccggc

SEQ ID NO: 944 - DNA, 2043 bp, Homo sapiens
tcttatttctttctgatcttctgtgggcttgaagatcatataagcaagcttttatgtttgtagtttctaatctagaagtgaataggatcatatatgaggagaacataaatcacccagtaatttacctgtagttatacaaagtagttattaggttggtgcaaaagtaatggtggttttgcaattatgaatgacacctttttaaagttgaggagaaatctctttgggtatttaacttggaggtagaatttgaatagcaagatggattttattttttctaaggtttggaggatgtgtaccataactgatttgtatgtcatttttgttgttttgattcaccttttacaattcagaattttttttttttttttttttgagacggagtcttgctctgtcacccaggttggagtgcagtggtgtaatcttggcttactgcaacctctgcctcccgggttcaagcgattctcctgccccaacctcccaagtagctgggaccgcaggtatgtgccaccatacctagctaatttttgtatttttagtagagacagagtccatgtcagccaggctggtctcaaacttctgacctcaggtgatccacccgcctcggcctcccaaagtgctgggattacaggcgtgagccactgtgcccggcctacaattcagaaatttaaatgatacttttagaagagtttgaggcagggaagtgaaatccattaattaagagtgcagtttggtatgttttagagctcaatgctttgtcctctgtcatccttctactgcatccctttcttcgtttcctcacttcaactttttagtaaacttgtctgaggcattagctttactcttacgcattttgctcccctgcctttttgttataaatattatcatggcatgaaacaaaaagcctgttatctgcctttccatgatcactttgctgacactgtttcagccacaagtaaacctagcaactctatgaatagcaggacagacttgaatgtggtgtgtgtgcaaggaagttatttaactttcttaatcttaaatgccaccagaaaacattctgctccctgttacttcttttttttttttttttaaattactttgttttgcggtaaggagttggggaatgtgtggtggcagggaagtaatgtaagttgctttataactcactgtctaacaaagttttgaaaatttgtctgatatgtaattaggtactttagggttattaggttttcataaaaattctggttagggctcttgccctgctcccaatgaaagcctttccacagggcaaatataaaagagagagtagagggaatccccctgaggtttaaataagtcaaaccagtaagtaatagtgctaagtttgtcagtgcctctctttcttactgtacttaacatctaaagggcacctcatttattttcagctaattatgttctttatgagtgactgtcaaatcagggaagggtgtgacgatcatgtggagataccttttctaattaatagctgccttgctcctcaagattctgatgaatgttgggaaaggaaaaaagttgaggtgcaaacaatgtgagaaatttaataattgagagatacttaaattttttatctattgctgtataacaaactacccctaaacttagcagcttaaaacaatgaacatttatctattatctcacatagttttgtgcatcagaaatttaggagccacttagcagagttgttctggctcagggattctcataacattgtaggcaagatgttggcaaggctgaagtcatctgaaggcctctttggggtgggaggatggctattgtcaggagactttacttcctctctggcttttggcaggaagccttagttgttaatcatgtggacctctctgtagagctgtttgggtaatctcaggacatggcctagagtgagtagtcccagctacttgggaagctgaggtgggaggattgcttgagcctggaaggttgaggctgtagtgagccgtgatcgtggcatggcaccccagcctaggtggcaaagtgagaccctatctc

SEQ ID NO: 945 - DNA, 2651 bp, Homo sapiens
tgcgagcttgagcggcgcgaggagatgctagagggcgcagcgccgccagcaccatgcgccccccgcccgcgctggccctggccgggctctgcctgctggcgctgcccgccgccgccgcctcctacttcggcctgaccgggcgggaagtcctgacgcccttcccaggattgggcactgcggcagccccggcacagggcggggcccacctgaagcagtgtgacctgctgaagctgtcccggcggcagaagcagctctgccggagggagcccggcctggctgagaccctgagggatgctgcgcacctcggcctgcttgagtgccagtttcagttccggcatgagcgctggaactgtagcctggagggcaggacgggcctgctcaagagaggcttcaaagagacagctttcctgtacgcggtgtcctctgccgccctcacccacaccctggcccgggcctgcagcgctgggcgcatggagcgctgcacctgtgatgactctccggggctggagagccggcaggcctggcagtggggcgtgtgcggtgacaacctcaagtacagcaccaagtttctgagcaacttcctggggtccaagagaggaaacaaggacctgcgggcacgggcagacgcccacaatacccacgtgggcatcaaggctgtgaagagtggcctcaggaccacgtgtaagtgccatggcgtatcaggctcctgtgccgtgcgcacctgctggaagcagctctccccgttccgtgagacgggccaggtgctgaaactgcgctatgactcggctgtcaaggtgtccagtgccaccaatgaggccttgggccgcctagagctgtgggcccctgccaggcagggcagcctcaccaaaggcctggccccaaggtctggggacctggtgtacatggaggactcacccagcttctgccggcccagcaagtactcacctggcacagcaggttggagtgcagtggcaagatctcagctcatcacaacctccacctcccggattcaagcgattctcccgtctcagctgcctgagtaactgggattacaggcatgcaccaccacgcctgactaattttgtatttttggctaattttgtatttttagtagagatgaggtttctccatgttggtcaggctggtctcgaactcccgacctcaggtgatctacccgcctcggcctcccaaagtgctgggattaccggtgtgagccactgcgcctggccagcatttttttttttgagacagagtctcgctctgtcacccaggctggagtgcactggcatgatctctgctcactgcaacctccacctcccaggttcaagtgactctcttggctcagcctcccaagtagctgggactacaggcgtgcaccaccacgctcagctaatttttgtattttcagtagagatggacttttatcatgttggccaggctggtctcgaactcctggtctcaagtgatctgccagcctcagtctcccagggtgctgggattacaggtatgagccactgtgcccggccgccttagcattttgtgtatgttttgagtgacagccatctgtcaatattggcatcttttgttttattggatgaatgaatgaacaaatgaatttataaatcttgttctccatactgtttacccatcctcatttccctcacttggcgtcttgccatagcaggcttcctggtgtagctggcaccacatccctccctgacacacggcctccttattgcccctgctacttgcctttttctctcctccctttccttcccttcattccccctggcttccccttcccaactctcagaatccctggctgcctcaaccacaagaacaaagctgtgcagaagcctgaacctggagcttctgcaagatgaggtggggaatgagctaacccagctggaaagcagcctgctgatccctgggagagacggcgcttgggccaacccaccctccccaaggtggtcccctgcctcagctccacccgcttccccagatgaacttctttctctccctccagcgcttcagaggatgcacagctgtgtgtacttgaccctgagcctgggctagtgctggggacatagccagtctggctgatacccatatcagtacagaaagctgtcctcacccacttcatgcactagttgcattggtatgaagcattagctttataactatcccatttactgcaggcataaacctatatcaattggtggggatggaggttaaatgagagaagacatcaaagatgcatagaactattgggcccctttcaattaataaataaaatttgtaggaggccattagtttgtactgtgctcctgtaatggacccaacagaccaaacaaatatggagtcactcatgctaaatgcaattaacttgggagtatactcctaagttgcaaaaagtggtaacaaatagctgagttttggggcagttacagcagctgagcatctgtcaatgtaggtggccaggtgattcaattaaggatgctgtaaccaattaagctgtatctacacctcacttctgttttctatctacaaatactgcgtgatcatgttgctggttggagttctttgaataagctgtggttcggagggatgcccaattctagaatcatgaataaaagcctattaagatcttt

SEQ ID NO: 946 - DNA, 1685 bp, Homo sapiens
cttcttgctgacgccgccagcgccgaccaccagcagctgttttccctccatgaggcagcgcgccgaccgccgaagcatggtctccaccagcggcgccgccaccgcctcgtcggccgccggccccagccgcggcgcggcccacagcccctccagcgcgccgcacgcctccagacacaggccgccgttcagctccagggccactgggcttctccagcagcgccagcactgtgtccaccactgcacccagctctgcccgcgggtgcagacgccatgcctgccgcccccgccagcgccagccactgagcttcacagctacctgcagcaaggaggggaaaggggcctcctggacaccaccccaggtactgcagggtggggcacttccgccacaggagccgtgcagggctcgcggcctggcaagaatgtacagctgacagagaacgagatccgcggtctgtgcctgaaatcccgggagatttttctgagccagcccattcttctggagctggaggcacccctcaagatctgcggtgacatacacggccagtactacgaccttctgcgactatttgagtatggcggtttccctcccgagagcaactacctctttctgggggactatgtggacaggggcaagcagtccttggagaccatctgcctgctgctggcctataagatcaagtaccccgagaacttcttcctgctccgtgggaaccacgagtgtgccagcatcaaccgcatctatggtttctacgatgagtgcaagagacgctacaacatcaaactgtggaaaaccttcactgactgcttcaactgcctgcccatcgcggccatagtggacgaaaagatcttctgctgccacggaggcctgtccccggacctgcagtctatggagcagattcggcggatcatgcggcccacagatgtgcctgaccagggcctgctgtgtgacctgctgtggtctgaccctgacaaggacgtgcagggctggggcgagaacgaccgtggcgtctcttttacctttggagccgaggtggtggccaagttcctccacaagcacgacttggacctcatctgccgagcacaccaggtggtagaagacggctacgagttctttgccaagcggcagctggtggcacttttctcagctcccaactactgtggcgagtttgacaatgctggcgccatgatgagtgtggacgagaccctcatgtgctctttccagatcctcaagcccgccgacaagaacaaggggaagtacgggcagttcagtggcctgaaccctggaggctgacccatcaccccaccccgcaattccgccaaagccaagaaatagcccccgcacaccaccctgtgccccagatgatggattgattgtacagaaatcatgctgccatgctgggggggggtcaccccgacccctcaggcccacctgtcacggggaacatggagccttggtgtatttttcttttctttttttaatgaatcaatagcagcgtccagtcccccagggctgcttcctgcctgcacctgcggtgactgtgagcaggatcctggggccgaggctgcagctcagggcaacggcaggccaggtcgtgggtctccagccgtgcttggcctcagggctggcagccggatcctggggcaacccatctggtctcttgaataaaggtcaaagctggattctc

SEQ ID NO: 947 - DNA, 2500 bp, Homo sapiens
aaaggttgggtgactgcatttcagaagacagttatccagatggcaatatcacatggtacaggaatggaaaagtgctacatccccttgaaggagcggtggtcataatttttaaaaaggaaatggacccagtgactcagctctataccatgacttccaccctggagtacaagacaaccaaggctgacatacaaatgccattcacctgctcggtgacatattatggaccatctggccagaaaacaattcattctgaacaggcagtatttgatatttactatttggatttgtccttaaacccaagtggagaagtgactagacagattggtgatgccctacccgtgtcatgcacaatatctgctagcaggaatgcaactgtggtatggatgaaagataacatcaggcttcgatctagcccgtcattttctagtcttcattatcaggatgctggaaactatgtctgcgaaactgctctgcaggaggttgaaggactaaagaaaagagagtcattgactctcattgtagaaggcaaacctcaaataaaaatgacaaagaaaactgatcccagtggactatctaaaacaataatctgccatgtggaaggttttccaaagccagccattcaatggacaattactggcagtggaagcgtcataaaccaaacagaggaatctccttatattaatggcaggtattatagtaaaattatcatttcccctgaagagaatgttacattaacttgcacagcagaaaaccaactggagagaacagtaaactccttgaatgtctctgctataagtattccagaacacgatgaggcagacgagataagtgatgaaaacagagaaaaggtgaatgaccaggcaaaactaattgtgggaatcgttgttggtctcctccttgctgcccttgttgctggtgtcgtctactggctgtacatgaagaagtcaaagactgcatcaaaacatgtaaacaaggacctcggtaatatggaagaaaacaaaaagttagaagaaaacaatcacaaaactgaagcctaagagagaaactgtcctagttgtccagagataaaaatcatatagaccaattgaagcatgaacgtggattgtatttaagacataaacaaagacattgacagcaattcatggttcaagtattaagcagttcattctaccaagctgtcacaggttttcagagaattatctcaagtaaaacaaatgaaatttaattacaaacaataagaacaagttttggcagccatgataataggtcatatgttgtgtttggttcaattttttttccgtaaatgtctgcactgaggatttctttttggtttgccttttatgtaaattttttacgtagctatttttatacactgtaagctttgttctgggagttgctgttaatctgatgtataatgtaatgtttttatttcaattgtttatatggataatctgagcaggtacatttctgattctgattgctatcagcaatgccccaaactttctcataagcacctaaaacccaaaggtggcagcttgtgaagattggggacactcatattgccctaattaaaaactgtgatttttatcacaagggaggggaggccgagagtcagactgatagacaccataggagccgactctttgatatgccaccagcgaactctcagaaataaatcacagatgcatatagacacacatacataatggtactcccaaactgacaattttacctattctgaaaaagacataaaacagaatttggtagcacttacctctacagacacctgctaataaattattttctgtcaaaagaaaaaacacaagcatgtgtgagagacagtttggaaaaatcatggtcaacattcccattttcatagatcacaatgtaaatcactataattacaaattggtgttaaatcctttgggttatccactgccttaaaattatacctatttcatgtttaaaaagatatcaatcagaattggagtttttaacagtggtcattatcaaagctgtgttattttccacagaatatagaatatatatttttttcgtgtgtgtttttgttaactaccctacagatattgaatgcaccttgagataatttagtgtttttaactgatacataatttatcaagcagtacatggaagtgtaataataaaatgtctatgtatctttagttacattcaaatttgtaactttataaacatgttttatgcttgaggaaatttttaaggtggtagtataaatggaaactttttgaagtagaccagatatgggctacttgtgactagacttttaaactttgctctttcaagcagaagcctggtttctgggagaacactgcacagcgatttctttcccaggatttacacaactttaaagggaagataaatgaacatcagatttctaggtatagaactatgttattgaaaggaaaaggaaaactggtgtttgtttcttagactcatgaaataaaaaattatgaaggcaatg

SEQ ID NO: 948 - DNA, 2258 bp, Homo sapiens
atcgctggggcctccctgcgaggctgtcagcggccgaggtgggggcccttgccggggtgaggagccgatcgtccaccggatcaggccccctgcagcagcccgcctggagcccgagcatggccgggcggggaaggggcggcggcaccggaattgctccgcccagctaaggccggggccgtggctcctgtgcaagatgggcctgtgcaccctccagcccctgggccctcctcgaaaatcctccacatcctgcgggacctggaccgccagcggcctcccaagcctgggccatttgccccgtcgcctccgcctggcattcgacttcttagaaccgcgggcacgagggcagcgtgggggcagtggtggctgtcagtccacgcgggccgccgagaggacgcgcccaccccaccctccaaacgccgtcctcctgcttcagccagagccgtccctgacatgggcccagggacgcggctgcagaggccacttccggtcactccccgctgcggcctcgcgctccgggagccgcaccctccgctgcgccagctccgaccgcagtcttcgggagcagaagcagcgccgcgcgggccctgaccccacaccctccccggcgcctccgcctgcaggaccccggccctccccgggctcgctgggtccctccgccccggccgctccccgcaccgcgcgcggtgcctacgagctccaaggcggcgccagccaagacggtcccggccaagcggcggtgggtgcgacccccaccacgggccccggcaccggcggggagggcgcgctcctaggctgcgggagcggacggacccctccgacttcggccacctggcgccgccgcctcctccccgccgaagtccctcccggggcagccgccgcaaactttccggagcgggagcgactgtaaacccgagtcctcccggcgccccgggcccttcgcgcgcctgccggtccccgtagcccggccctgcgcccgcccgggccccactactgcggccgagcgatccggcgtgaccgcgggacccacagggcgcccctgccccgcggctctctccacccccgcgcgctggggctgcggcgccgtgtctggcgcgaggctgggggccgagggtgcgtggtcgggggagacagccggtcctagggggccctttggccgggcgcgggggctcacgcctgtaatcccaaccactggggagactgaagcgggaggagcgcttcagtgcaggagttcgagagctggtggggaaaccagccccacaccacccggcgggtaccccgagtccggcgcagacaaaggatttagaaagagaatcacagtttaaccggcgggtccaggggaccagggcgtcggaggcttgctcgcggccccgagctctcggcctccacccaatttattggtttaccagctcttcgttcttagggcaaatgggaggggtgagaagggatgaggaaaaggattaatcaatgaaggagaactcgtgactcatttaataagatgtgtagccgtggcggtttctgtgaatttcctctagcaaaggcgtgtgtctaaactatttaagatctttaccttatccggactgaaatgcgtgggagcgggtttcaggagcagccaagatgtttgattgtactccactgcttcaagggagtgttatctccgccagcacctgtggcatgcgtaaagacatgaaggcaaaaaggagacttttctcctcagaggccgcccatggcttcccatggatgtctcacgcaggggggaccaactcatctggcattccagaaactctctttcccacatatgtccccctttttttgtctctattaattttttttttttgagatggagtctcgctctgtcgcccaggctggagtgcggtggcgcgatctcggctcactgcaagctccgcctcccgggttcacgccattctcctgcctcagcctcccgagtagctgggactacaggcgcccaccaccacgcctggctaattttttgtaattttagtagagacggggtttcaccgtgttagccaggatggtctcgatctcctcaacttgcgatccgtccgcctcggcctcccaaagtgctgggattacaggcgtgagccactgcgcccgactctattaattttttttttattaataaccgccattgctatttcgttcactgtgtctggcttctctaccaaggcgccgtcggcatctgtagactaaaaataaacagcataaacagacacaaaccaaaataaaatttgcaattgttg

SEQ ID NO: 949 - DNA, 2399 bp, Homo sapiens
ctattattttctaatactctgccttccagctaccctattgtcaccttgcttggtgacagtgagcttcttgagggttttatgtgtcacctttggggaccttgaaataccttacactcctactgtgagagctcactaatgtggtgttcagaagctggtttcatgggcccatcttttgcttgatgacagccaaagggatcctcattatgtcaattctatgagtcaggagattatggggtactggctgggaaggtgagcatggctccccttccaggaaggagctcacactatggcactccagtgattggatggctgagaagcaactgaggtgctggggaatacaagctccacgggccgaggggaagttcactggggctcactgcatgcaagggctgtctggacagcgatgtcttgggcttgtgtttagagagctgcttgcagaatccccagtgtggcctaaccaggatgcagggaaaaataggcaagtatgtccttggatgaaaccaagcacaatctatcaaccactcaagcagatcctaagggaagaattagtgtcattaactattatgctgttgttggtgatgatgataatgatgctgacaattaaaaagataattaattgttttccttcttttagtcacatagaaaaaatcaccacatggcaagaccctaggaaggcgatgaatcagcctctgaatcatatgaacctccaccctgccgtcagttccacaccagtgcctcagaggtccatggcagtatcccagccaaatctcggtaagcctcaagctttttttaaaattaaaaaagatattttttttttgtagagttggggtctccctttgttgcccaggctggtgttgaactcgtgggctcaaacaatcctaacacctcagtctcccaaagtgctgcgataacaggcatgaaccactgtgcctggtggagccccaagctttgactccaagctgaagaaatggtgttcaatcaaggggtggcggggctcataagtggttctggctgtttctatgtctcttcatgcacccagacggtgtttgctccttcttcttggctgcaataccgtgttacccttctgccggctttttcttctttacttggtctctttaccaccaactcatgatactgctgcctcagttttaaactacagttctgaccttccctccaatggccttaattggggtagaaaaatcagttaggcctcctgtcttcatctagcctgaggcaagtaggacacatacacgctttgggtgactttggctcctggcgactgcctacaggtacaattctagtctcaaatccctatccttatttcccttttttcctttttttttcataattgctgcataacatgtgtcagatagcatgccaagtgcttccatgccttaccttatgaaagccttccaaaacccctgcaaaaagtagcaggctctccagtttatacatgaagaaactttccgaaagtcttgcagcttgtggagagcagagctggagagcaggctagtctgattttagaagggagttaaccattacataacctgcaggtggcttctccccatacctgccgtgggataatatggctcactttttacttcatttacaatacttaataagtgcgattttagacttgagaagagaatattttctgctaaaattatccccactagagataatcaccagtgaattaatacactgcagcaacggaaccagtcagcttttttggtaatcattcccttccttctcccccagggctaaaaataaaaaagggccaattttaaagttttagaaaagttggtgccattttcagataacatttccatttaagatcagatatccagatatgctttatacacagaacagttaattttagggagtgaaaagaatctcctgttggattttcaggaatgaacaagataaaaatggaagcgttattcctggacacccttccctcatactgtggcttagccaaagtgagtatgaactcaagtagaccctagtcagcttcaagtgtcagttcttccaggaagtctgaacctactgctttaaagcttgcagatgtacagtttccaaaaagcaaatgacatggaacaacctctgtggagttccttatctaaagggcagatcaaagaaaatgcaaccagttctggtaccagcagtggtaaaccaaagcctccagtgagttattttgtcccaaatatacaggagctcgtgtagaaatcagatgccactgtagtaaagagaccccaaattaggtggcattagactggtttttacagtttgtttaaccatttaattttcatcgaaaattctaaaaactgattattaaagttttaactttaactttgtaatcaattataatcggaaaaaaatctttcatgaacccagtttac

SEQ ID NO: 950 - DNA, 1784 bp, Homo sapiens
agagcgagctgcggccgtggcagctgcacggctcctggccccggagcatgcgcgagagccgccccggagcgccccggagccccccgccgtcccgcccgcggcgtcccgcgccccgccgccaggtgagccgggccctgggcgaggaggcgggagggaggagggaggggagtccagggcagccaggagtcgggcgagcctcgggggctgcagaatggggtcgcggccgcgatgcccctgaccctcgccggccccacccaggccgccccccgcgcgcggggctcccgcagcacagcctttctccggccctagcccaaatcgcccagaccaggcgcggatcccagcctggccagcaggcggcgggcgcggggcggcgagccggggccggacggctggagccagaaccggctgctctccacgcccccctctcggtgctgcccggaggccggactccgcctccaccgagcccccacccgccgggaagagctccgcggagtacagagcccattttctagctgtgtccactgaggctgaacggatccgcgcggacttggtgctccgtgctcgccccctagggccgggtccgccgggagcgccgccctccggagttgtccggccggcgcacacctgcccggccccgcagcgccccagctcacctctttgtctctcccgcagcgcacccccggacgctatggcccacccctccggctggccccttctgtaggatggtagcacacaaccaggtggcagccgacaatgcagtctccacagcagcagagccccgacggcggccagaaccttcctcctcttcctcctcctcgcccgcggcccccgcgcgcccgcggccgtgccccgcggtcccggccccggcccccggcgacacgcacttccgcacattccgttcgcacgccgattaccggcgcatcacgcgcgccagcgcgctcctggacgcctgcggattctactgggggcccctgagcgtgcacggggcgcacgagcggctgcgcgccgagcccgtgggcaccttcctggtgcgcgacagccgccagcggaactgctttttcgcccttagcgtgaagatggcctcgggacccacgagcatccgcgtgcactttcaggccggccgctttcacctggatggcagccgcgagagcttcgactgcctcttcgagctgctggagcactacgtggcggcgccgcgccgcatgctgggggccccgctgcgccagcgccgcgtgcggccgctgcaggagctgtgccgccagcgcatcgtggccaccgtgggccgcgagaacctggctcgcatccccctcaaccccgtcctccgcgactacctgagctccttccccttccagatttgaccggcagcgcccgccgtgcacgcagcattaactgggatgccgtgttattttgttattacttgcctggaaccatgtgggtaccctccccggcctgggttggagggagcggatgggtgtaggggcgaggcgcctcccgccctcggctggagacgaggccgcagaccccttctcacctcttgagggggtcctccccctcctggtgctccctctgggtccccctggttgttgtagcagcttaactgtatctggagccaggacctgaactcgcacctcctacctcttcatgtttacatatacccagtatctttgcacaaaccaggggttgggggagggtctctggctttatttttctgctgtgcagaatcctattttatattttttaaagtcagtttaggtaataaactttattatgaaagtttttttttt

SEQ ID NO: 951 - DNA, 2509 bp, Homo sapiens
cattgaggcaatttcttccctaatctattcctttgtgctgaacttttttaagtttgacactctagatatccgtctgcctcaagcaaaacagttgacagaaacccatgaacccatcatgccctgattcataggaagtaattactaataatcctaattctggttcatagtttgcttgtcagtaattacagctgcagttgaatgctttcagcattaaccatcaacccagagttgcagatccctcctcatctcagggaaatggaacttctcacatatcacagacaacttggaggaagctcagctggaccagaagagccagaaatcgggagcatgcaatggcagatcatcagggcaaggccactcaccagcagggaggcccagtgaatgcagagcaggtggcaacaggaaagactggaggccagtctgataggaaggcaaacaccagcaagaggcaattccgggatcatttatgggaaaccgaggcatggtctgcagaggcaaccgccccccccaccgtcacttccagagagatgaacggaaacctgatctctgagaacccaatcttctcaacaagttgtcaacatgctaataagcatagtgtcttactctgtagcaggtacttttactttatgtgttattaactctccatcttctcaacaatcatatcaagcaagtgctacttctatccccgatgtatgtataaatttgtccaaccatgtagctcataagtaaattaactgtaatttccaaacctagatacaccgaccctagaaactacactctcactactttcctacccaccaacacctcttaaagttgaggtgagaactaagtaacaagcacttatgagctgcaaatttcagtggaaagcactagtccaagcatttgtttgaaaccccccacacaatttgtacaacaaccctatgagatagtgtgtccgtcagcatttggtcacaaaaacaaaaggtattttgcatgttctaagtatccacagttctaatgcaggaaattagaggtttgcagtcttttggaaagacttagcaatgaattcagggaagccaccaggacctttctgcctgctgctgtatctatgcaagtgggagtcgacactcacccagaggccactgaacaccttaagggcctctgggagggtctctctggcttctcagccagcattcctgagataggtgattcttaggcttacctgaaagccattataaatctgttatctacctgcccacacacttgcctgcaaccaactcccttaaaacataatggctgctacttctctcattttaggaaaatctcacccaagtccctctccttggcagactctacacaaagccatacacaaaaagatgttctaagaaccatagttattggcttctccacagtacaggggagacttagaaggcagtaaagatgcatcaagttgagaacaaatgatctggtagaattaggtagaattcatatacccattttacagttgatgaaactgaggcagaggcacaaagcagttaatcaatttacgcctaatcacataactttagtaaatgataaagccatgattcaaatgtagagggactggctccataatctatgctcttgccattgcatgagattgttttcatggaagacttaactcagcacagtttggcacacccgttagtgctacactcattgtggtggctgggttttattcttattgatacatttcttgtgttactatatttgtttttctcataattagcacaactgggattgctcagccaatacccatggaatgttgaatacccccacccacagtctgccccatatctcaaggcaacctagacaggttttcttcctctaatgaattatcattatgacttagtccaagatttctaaataattaccagttccaaaaaaccagcatcctgagtatccacagatatgtgcatgaatacaagcatacatgcacacacatatgcacgcacacacacacactcagtctttatgagcagcaacgtaactgtatttcaatggatgcgattgatgagggcaagttccaggagcttcacccaggcaatcccggctggccaattattgcagacagcctgctcccacctattcaccacacagaacacatgtcaaaatgcactcggaaacaacactaggctgcagcacactgagaaggtgaggctgagcatcggacttgctgactttgggctgcccggcattgcccggaacacgtttgtggtccctgattccatctctagatactgcagggaaggctctgtaattggaaaatgctgcccaagcagaaagtctgccttgcttaataaacagggctctctgaagaagttcaaaattaccagaggagaaacacagcctagtgttaccatcagtgttctagaactggctgaaattgatcaaaggttttagctgcgatctttctcctacagctcatttaaccatgcaattaggcagttaagtagatgcaaaatatttaaaattaaagatgcttctcatc

SEQ ID NO: 952 - DNA, 2026 bp, Homo sapiens
agacggacgttgagagaacgaggaggaaggagagaaaatggcgtccacggattacagtacctatagccaagctgcagcgcagcagggctacagtgcttacaccgcccagcccactcaaggatatgcacagaccacccaggcatatgggcaacaaagctatggaacctatggacagcccactgatgtcagctatacccaggctcagaccactgcaacctatgggcagaccgcctatgcaacttcttatggacagcctcccactggttatactactccatcctaccctcctaccagctattcctctacacagccgactagttatgatcagagcagttactctcagcagccagcagccactgcacctacaagaccgcaggatggaaacaagcccactgagactagtcaacctcaatctagcacagggggttacaaccagcccagcctaggatatggacagagtaactacagttatccccaggtacctgggagctaccccatgcagccagtcactgcacctccatcctaccctcctaccagctatggacagcagagtagctatggtcaacaaagcagctatgggcagcagcctcccactagttacccaccccaaactggatcctacagccaagctccaagtcaatatagccaacagagcagcagctacgggcagcagagttcattccgacaggaccaccccagtagcatgggtgtttatgggcaggagtctggaggattttccggaccaggagagaaccggagcatgagtggccctgataaccggggcaggggaagagggggatttgatcgtggaggcatgagcagaggtgggcggggaggaggacgcggtggaatgggcagcgctggagagcgaggtggcttcaataagcctggtggacccatggatgaaggaccagatcttgatctaggcccacctgtagatccagatgaagactctgacaacagtgcaatttatgtacaaggattaaatgacagtgtgactctagatgatctggcagacttctttaagcagtgtggggttgttaagatgaacaagagaactgggcaacccatgatccacatctacctggacaaggaaacaggaaagcccaaaggcgatgccacagtgtcctatgaagacccacccactgccaaggctgccgtggaatggtttgatgggaaagattttcaagggagcaaacttaaagtctcccttgctcggaagaagcctccaatgaacagtatgcggggtggtctgccaccccgtgagggcagaggcatgccaccaccactccgtggaggtccaggaggcccaggaggtcctgggggacccatgggtcgcatgggaggccgtggaggagatagaggaggcttccctccaagaggaccccggggttcccgagggaacccctctggaggaggaaacgtccagcaccgagctggagacctgcagtgtcccaatccgggttgtggaaaccagaacttcgcctggagaacagagtgcaaccagtgtaaggccccaaagcctgaaggcttcctcccgccaccctttccgcccccgggtggtgatcgtggcagaggtggccctggtggcatgcggggaggaagaggtggcctcatggatcgtggtggtcccggtggaatgttcagaggtggccgtggtggagacagaggtggcttccgtggtggccggggcatggaccgaggtggctttggtggaggaagacgaggtggccctggggggccccctggacctttgatggaacagatgggaggaagaagaggaggacgtggaggacctggaaaaatggataaaggcgagcaccgtcaggagcgcagagatcggccctactagatgcagagaccccgcagagctgcattgactaccagatttattttttaaaccagaaaatgttttaaatttataattccatatttataatgttggccacaacattatgattattccttgtctgtactttagtatttttcaccatttgtgaagaaacattaaaacaagttaaatggt

SEQ ID NO: 953 - DNA, 2250 bp, Homo sapiens
atctgactgccagcctggagaagccggaggtgaggaagttggctgagcctggggaggagaagcttgagggctactctgaaaaagcccagaagggtgatcttgggaaagacagcgaggagtcagaggaggacggagaggaagaggaggaatccgaggaggaggaagaaacatcagacttaaggaacaaatggcacctggtgattgaccgcctcactgtgctcttcttaaaattcctggagtattttcacaagctgcaggtgttcatgtggtggattttggagttgcacatcatcaaaatcgtttcctcttacattatctgggtttctgtgaaagaggtgtctctgttcaactatgtatttttgatttcttgggcttttgctctgccgtacgccaagctgcgctgtctggcttcaagtgtctgcacggtctggacgtgtgtgatcatcgtctgcaaaatgttgtaccagcttcaaaccattaagcctgagaacttctctgttaactgttccttgccaaatgaaaatcaaacaaacatcccctttaatgagttgaacaagtctctgctctacagcgctcctatcgatcctacagagtgggtcggcctgcggaagtcttcgcctctgctagtctacctgaggaataacctcctgatgctggctatcctggcctttgaagtcaccatttaccgccatcaggaatactatcgaggtcgaaataacctgacggcccctgtgtctagaactatctttcatgacattacaagactacatctagatgatggacttattaattgtgccaaatatttcattaattacttcttttacaagtttggtctggagacctgtttcctaatgtcagttaacgtcattggccagcgaatggatttctatgccatgatccacgcctgctggctgatcgctgtcttatatagacgcagaaggaaagccatcgcagagatctggcccaagtactgctgcttcctggcaggcatcatcaccttccagtatttcatctgcattggcatcccacctgctccttgccgagattacccgtggagattcaaaggtgccagcttcaatgacaacatcataaagtggctgtacttcccagatttcattgtgcggcccaaccctgtgtttctcgtctatgacttcatgctgcttctgtgtgcctccttacaacggcagatttttgaggatgagaacaaggctgcagtgcgaatcatggcaggtgacaatgtcgagatctgcatgaatcttgatgcggcctccttcagccaacataaccctgtgccagattttattcactgcagatcttacttagacatgtccaaagtgatcatcttcagctacctcttctggtttgtgctcaccatcatcttcatcactgggaccaccaggatcagcatcttttgcatggggtacctggtggcctgtttctacttcctgctctttgggggcgatttgctgttgaaacccatcaagagcatcctgcgctactgggactggctgatcgcatacaacatttttgtgattacgatgaaaaatatcctgtcaataggagcatgtggatacattggaacattggtgcacaatagttgttggttgatccaggctttcagcctggcctgcacagtcaaaggctatcaaatgcctgctgctaattcaccctgtacactacccagtggggaagcaggaatcatttgggacagcatatgttttgccttcctcctgctgcaaagaagagttttcatgagttattattttctacatgttgtggctgatataaaagcttcccagattctggcatcaagaggagctgaacttttccaggccacaattgtaaaagctgtaaaggcaagaattgaggaagagaagaagtccatggaccagctgaagcgacagatggatcgcatcaaggccaggcaacagaaatataaaaagggtaaggagaggatgctgagcttgacccaggagccaggggaaggccaggacatgcaaaaactctctgaagaggatgatgaaagagaagcagacaaacagaaagccaagggcaaaaaaaagcagtggtggcggccttgggttgatcatgcttccatggtcaggagtggagattattatttgtttgaaacggatagtgaagaggaggaagaggaagaattaaagaaggaagatgaagaacctccacgaaggtcagcattccagtttgtttatcaagcctggattactgatcctaaaacagcactccgac

SEQ ID NO: 954 - DNA, 1872 bp, Homo sapiens
agcctgggagctgcgagaagggaaggacaggtcagctctgggtgcagagacccctctggggctgcaggcacagaatggagggggaaccagaagccaggaggcccgggaggaggctgggaggggcgaggcagggcttgagctaggcccctgagggcgacagagaggagggtctgaggctggtgggccctgggaggtgaggaggcaggaatgagtggaaggtgtccaggggcctggatgaacctggggatccccgttaggcacctgcagaagtgggggactcaggcacagggaggcaaggggtccctggcttggggtgtgtcccctcctggagccacaggcccatgcgcccaggcaggcagttcatccaggcagcccacaagctgcccatgcacccccggcaaggtggagctgatgccccgcaggacacactcatgaaagccctggctgcgcatggaccagggtgtggcaggttctggtttgcaagttttcccaaggtcaaagggcaggtcgtaaagttaaaagccagacagcaccggaggggaaactgctgggggttgcagactcccgaacggctctggccccatcccatccagatccctgcacctcctgcccgcccaccgggctccccacgcctctgctggtgtgggtctcgctctctgccccatctgggtgtctggccccgggcccctggctaaccccctctgtctctgtgtctccctctctcgcttcgcctgtctcagcctcccttctctatctctcttgctgggcatttccctccaccctgggtgataggagtgggaccctgtctcaaaacatacacacacacacacacacacacacacacacacacactctctctctctctctctctctctctctctctctctcaaaaacacttggtctgttatttttacgaaattgtcagtcatagttatctgttagaccaaagctgagtaagaacatttattacattgcctcctacaacttcatcagctaatgtatttgctatatagcaattacatattggaatatattatctttagagatggccaagtcataaaactgtcactgagaaaaggagaatgacaatgtgtatgctcaaatgtacttccctataaatttccaaaagacatgaaacttactacaggtttgtttttttcacaccttcacttcttaaaaacaaaaaaacttttacatagcagtaactaatgcacattaaaagtttataaatagcctgctattggatcatttgcttggaaaagttgagattttcaaatttgattataacataacttttgtagaaatacacggccaggtgcagtggctcacatttgtaatctcagcactttgggaggctgaggtgggaggatcgcttggggccaggagtttgagaccagcctgggcaacatgacaaaaccccatctcctcaaaaagcacaaaaattagccagatgtggtggtgcacacctgtagtcccagctacttgggggactgaggtggaaggatggtttgggtctgggaagttgaggatgcagtgagccaaggtcatgccactgcactccagccagggtgacaaagtgacaccctgtctcaatataataattttaaaaaggtgcctgtaatcctagcactttgggaggccaaggcgggcggatcacgaagtcgggagttcaagaccagcctggccaatatggtaaaacccgtctctactaaaaatacaaaaattagccaggtatggtggtgtgtgcctgtaataccagctacttgggaggctggggcgggagaatcgcttgaacccgggaggtggagatttcagtgagccgagattgcaccactgcactccagtctgggtgacagagcaagacttcatctg

SEQ ID NO: 955 - DNA, 2553 bp, Homo sapiens
gagtggccggcacttccggccggcggcggctgctccgggtgagcaggcccctgaagtgctgtgcctggagataccattgtggaccctggagaggcacctgctgcttatgcggtaaaacctctaccaccccaaacctggtcagtttgaggggagccgctgccatagtatccacagagaaggccggagttccagccgtgtggagcagcagaggggagtctgacagggtcacctcctccacagagagaattggcagctgactgcactgccaggagccaaggcctaggtgtgtggagcctgcttcaggtccaggcaggcaggcagagtggagagggagagacggagccccagaaggggagcaggaggagagggaagtagtggcagcagcccaggccaggcgtgtgtcctgcaagtgctaggaccagccacccctccccatggcctccaagccggctgccgggaagagcagaggggagaagcggaagagggtggtgctgacactgaaggagaagattgacatctgcacgcgcctggagaagggcgagagccggaaggcactgatgcaggagtacaatgtgggcatgtccaccctctacgacatcagggcccacaaggcgcagctgctccggttcttcgccagctccgactccaacaaggcgctggagcagcggcgcacgctgcacacgcccaagctggagcacctggaccgcgtcctgtacgagtggttcctggggaagcgctccgagggcgtccccgtgtcaggccccatgctcatcgagaaggccaaggacttctacgagcagacgcagctcactgagccctgcgtgttctccggagggtggctttggcgctttaaggccagacacggcattaaaaagctagatgcatccagtgaaaagcagtcagccgaccaccaggccgcggagcagttctgtgcgtttttcaggagcttggctgctgagcacgggctgtccgccgagcaggtttacaacgctgatgagaccggccttttctggcggtgcctgccaaatcccactccggaaggcggggctgtgcctggccccaagcagggcaaggaccggctgaccgtgctgatgtgtgccaacgccacgggctcccacaggctcaagcccttggccatcgggaagtgcagcggtcccagggctttcaaaggcatccagcacctgcccgtcgcctataaggcccaggggaacgcctgggtggacaaggagattttttccgattggttccatcatatctttgtgccctcggtgagagagcacttcagaaccataggtttgccggaagacagcaaagccgttctcttgctggacagctcccgggctcacccgcaggaggccgagctggtgtccagtaacgttttcaccatcttcctgcctgccagcgtggcctcattggtgcagcccatggagcagggcattcggagagatttcatgaggaacttcattaaccctccggtccccctgcagggcccccacgcccgctacaacatgaacgatgccatattcagcgtggcctgtgcctggaacgcagtccctagccacgtcttcaggcgggcctggaggaagctgtggccgtcggttgcgtttgccgaaggctcctcctctgaggaggagttggaggcagagtgcttcccagtgaagccccacaacaagtcctttgcacacatcctggagcttgtgaaggaaggctcctcctgcccgggccagcttcgccagcgccaggccgccagctggggggtagcgggaagggaggcagaagggggacggccccctgctgccacgtcgccagcagaggttgtgtggagttcagaaaagactccgaaagctgaccaggacggcagaggagatcctggtgagggcgaggaggtggcctgggagcaggcggccgtggcctttgacgcagtcctgcgctttgcggagcggcagccatgcttcagtgcgcaggaagtggggcagctgcgggcgctgcgtgccgtgttccggagccagcagcaggagactgtgggccttgaggatgtggtagtgacctcaccagaggagttggcaattcctaagtgctgcctggaggcctctacagagacataatgttggagaacttctgccacatggcagtgctgggtaagacccctctgtccccaccagtgcccttgaggttatgggtgttggtaggtctgtggcctccatctccatgacgatggtgttaaggactgcatgtttgtgtccccccccaaagtttatatgttgaaaccctgacccccaggagggtggtattaggaggtggggcctttgggaggtgactaggcttaggtgagatcgtgagggtggggctcgccgatgagatcgagtccttataagaaaaggaaggaactagagcgaggtcactttgtgctgtgtgagcatacaagaaaactgccatcttcaagctgggtgcagtggctcacgcctgtaatcccagcactggaaggccaaggcattaggattgcatgagtccaggagttcgagaccagcctaggcatgataagaccttattgct

SEQ ID NO: 956 - DNA, 1991 bp, Homo sapiens
gttaacaatgatttcgatttatcataggcatgctccccgtgatctccactagagagctttccaactttgagctcaccctcagccctgatggcacaagagttggaaaccacaagtgctccaacctcctggattatactgaagtgaagactcattatggtttcttgactgatgctaccaaaaatccagaaataattggagagacatatccttaccagtacagcttgtccatcagaggttccactaccttgcgcttctaccggaacctgaacctagaggcctgtttatgggagttcgttagctactatgacatgtcagaactccttgctgactgtggtggcaccattggaacagatggacaggtacagatttataacatctgagtttggtcactggataaaccaattggtttgttttgtcacatagatttgtactaagtcccaactccagttttccatcttggtgttgtaggtaattattgacagcaagggaccagacaactggcatggatggtgtgaaaatccgtgtctatttcttaacaatgggccagaatatacgtagtttttgacaatgggctagaaacattatatctatgtgaaaaggatgctgtataattattgccttaagctcaaaatctactctgatattataaaaatccaaatactgacttctcttcaaagtatacactatgttgtttttgtgtttatgtgtagatgcctgtgatgttgtatcatgagccacctaaagtgaggttttacaatcctgggagtcagcctaatttttctccctcttttctgactttcttcttcccctacattttacaaaactttctctgcttttagcctcctgttttactctccttctttttctttctgtttttctcctcttcttcatactacacattcacacataaaatacacatacacacacacaatcctcacccccaccccatcatcagcaacaaagttgttaaaatgataaggaagcaagatcttcttgtgggttacaatagagaacctaaaatatgtagggcatgatttaaaattgttatgagtatttgaactaaaagcaatgctataatcttacctggactaaataaggagttacataagtaggtttatgcattgaagtgttgaatgatatatagactatataatgcccttccagattgagctaaagttaggctgcccttttttgtgctatattcataaggtgttgaatgaaatatgtaacaaccagtagcaagaaaaaactagataactagtatgagataatcccacagtaaagctgtggactttgacaagttctgctggtgttgatgttgaattggactcagaggtggtgagacatgaccatagccaccttgtcaaaaagcagcaacatttagtaacttacagggattgctaaaaatgccaatagaaatagcaatagagaagcagtataagatggtggaatctggatattggaatcaagcaaatgctgaccaaaatttggctctgatagtttctagctgtatgtctttgagcaagttacttaaacacgtataagtgttcatcctgtagattcctctttcctaacctgtttttgccacctgaaagaaacatggaaaaataaagattcaatccctagaagaaaaataaaggctcatattaacaaatctacctctttttctttatagatcaggtatctctacttccttcatgtcttccttacaaagctgccttcaatccattactaaattatttctatttcctttctggttgcttttctctcagattgttgcttacatcacagcatctattggtataaacaaaattggatatagaaataggattatgttgtagttctcattccttgttaaaatcgtttcatacgccaggagcagtgacttcatgcctgtaatcccagcactttgggaggccgaggcgggcagatcacctgaggttgggagtccaagagcagcctgaccaacatggagaaaccccgtctctact

SEQ ID NO: 957 - DNA, 2035 bp, Homo sapiens
gtataatgactggctggaagaggagtgcggaaacatggctcgcgaaggactgcggaccctcgtggttgcaaagaaggcgttgacagaggagcagtaccaggactttgagagccgatacactcaatccaagctgagcatgcacgacaggtccctcaaggtggccgcggtagtcgagagcctggagagggagatggaactgctgtgcctcaccggcgtggaggaccagctgcaggcagacgtgcggcccacgcttgagatgctgcgcaacgccgggatcaagatatggatgctaacaggcgataaactcgagacagctacctgcattgccaaaagttcacatctcgtgtctagaacacaagatattcatattttcagacaggtaaccagtcggggagaggcacatttggagctgaatgcatttcgaaggaagcatgattgtgcactagtcatatctggggactctctggaggtttgtctaaagtactacgagcatgaatttgtggagctggcctgccagtgccctgccgtggtttgctgccgctgctcacccacccagaaggcccgcattgtgacactgctgcagcagcacacagggagacgcacctgcgccatcggtgatggaggaaatgatgtcagcatgattcaggcagcagactgtgggattgggattgagggaaaggagggtaaacaggcctcgctggcggccgacttctccatcacgcagttccggcacataggcaggctgctcatggtgcacgggcggaacagctacaagaggtcggcggcactcggccagttcgtcatgcacaggggccttatcatctccaccatgcaggctgtgttttcctcagtcttctacttcgcatccgtccctttgtatcagggcttcctcatggtggggtatgccaccatatacaccatgttcccagtgttctccttagtgctggaccaggacgtgaagccagagatggcgatgctctacccggagctgtacaaggacctcaccaagggaagatccttgtccttcaaaaccttcctcatctgggttttaataagtatttaccaaggcggcatcctcatgtatggggccctggtgctcttcgagtctgagttcgtccacgtggtggccatctccttcaccgcactgatcctgaccgagctgctgatggtggcgctgaccgtccgcacgtggcactggctgatggtggtggccgagttcctcagcttaggctgctacgtgtcctcactcgcttttctcaatgaatattttgatgttgcctttatcaccaccgtgaccttcctgtggaaagtgtcggcgatcaccgtggtcagctgcctcccgctgtatgtcctcaagtacctgaggcgcaagctctctcctcccagctactgcaagctggcctcctaaggggctgtgcacccccagcgggctggccccagcaccttctgcccttcccagcaccttgtgcccttgccagtgaacgcagggtttgccattgctaccaagcaagcaccacaagaaagggagggtacgccaggcgagcccagggcacagatgctgagacagcctctccttctcagtgcagggacgtcacccctgccaggcaagcccagggcacagatgccaggatggcttctccctctcagtgcgaggcttcacccatgctaggcaagcccagggcacagatgccgggatggcccctccctctcagtgcgggaacgtcacccctgccaggcaagcccagggcacagatgctgcgatggcctcttcctcttaagtgtggggcctcacccctgcttttctttctttttttgtattgtcaaaattgtatttccatattgaagcagcttgagtttctactgaaaatgagcccgaattatttcactattactgtaaagggttcatcttactctggcattctgagaatcagactgaaagtttaatttctgcagttccctcacattcagattctttctttgatgttataacacaaagtcattcctactcaaatgtaataaaattgaggctccacgg

SEQ ID NO: 958 - DNA, 2535 bp, Homo sapiens
agcgctgccaccgtgagccccgtcgcgggcacccacccctggccgcggtacaccacgcgcgccccgcctggccacttctccaccaccccgatgctgtccttgcgccagaggatgatgcatgccagattccgtaaccctctctcccgacagcctgccagaccctcttacagacaaggttataatggcagaccaaatgtagaagggaaagtccttcctggtagtaatggaaaaccgaatggacagagaattatcaatggccctcaaggaacaaagtgggttgtggaccttgatcgtgggttagtattgaatgcagaaggaaggtacctccaagattcacatggaaatcctcttcggattaaactaggaggagatggtcgaaccattgtagatctggaagggacccccgtggtgagtcctgacggcctcccactctttgggcaggggcgacatggcacacctctggccaatgcccaagataagccaattttgagtcttggaggaaagccgctggtgggcttggaggtcatcaaaaaaaccacccatccccctaccactaccatgcagcccaccactactacgacgcccctgcctaccactacaaccccgaggcccaccactgccaccacccgccgcacgaccaccaggcgtccaacaaccacagtccgaaccactacgcggacaaccaccaccaccacccccaaacccaccactcccatccccacctgtccccctgggaccttggaacggcacgacgatgatggcaacctgataatgagctccaatgggatcccagagtgctacgctgaagaagatgagttctcaggcttggagactgacactgcagtacctacggaagaggcctacgttatatatgatgaagattatgaatttgagacgtcaaggccaccaaccaccactgagccttcgaccactgctaccacaccgagggtgatcccagaggaaggcgccatcagttcctttcctgaagaagaatttgatctggctggaaggaaacgatttgttgctccttacgtgacgtacctaaataaagacccatcagccccgtgctctctgactgatgcactggatcacttccaagtggacagcctggatgaaatcatccccaatgacctgaagaagagtgacctgcctccccagcatgctccccgcaacatcaccgtggtggccgtggaaggttgccactcatttgtcattgtggactgggacaaagccaccccaggagatgtggtcacaggttacttggtttacagtgcatcctatgaagacttcatcaggaacaagtggtccactcaagcttcatcagtaactcacttgcccattgagaacctaaagcccaacacgaggtattattttaaagtgcaagcacaaaatcctcatggctacggacctatcagcccttcggtctcatttgtcaccgaatcagataatcctctgcttgttgtgaggcccccaggcggtgagcctatctagatcccattcgctttcaaacatgatcccagctacacggactgccatgggcggcaatatgtgaagcgcacgtggtatcgaaagttcgtgggagttgttctttgtaattcactgaggtataaaatctacctcagtgacaacctgaaagatacattctacagcattggagacagctggggaagaggtgaagaccattgccaatttgtggattcacaccttgatggaagaacagggcctcagtcctatgtagaagccctccctactattcaaggctactatcgccagtatcgtcaggagcctgtcaggtttgggaacatcggcttcggaaccccctactactatgtgggctggtacgagtgtggggtctccatccctggaaagtggtaatcacaggaccgtcatgctgcaagcttgccctgcccagccccaccaactaagtcgcactaggggctgtgagcaaagacagccagcgtgctcagccccgctgccctaggtgccaggaaggtcatagatggacactggccattctggtcatctcagtctggaactcagtcccacttcttggcctggacaatgaacaggattcagttttgctgttaactttgcttctctacttttttttgtttgtttgtaatagcacatcccagagacatcagaaaccagcaactgattcagtgtgatttccagactttttaggcatgaaattcggacacttcagtatttccaggaatagcatatgcacgctgttcttgcttcatggaatgctacatgctttctgtttttctcattttggatttctccaaaactaactgaatttaagcttcaggtccctttgtatgcagtagaaaggaattattaaaaacaccaccaaagaaaataaatatatcctacttgaaatttactctatggacttacccactgctagaataaatgtatcaaatcttatttgtaaattctcaattttgatatatatatgtatatatgcatatacatatccacacttgtctgcaagaatattgattaaaattgctaaatttgtacttgttc

SEQ ID NO: 959 - DNA, 2330 bp, Homo sapiens
ctaaaggatgccggacattgtcacagtatgttagagtgctgttaatttggaagagagaactatgaaaaaaaaaaatactgaagattgtgctgcaaaaataaaaggcagcattacagcaaagtacacaatggtgattctagatgtatgtgcttggaaacaaatctttcctattttatattatttatgtctggtttataactaaggggactttattcctgtgcagcattgctgtgtgcatgtacatctgtgaagctttataagtatttgcagtcgtgaaataaatgtaacaggaaattctgaggagtggggctaaatcatcttaagagcaataaacattgccagaatttctttcttttttttttttgttgttttgttttgttttgaaatggagtctcgctctgtcaccaggctggagtccagtggcacaatctcagctcactgctacctccacttcccaggtccaagcgattctcctgcctcagcctcccacgtagctgggactacaggcgcatgccaccacacccagctaatttttgtatttttagtagagatggggtttcaccatgttggccaagattgtctcgatctcttgacctcgtgatccgcccacctcgacttcccaaagtgctgggattacaggcttgagccactgtgcccagctgccagaatttgtttctaaggagaggtatttttaaaattattcttttgcatttttaaccgaaagaaatgcataaccctggaaacacactgtatgtagggctgtaaggaaattattgtagaaaagctattttaactatgttgtgtcatagtagaatagtcccagaaagttctagaattgcagagctgggaagaaccatattgctatctaagacagatacctaattttttactcagatttcctaacttctgcttccttcagtgttctttaaaactctggccctattcactaatttgtaaatctattcaagaatggcactaagactttttgatagataatagcagtattccatcttaattgtaacttgtgatttctgccttttttaaggttctctttggattccagttgttgctgctttactactctttctagtgcttagcctggtattcatctgtttttatattaagaaaattaatccattgaaggaaaaaagcataatattacccaagtccttgatctctgtggtaagaagtgctactttagagacaaaacctgaatcaaaatatgtatcactcatcacgtcataccagccattttccttagaaaaggaggtggtctgtgaagagccgttgtctccagcaacagttccaggcatgcataccgaagacaatccaggaaaagtggaacatacagaagaactttctagtataacagaagtggtgactactgaagaaaatattcctgacgtggtcccgggcagccatctgactccaatagagagagagagttcttcacctttaagtagtaaccagtctgaacctggcagcatcgctttaaactcgtatcactccagaaattgttctgagagtgatcactccagaaatggttttgatactgattccagctgtctggaatcacatagctccttatctgactcagaatttcccccaaataataaaggtgaaataaaaacagaaggacaagagctcataaccgtaataaaagcccccacctcctttggttatgataaaccacatgtgctagtggatctacttgtggatgatagcggtaaagagtccttgattggttatagaccaacagaagattccaaagaattttcatgagatcagctaagttgcaccaactttgaagtctgattttcctggacagttttctgctttaatttcatgaaaagattatgatctcagaaattgtatcttagttggtatcaaccaaatggagtgacttagtgtacatgaaagcgtaaagaggatgtgtggcattttcacttttggcttgtaaagtacagacttttttttttttttttaaacaaaaaaagcattgtaacttatgaacctttacatccagataggttaccagtaacggaacagtatccagtactcctggttcctaggtgagcaggtgatgccccagggacctttgtagccacttcactttttttcttttctctgccttggtatagcatatgtttttgtaagtttatgcatacagtaattttaagtaatttcagaagaaattctgcaagcttttcaaaattggacttaaaatctaattcaaactaatagaattaatggaatatgtaaatagaaacgtgtatattttttatgaaacattacagttagagatttttaaataaagaattttaaaacac

SEQ ID NO: 960 - DNA, 3379 bp, Homo sapiens
agtggtgcctgcaacccctggttcacctccttccaggttctggctccttccagccatggctctcagagtccttctgttaacagccttgaccttatgtcatgggttcaacttggacactgaaaacgcaatgaccttccaagagaacgcaaggggcttcgggcagagcgtggtccagcttcagggatccagggtggtggttgcagccccccaggagatagtggctgccaaccaaaggggcagcctctaccagtgcgactacagcacaggctcatgcgagcccatccgcctgcaggtccccgtggaggccgtgaacatgtccctgggcctccctctgctccgtggacgtggacagcaacggcagcaccgacctggtcctcatcggggccccccattactacgagcagacccgagggggccaggtgtccgtgtgccccttgcccagggggcggatagcaggctccaagctctctcccaggctccagtattttggtcagtcactgagtgggggccaggacctcacaatggatggactggtagacctgactgtaggagcccaggggcacgtgctgctgctcaggtcccagccagtactgagagtcaaggcaatcatggagttcaatcccagggaagtggcaaggaatgtatttgagtgtaatgatcaggtggtgaaaggcaaggaagccggagaggtcagagtctgcctccatgtccagaagagcacacgggatcggctaagagaaggacagatccagagtgttgtgacttatgacctggctctggactccggccgcccacattcccgcgccgtcttcaatgagacaaagaacagcacacgcagacagacacaggtcttggggctgacccagacttgtgagaccctgaaactacagttgccgaattgcatcgaggacccagtgagccccattgtgctgcgcctgaacttctctctggtgggaacgccattgtctgctttcgggaacctccggccagtgctggcggaggatgctcagagactcttcacagccttgtttccctttgagaagaattgtggcaatgacaacatctgccaggatgacctcagcatcaccttcagtttcatgagcctggactgcctcgtggtgggtgggccccgggagttcaacgtgacagtgactgtgagaaatgatggtgaggactcctacaggacacaggtcaccttcttcttcccgcttgacctgtcctaccggaaggtgtccacactccagaaccagcgctcacagcgatcctggcgcctggcctgtgagtctgcctcctccaccgaagtgtctggggccttgaagagcaccagctgcagcataaaccaccccatcttcccggaaaactcagaggtcacctttaatatcacgtttgatgtagactctaaggcttcccttggaaacaaactgctcctcaaggccaatgtgaccagtgagaacaacatgcccagaaccaacaaaaccgaattccaactggagctgccggtgaaatatgctgtctacatggtggtcaccagccatggggtctccactaaatatctcaacttcacggcctcagagaataccagtcgggtcatgcagcatcaatatcaggtcagcaacctggggcagaggagcctccccatcagcctggtgttcttggtgcccgtccggctgaaccagactgtcatatgggaccgcccccaggtcaccttctccgagaacctctcgagtacgtgccacaccaaggagcgcttgccctctcactccgactttctggctgagcttcggaaggcccccgtggtgaactgctccatcgctgtctgccagagaatccagtgtgacatcccgttctttggcatccaggaagaattcaatgctaccctcaaaggcaacctctcgtttgactggtacatcaagacctcgcataaccacctcctgatcgtgagcacagctgagatcttgtttaacgattccgtgttcaccctgctgccgggacagggggcgtttgtgaggtcccagacggagaccaaagtggagccgttcgaggtccccaaccccctgccgctcatcgtgggcagctctgtcgggggactgctgctcctggccctcatcaccgccgcgctgtacaagctcggcttcttcaagcggcaatacaaggacatgatgagtgaagggggtcccccgggggccgaaccccagtagcggctccttcccgacagagctgcctctcggtggccagcaggactctgcccagaccacacgtagcccccaggctgctggacacgtcggacagcgaagtatccccgacaggacgggcttgggcttccatttgtgtgtgtgcaagtgtgtatgtgcgtgtgtgcgagtgtgtgcaagtgtctgtgtgcaagtgtgtgcacgtgtgcgtgtgcgtgcatgtgcactcgcacgcccatgtgcgagtgtgtgcaagtatgtgagtgtgtccaagtgtgtgtgcgtgtgtccatgtgtgtgcaagtgtgtgcatgtgtgcgagtgtgtgcatgtgtgtgctcaggggcgtgtggctcacgtgtgtgactcagatgtctctggcgtgtgggtaggtgacggcagcgtagcctctccggcagaagggaactgcctgggctcccttgtgcgtgggtgaagccgctgctgggttttcctccgggagaggggacggtcaatcctgtgggtgaagacagagggaaacacagcagcttctctccactgaaagaagtgggacttcccgtcgcctgcgagcctgcggcctgctggagcctgcgcagcttggatggagactccatgagaagccgtgggtggaaccaggagcctcctccacaccagcgctgatgcccaataaagatgcccactgaggaatgatgaagcttcctttctggattcatttattatttcaatgtgactttaattttttggatggataagcctgtctatggtacaaaaatcacaaggcattcaagtgtacagtgaaaagtctccctttccagatattcaagtcacctccttaaaggtagtcaagattgtgttttgaggtttccttcagacagattccaggcgatgtgcaagtgtatgcacgtgtgcacacacaccacacatacacacacacaagcttttttacacaaatggtagcatactttatattggtctgtatcttgctttttttcaccaatatttctcagacatcggttcatattaagacataaattactttttcattcttttataccgctgcatagtattccattgtgtgagtgtaccataatgtatttaaccagtcttcttttgatatactattttcattctcttgttattgcatcaatgctgagttaataaatcaaatatatgtcatttttgcatat

SEQ ID NO: 961 - DNA, 2139 bp, Homo sapiens
acacagccattgggggttgctcggatccgggactgccgcagggggtgccacagcagtgcctggcagcgtgggctgggaccttgtcactaaagcagagaagccacttcttctgggcccacgaggcagctgtcccatgctctgctgagcacggtggtgccatgcctctgcaactcctcctgttgctgatcctactgggccctggcaacagcttgcagctgtgggacacctgggcagatgaagccgagaaagccttgggtcccctgcttgcccgggaccggagacaggccaccgaatatgagtacctagattatgatttcctgccagaaacggagcctccagaaatactgaggaacagcactgacaccactcctctgactgggcctggaacccctgagtctaccactgtggagcctgctgaccacggagctggccaacatggggaacctgtccacggattcagcagctatggagatacagaccactcaaccagcagccacggaggcacagaccactcaaccagtgcccacggaggcacagaccactccactggcagccacagaggcacagacaactcgactgacggccacggaggcacagaccactccactggcagccacagaggcacagaccactccaccagcagccacggaagcacagaccactcaacccacaggcctggaggcacagaccactgcaccagcagccatggaggcacagaccactgcaccagcagccatggaagcacagaccactccaccagcagccatggaggcacagaccactcaaaccacagccatggaggcacagaccactgcaccagaagccacggaggcacagaccactcaacccacagccacggaggcacagaccactccactggcagccatggaggccctgtccacagaacccagtgccacagaggccctgtccatggaacctactaccaaaagaggtctgttcatacccttttctgtgtcctctgttactcacaagggcattcccatggcagccagcaatttgtccgtcaactacccagtgggggccccagaccacatctctgtgaagcagtgcctgctggccatcctaatcttggcgctggtggccactatcttcttcgtgtgcactgtggtgctggcggtccgcctctcccgcaagggccacatgtaccccgtgcgtaattactcccccaccgagatggtctgcatctcatccctgttgcctgatgggggtgaggggccctctgccacagccaatgggggcctgtccaaggccaagagcccgggcctgacgccagagcccagggaggaccgtgagggggatgacctcaccctgcacagcttcctcccttagctcactctgccatctgttttggcaagaccccacctccacgggctctcctgggccacccctgagtgcccagaccccattccacagctctgggcttcctcggagacccctggggatggggatcttcagggaaggaactctggccacccaaacaggacaagagcagcctggggccaagcagacgggcaagtggagccacctctttcctccctccgcggatgaagcccagccacatttcagccgaggtccaaggcaggaggccatttacttgagacagattctctcctttttcctgtcccccatcttctctgggtccctctaacatctcccatggctctccccgcttctcctggtcactggagtctcctccccatgtacccaaggaagatggagctcccccatcccacacgcactgcactgccattgtcttttggttgccatggtcaccaaacaggaagtggacattctaagggaggagtactgaagagtgacggacttctgaggctgtttcctgctgctcctctgacttggggcagcttgggtcttcttgggcacctctctgggaaaacccagggtgaggttcagcctgtgagggctgggatgggtttcgtgggcccaagggcagacctttctttgggactgtgtggaccaaggagcttccatctagtgacaagtgacccccagctatcgcctcttgccttcccctgtggccactttccagggtggactctgtcttgttcactgcagtatcccaactgcaggtccagtgcaggcaataaatatgtgatggac

SEQ ID NO: 962 - DNA, 2140 bp, Homo sapiens
attacagccgcctgggctggcggctggacctgccctggagtggccgctcggggcttacccggtccccagcgcctgggctctgtcctatctacaaggctgagcctgcaatggctgggggactggctggtgctgtcaggaggcctgggggtcgtggtgcggctggacaggactggctccatctccatctctgtggaccacgagctctggggacagacacaaggcctctgtgggctctacaatggctggccagagggactatgtgaagggacagctactgatcctactggagcatggggcctgcgacgctgggagctgcctccacgccatctccgtctccctggaggacacccacatccagctcagggactcaggtgcagggtctgtgtggcaccttcacccagaaccagcaggacgacttcctgacaccagccggagatgtggaaactagcattgctgcctttgctagcaagttccaggtggccggcaagggaagatgcccctctgaggacagtgccctgctgtctccctgcaccacccactcccagcgccacgccttcgcagaggcggcctgtgccatcctgcacagctctgtcttccaggaatgccacaggctggtggacaaagagccattctatctgcgctgcctggcagccgtgtgtggctgtgatcccggcagtgactgcctgtgcccggtgctgtctgcctatgcgcgtcgctgtgcccaggaaggtgcctcacctccctggaggaaccagaccctctgccctgttatgtgtcctggtggccaggagtaccgagagtgtgccccagcatgcggtcaacactgcgggaaaccagaggactgtggagagctgggcagctgtgtggctggttgtaactgtcctctggggctgctgtgggaccctgagggccagtgtgtgccccccagcttgtgcccctgccagctcggagcccgtcgctatgcccctggcagtgccaccatgaaggagtgcaaccgctgcatctgccaggaaaggggcctctggaattgcacggctcgccactgcccttcacaggggcattctgccccagggagcttgtctatgcccctggtgcctgtctcctcacctgtgacagccccagcgccaatcactcctgccctgcaggcagtactgatggctgtgtctgtccaccaggcacggtgctgctggacgagcgctgtgtgcctcctgacctctgtccctgccgtcacagtgggcagtggtacctgcccaacgccaccatccaggaagactgcaacgtttggccgggcagtgacggtgaatggggtgagcgtgacgccccccaaggtctacacaggccctgagctgagcctgcgtcgtgctggcctcttcctgctgctctcgacccacctgggcctcaccctgctctgggatggagatcaggcccctgccctccctcaaccattggacctgtgccccgccttagcaccatagggttggactcaccccaacttctttctcccaacgcctgaccctccctcctcctggtctccctccactgagcccctgacacctccacagggcagatttccaggctgagagctaagctgacagccaggctaggaccctgagctctcaccttacttccctgcctggctggcacttgccctgccccatgcccaacccagtgccacccctacctcccagtccatgcaagaggtccgagtttccaaattaggtttttggccaggtgcagtggctcacaactgtaatcccagcactttgggaggctgaggcaagcagatcccttgagcccagggctttgagactagcctgggttgaacatggcaagactccctgtctacaaaaaatacaaaattagctgggcacggtggtgcgcatctgaaatctcagctacctgggagctaagatgggaagattgcttgagcctgggacgtcaaggctgcagtgagctgtgatcaccccactgcactctgcctgggcaatagagcgagaaaaaaattttttttaaattaggttttgataattatctttttcatcattatgaaagcaatccttccacaccaagggaaacattgagaaaataccaagttttagaaaggcgaaatgaaaataaatctcctaacttcccatcaccc

SEQ ID NO: 963 - DNA, 2003 bp, Homo sapiens
aatccgctctcggtgccagtgccacggccgcagcccctacccgcctcgccccacgcccgctttgttccccgcacgccccgtggtcgcttccatcccccacggcgccgcccgtccggtcctcacgcgcttctccgggcccaggctccggggctccccacagcccggggcaaaggtcacggtcttcccttgcttccccctgggttcccagaagcaggtggagttgcgcagggctgggtcccgacgctgtcgtcaagccaactgttccactgttccttgtctgtcttctctaggggcggaccgcggaacccgaggccatgtcccatgaaaagagttttttggtgtctggggacaactatcctccccccaaccctggatatccgggggggccccagccacccatgcccccctatgctcagcctccctaccctggggccccttacccacagccccctttccagccctccccctacggtcagccagggtacccccatggccccagcccctacccccaagggggctacccacagggtccctacccccaagggggctacccacagggcccctacccacaagagggctacccacagggcccctacccccaagggggctacccccaggggccatatccccagagccccttcccccccaacccctatggacagccacaggtcttcccaggacaagaccctgactcaccccagcatggaaactaccaggaggagggtcccccatcctactatgacaaccaggacttccctgccaccaactgggatgacaagagcatccgacaggccttcatccgcaaggtgttcctagtgctgaccttgcagctgtcggtgaccctgtccacggtgtctgtgttcacttttgttgcggaggtgaagggctttgtccgggagaatgtctggacctactatgtctcctatgctgtcttcttcatctctctcatcgtcctcagctgttgtggggacttccggcgaaagcacccctggaaccttgttgcactgtcggtcctgaccgccagcctgtcgtacatggtggggatgatcgccagcttctacaacaccgaggcagtcatcatggccgtgggcatcaccacagccgtctgcttcaccgtcgtcatcttctccatgcagacccgctacgacttcacctcatgcatgggcgtgctcctggtgagcatggtggtgctcttcatcttcgccattctctgcatcttcatccggaaccgcatcctggagatcgtgtacgcctcactgggcgctctgctcttcacctgcttcctcgcagtggacacccagctgctgctggggaacaagcagctgtccctgagcccagaagagtatgtgtttgctgcgctgaacctgtacacagacatcatcaacatcttcctgtacatcctcaccatcattggccgcgccaaggagtagccgagctccagctcgctgtgcccgctcaggtggcacggctggcctggaccctgcccctggcacggcagtgccagctgtacttcccctctctcttgtccccaggcacagcctagggaaaaggatgcctctctccaaccctcctgtatgtacactgcagatacttccatttggacccgctgtggccacagcatggcccctttagtcctcccgcccccgccaaggggcaccaaggccacgtttccgtgccacctcctgtctactcattgttgcatgagccctgtctgccagcccaccccagggactgggggcagcaccaggtcccggggagagggattgagccaagaggtgagggtgcacgtcttccctcctgtcccagctccccagcctggcgtagagcacccctcccctcccccccacccccctggagtgctgccctctggggacatgcggagtgggggtcttatccctgtgctgagccctgagggcagagaggatggcatgtttcaggggagggggaagccttcctctcaatttgttgtcagtgaaattccaataaatgggatttgctctctg

SEQ ID NO: 964 - DNA, 2507 bp, Homo sapiens
aggctctccggctgagccgggttggggcccgggttgggccgcccggggactctggagcattgggatttgtagcgcgccctctgggtaggcggctgtagcggagaggcgtgcgggatcgggatgtcggggctgctcacggacccggagcagagagcgcaggagccgcggtaccccggcttcgtgctggggctggatgtgggcagttctgtgatccgctgccacgtctatgaccgggcggcgcgggtctgcggctccagcgtgcagaaggtagaaaatctttatcctcaaattggctgggtagaaattgatcctgatgttctttggattcaatttgttgccgtaataaaagaagcagtcaaagctgcaggaatacagatgaatcaaattgttggtcttggcatttcaacacagagagcaacttttattacgtggaacaagaaaacaggaaatcattttcacaactttataagttggcaagacttaagagctgttgaacttgtaaaatcttggaataattctcttcttatgaagatatttcacagttcttgccgagtgcttcactttttcactagaagtaaacgactttttacagccagtttgttcactttcacaacccagcagacttctttgagattggtctggattttacagaacttgactgaggtgcaaaaggcagttgaagaagaaaattgctgctttgggactattgatacctggttgttatataagctcacaaaaggttctgtatatgccacagatttttcaaatgctagtacaactggactttttgacccatataagatgtgttggagtgggatgattacctctctaatttcgataccactttctctcctacctcctgtgagggacacaagccacaattttggatcagtggatgaagagatatttggtgtgcctataccaatagttgccttggttgctgaccagcaatcagccatgtttggagagtgctgcttccagacaggtgatgtgaaattaaccatgggaactgggacatttttggatattaacactggaaatagccttcaacagactactggaggcttttatccattaattgggtggaagattgggcaagaagtcgtatgcttagctgaaagcaatgcaggagacattggtactgccataaaatgggctcagcagttagaccttttcacagatgctgctgagactgaaaaaatggccaaaagtttggaggattctgaaggagtttgttttgttccatcttttagtggattacaggctccattaaatgacccctgggcatgtgcctcttttatgggtttgaagccttctaccagtaaataccatcttgtacgagcaatattggagtcaatagctttcagaaacaaacagttatatgagatgatgaagaaagagattcatattcctgtaagaaaaatccgggcagatggaggagtttgtaagaatggttttgtcatgcagatgacttcagacctgattaatgagaatatagacagacctgccgacattgacatgtcatgcctgggtgcagcttctctagctggccttgctgttgggttttggactgacaaggaggaactaaagaaactgagacaaagtgaagtggttttcaagccacagaagaaatgtcaagaatatgaaatgagtctggaaaactgggccaaagcagtgaaacgctccatgaattggtataacaagacataacactaaatgaaatgatcaaaaccataggtagctggtttatgtgacgtgcagatgagatgaagctcagggataacccatatgacaatgactaagaggagaaaattttaaataagcttcataacttaagaagcattgcttttaaaaaaacaaaacggaacaaaaaactcttatttttttcccctaaaccatggtaaggcagcaatacctcaaaactttatatcttctattttgtagcaaattccaaaggacattagtcatttccaaccacattttgacagttatgggtcctcttcctttttatactgggtcagtggtacataggaacataatgatttaccatccaagctaatagttctgggtcaagtaccatgcacatattgttccaaaattatgtgaaacgtatttctttaattctttaagtgggctatttgaagtacatatagctaaaaagaaagaataactgagaaaatgtggaattttgaaacattaatattttatgtttaaagccataatttcctaatattatatccaaatatgagcttaatatgtccctctcagataagcttatgagatagttaatgctttcctttactggtcttaaagacactgccttaatttttccttgttcaaccaaaatctgagcattctttctatgttgaaaacactgaaaaactaattttagttaatgaactagaaagaatattgatttttaagaaacagaaaaatactacttattttccttctcaaataacgtttctttcaaaaacttctggctgaagtataacatgctggtagtt

SEQ ID NO: 965 - DNA, 2438 bp, Homo sapiens
ctcctttgtgcgatccgtcccgagtccacagtcgctcgcggtcttggttgcagggaccctaagtccgtagcctcgtctggcttcacgggccccgcagccccgactgccctggaccgtaccacgactcctcaaggcccccagggctgtggcttgggagccccgtccaatgcgcggcccctttgctcggctcgggacatctcgccccaaagaaactcgcctcgccggggcccctgggttacccgggactcggggctagggatagagggcgactacactgcgcaagagatcgcaatgaagtccgtagatctccaggctggagccgcagagcgaggtggcgaggtggagaactcggggctgggcctggacagcggccctggggtcgtctggagtcctcgcgccctcaacccggaaggcagcggactgacatctgcgccgaagtcgcgcgtaccccacggagggtcgggaccctggaaatttcgaacgccccagcagttcagggcagtcatcgcttttcccaagcccgggagtccggggccccgccaggtttctccgcgctgtgacctcgggcgcgcagagcggagggcgccaagctctctgctgggtgtcggaggacgcgccgaaaacagggacgtctctgcagtgcgtccgacaccagctctccagtcctgctgccgcccggggttgctgcagcccgggttatcccggccccccaagctgcccggctttcggcctcccctgctccccgcgctgtggggtggcggaggatggacccaggctgacgcgccgcgctgggctgggtacctggaaagagggcccgcctcccggactccgagtcgggcacctgtgcgaaagaggcgaaaattcaggcctggtgctcaaggctcagagatgaggagacctccccatccccccagattcctgccggcggtgttggcgctcacctcctgatggcctcgccctgggtattccccagcgttacgcgggcctgtggatctaattttaattcatttgtaaaacaaaaggaccaacccttcccgacttttggcggtggaggaggcttgtaggttgaggccagcggttcgatcgaggaaagagtttgggtttggggattaaagggcccatttgagtcagcgacttactggtggtgcagcccctcggcctcccagatcgtagttccaaattttatgtaaaacaactaatttatggaacaatttaacaaatggcagaaagaagtgagagtccctctgttgggacgttggcctctcgccttagaagtgaagccccttcagaagtggtgggcgaaccgaaggcatttcccaagcagtcaagagaaaagaaataccccaaaatggttctttgaggtcggcttttcggctggactctgcccccttttccttccccctttcccaaagatttctgattcttgtcaaaggaatgctagttgtgggggtcccaggtgccttttacgaagccgccctccccttccatccccgtcgttgcaggggcggttgcggggtcaacgggaagtactcggggtgggacacgcctcttcttgctgagtctcaggtgaacacagtctgttgcttccacccaaaagagcagccagtgccacctgccactcaacttagcgatttccagtgcccccctcaggggaaaccatgctgctgtccgtaggtgtgaccagctttttggtgactacctcttgaagaaagtgtctttccctcagcacatgtgtagcaaacaggacttggatcctctccttatggtgcaaacccatatcaccgcctatagacacccactttcctcccataacacccttccggagcttgccagagggtctgggatgactccacaccttcaggaattttgaaacggctgctgattaggacgcagtttttgagtccgtgcttgatgaggatgtacagaggctgcacagctctgccttgacccaaatcatcccagagagagtgcgaaggtgggagctgcagccggacccgcagggccaccggcatggcaggttctgcaagagcccgcctggccgtccctgctttctagcggctgatgtgaagtactggacaaaagcagctgctccttgtcaaggatttccattgtccaaggctgtgtacgtagaagacacctattttggtggaataacacaatgatttgacaggaagaactaattttagctgcagttaactgcactactgtgagaataatatcagagatgttgaattttaaagaatagcttgggtcatcttttgcaatgtaaaggaattttttcaaaaaagacggcagctccttccacattctcttgaattttaatagcctttctttctgtaaatactataactctgtaacactcgtgagtttcaggacctctaagaaaatcaaatgaaccttcctgtaatttcctttaattatactttacaaaaatcatt

SEQ ID NO: 966 - DNA, 1910 bp, Homo sapiens
atctctacctttctggcttcaggacaccagacatcagagacagagagaaaaattcaaagggccaacccgtctttcctttgggcaggtgctatctagacctgaagtagcgggaagagcagaaaggatggggcagccatctctgacttggatgctgatggtggtggtggcctcttggttcatcacaactgcagccactgacacctcagaagcaagatggtgctctgaatgtcacagcaatgccacctgcacggaggatgaggccgttacgacgtgcacctgtcaggagggcttcaccggcgatggcctgacctgcgtggacctgcgcggctggtaccgcttcgtgggccagggcggtgcgcgcatggccgagacctgcgtgccagtcctgcgctgcaacacggccgcccccatgtggctcaatggcacgcatccgtccagcgacgagggcatcgtgagccgcaaggcctgcgcgcactggagcggccactgctgcctgtgggatgcgtccgtccaggtgaaggcctgtgccggcggctactacgtctacaacctgacagcgccccccgagtgtcacctggcgtactgcacagaccccagctccgtggaggggacgtgtgaggagtgcagtatagacgaggactgcaaatcgaataatggcagatggcactgccagtgcaaacaggacttcaacatcactgatatctccctcctggagcacaggctggaatgtggggctaatgacatgaaggtgtcgctgggcaagtgccagctgaagagtctgggcttcgacaaggtcttcatgtacctgagtgacagccggtgctcgggcttcaatgacagagacaaccgggactgggtgtctgtagtgaccccagcccgggatggcccctgtgggacagtgttgacgaggaatgaaacccatgccacttacagcaacaccctctacctggcagatgagatcatcatccgtgacctcaacatcaaaatcaactttgcatgctcctaccccctggacatgaaagtcagcctgaagaccgccctacagccaatggtcagtgctctaaacatcagagtgggcgggaccggcatgttcaccgtgcggatggcgctcttccagaccccttcctacacgcagccctaccaaggctcctccgtgacactgtccactgaggcttttctctacgtgggcaccatgttggatgggggcgacctgtcccgatttgcactgctcatgaccaactgctatgccacacccagtagcaatgccacggaccccctgaagtacttcatcatccaggacagatgcccacacactagagactcaactatccaagtggtggagaatggggagtcctcccagggccgattttccgtccagatgttccggtttgctggaaactatgacctagtctacctgcactgtgaagtctatctctgtgacaccatgaatgaaaagtgcaagcctacctgctctgggaccagattccgaagtgggagtgtcatagatcaatcccgtgtcctgaacttgggtcccatcacacggaaaggtgtccaggccacagtctcaagggcttttagcagcttggggctcctgaaagtctggctgcctctgcttctctcggccaccttgaccctgacttttcagtgactgacagcggaaagccctgtgctccatggctgccatctcacctcctgctgggcagggggcatgatgcgggccagtgctccagccacagaaaagaaagttcatgctttgttcagcctgccttcttttctcccttttaatcctggctgtcgagaaacagcctgtgtctttaaatgctgctttttctcaaaatgggacttgtgacggtgtacctgaggcccccatctccttaaagagtgtggcaaaataatgatttttaaatctc

SEQ ID NO: 967 - DNA, 2558 bp, Homo sapiens
aattagcgtgggaggaagagacagtgaagcagccccttaaaaatggtctttcgggtggaaacactttatttgggaagcaaagtgcaagattcagcaatagaaaccactcagtgtccttggtgaatgatttgatcctggccatcagaacctttacttcagccagcaataaactcttagaaacagaagcttcgaggtatgtactcctgttctgcacgaacaagttttctggttgaacatgctgaacctcttaaaaaattcagaacaagttttctcagagtttacaaagggatttcaatcacatgaagagaggaaaacacactgagtcgtaacagtgacatcaaaatacttttgaagttgactgaaaatgtggttgcttttgtttgagaatggcaaattaaagaattggatattgggttcttatctcagaagaaacaaaggaggagaccctgaaaaactgaacatgaagaggaagaagtggagttatgcaactcttcataagaaaatctccatctgtttggagaagtactgcgtccttccggattatcttctacactatgccttattgttatctggctggttccaccaccggtcagaagaatgaaaattgcagatacctattctgtgtgtttctctccagaatggtggatgttagagaccctactaaggatttgtggactcactaacgtagtctctaaaaggttggacatccctacccaaggctcaaatggtaacaggtccatgccttacttgtgtcagttctcttattgaaagagcatctcctaaccatcctaccaataagggtcttactctgttgccctggctggagtgcagtggcccaatcatagctcactgcagccttgacttcccagcctcagttgatcctcctaccttaatctcccgagtagctgggactgcaggtttacttatactaagattttcttctgcctctgccaaccctgagacagcaagaccaattcctcctctcccctgtcctcctcctcgcctactccacatgaagacaacgaggatgaagaccttcatgatgatccatttccacttaatgaacaaacttcaggaaattattcaagaagagaggcatggtggtatgctggaaagtctgctgagcttgaaagtaggtaacccaggctcctgttcctgttctcattgatgagttccctgacttcaggtgagtcacagcttctctggactttcatgtccttttgcaaagcgagtctgatcatttctaggatcttttccagccctgagattgtatgagctgcaatagctaagagatatgggaaagtgggtcattggaaagttgttttcctaactccacaggcaacaatgtgcctcattcttagtcatcaaaggcaaatatgaagggatgggaagcactctcttcactgtccatttgcaagcagaatcactcttcacttgattgtccagtgtctgtatagtctctcacagagcccagcacatgtgggcattctgtaaatggccattgagaactgccaggtctgtggctgctacagagcacaatgatgatgataatggtgttgatgatcatgatgatgatgggctggtgtatcgaggcacagacccaaggaaggctaatgagaatgtttctagggaagcttcctgcatgtcactcttcttccttctacttcctctaggttcatcttccctgactaacagggagccagggctataataacgggaaggaagtcatcatgtgattctacctagaaacgcaggcatcaacttgaaatgttttctctttctcttgtaactctggaatatggctccttggattggaggtggcaaataccacgggttaaacaatgtcattctgagctcttttagtactgaataatgcaatatataccatattctaccctcttaaagaaggagtgtatcagctatgtgcctgatatggtttggctctatgtccccacccaaatctcatcttgtagcacccataattcccaggttttgtgggagggacccggtgggagatgattgaatcatgggggctggtctttcctgtgctggtcttctgatagtaaatgggtctcacaagatctgatggtttttgaaaacaggagtttctctgcatgagctctctctgcctgctgccatccacttaagatgtgacttgctcgtccatcgccttctgccatgattgtgaggcctccccagccacgtggaacttagctcaggatagcaaccagacctgagattcttttcaacttatacgctgttgatgaatgtggtttctggatgaaaaactgagaacagactgaccctctggccacagctactcgcgtcagggacgcatagttgcaggtgcatgctgtctggtttggtttgccaagtcaaaatagttgtgtttcccgctgtggtgagagtttccaacttcagacggggcaagagaaattctaaacagtttgccctttgcagatgtattgaaatagtactgaaatttactgattttccctcatgttttttttccgtgcttttatcactaccctgaaaataaacaaggagaaaaggcaagc

SEQ ID NO: 968 - DNA, 2327 bp, Homo sapiens
acccggccgcccttggcagcgcctaaggcggagcgcgcggctctgcagcctgcttgccccggagttggcacccacggaggatggggaccgcaccctcagcttcgcagggagccaccgtggaggccagggcggtgcagagacacgacgtgtgactcggagtgcgcctggggaggatggacgagggagcgggggaccgctaacggggctccctctgcgcgccccgtccgcagaggcgcacgtcgagggtcccgggcgggctccgtggacgttggcggtagcgccgagcgagtcacggaccatgaagagcgttcgtgccgcgcggcccaaggccgggatgggggttagccacatcctgccgcgctgagggggaggctaacgggcgcgggcggccgggcccagccggagcccaccgcgatggcgagggaggagtgcaaggcgctgctggacgggctcaacaagacgactgcgtgctaccaccacctggtgctgaccgtcggtggctcggcggactcgcagaacctgcggcaggagctgcaaaagacgcgccagaaggcgcaggagctggcggtgtccacctgcgcccggctgactgctgtgctgcgcgaccggggcctggccgccgacgagcgcgccgagttcgagcggctctgggtggccttctcgggctgcctggacctgctggaagcggacatgcgacgcgcgctggagctgggcgccgcgttcccgctgcacgcgccgcggcggccgctggtgcgcacaggtgtggctggcgcctcctccggcgtggcggcgcgcgcgctgagcacccgcagcctgcggctcgaggcggagggcgacttcgacgtcgcggacctgcgggagctggagcgcgaggtccttcaggtgggcgagatgatcgacaacatggagatgaaggtcaacgtgccccgctggaccgtgcaagcccggcaggcggcgggcgccgagctcctgtccacggtcagcgccggcccctcctcggtcgtgtccttgcaggagcgcggggggggttgcgaccccaggaaggccctggccgccatccttttcggcgccgtgctgctggcggctgtggccctagccgtgtgcgtggcgaagctgagctgacggacacccgacggccgcctgctgctgccgctccctcccctgagaaaagactcgggatgggtgtggggtctggcctgtgcaaggggagtggtcctaaaaccccgtgtgtgcatgggtacacgcgcgtttccagtgcacatctgcctgggcaggacacggtttcctcttgctggcccgggaggagttaactttgcgccggccgtcagggcattaccgctaacgtctgcaggagctttattccctattaatagaaaaccgtcacagtgaccctagatccctccgagttaatgagttaacacatgtgctgttggggcgtctttacagggagtccgagttcggtgcccacccctgccagcgtcgccccctttctgcgtgggacagtttgaaaaggtgggtggggtggagtgaagtttggagagggacgctgtttggttctatgtggttggtctgtttcccggacaagaaaaattgcaatcaaatgtcagcagcttttattaccttaatctttcagggcctaaatttaggagagtgtcccgagagcagttcatacaaagggctttctctaagacgcgctacagcccttcctagcagagtttatccattcgtccccaagagcagctagaagagatttgaggtcatgacctcccactgccgctcaggggctgaccctatttaggaaaccaaagagggtgggttgaacctactctcacggacttggatccagtgcgcacacttgcctgcggaaaagggctctccccagccacccggagatgggggtaagaggaagagcagaggcttggggtagggccacctggtgtttaaacaggcactttctccttctctggggcttatttttgttcagaactagaccagagtgtttgaacctcctttgcaggagggctgggaatcctctttagagcacttaatcctatttatcccctggaatgtgcgtgctggccagtaggagggctggctttggcagctccctgacccccgcgctgcccgcccctccggggtaatgtggcattactggcccacagaggttttgagccaatcagctctgagactgggttagaatgtaacagctttaacttgggatttaagaagcttttaaaaggtaataatcctctgaaagaaaaatgacgtaaccacagcgtgtactatgaaagctgttattttaataaagaacgctgggccatgaactc

SEQ ID NO: 969 - DNA, 2401 bp, Homo sapiens
atacttgtttctcctttcgatatgaaagcccctaccccgacccaggccccttcactcggcaccgaaggcaggcggaggtctgaaatacggttccaaagtcgccgtccttcgtatccgcagaagccagtgtgtgcacacagcctctgaggcgccagccgcccgagcccttactctgaagaattaaggagtgtttgtggggagggggtacagttctgggtctaggaaccgaaaaccaaaacattttgctctttaaaaatctagttagcgctcagagagggcaggaaagatgctgctgggggtggtggttgggcggggggagcaatctgctgcctttcccaacggcgagaatgtttgtgagtgggtgttggagagggggtgccgcctagaattgcgccttggggctgggaggatcttcgtgggctgttgcggagaggcatttgaaccccagaagccaggattctaaagggtttccacttctttctctgtgtgacgctccccccccatcgtctgaccccgcagctcgatgccaagaagagcccgctggcgctgttggcgcaaacatgttcgcagatcgggaagcccgacccctcgccctcctccaaactctcctcggttgcctccaacgggggcggcgcgggcggtgccggcggcggtgctgcgggcgacaaggacaccaaatcgggccccctgaagctgagcgacatcggcgtggaggacaagtcgagtttcaagccgtactccaaacccggctcggataagaaggagccgggaggcggcggtggaggcggtggcggtggcgggggcggcggcgggggtgtttcgtcggagaagtcgggattccgggtaccgagcgccacctgccagccattcacgcccaggacaggcagcccgagctccagcgcctcggcctgctcgccgggaggtatgctgtcctcggccgggggtgccccggagggcaaggacgacaagaaagacaccgacgtgggcggcggtggcaagggcaccgggggcgcctcggccgaagggggacccacggggctggcacacggccggattagctgcggcggcgggattaatgtggatgtgaaccagcatccggatgggggcccgggaggcaaggctctgggctcggactgcggcggttcatcgggctccagctccggctccggccccagcgcgcccacctcctcctcagtgttgggctctgggctggtggctcccgtgtcaccctacaagccgggccagacagtgttccctctgcctcccgcgggtatgacctacccaggcagcctggccggggcctacgccggctacccgccccagttcctgccacacggcgtggcacttgaccccaccaagccgggcagcctggtgggggcgcagctggcggcggccgcggccgggtctctgggctgcagtaagccggccggctccagccctttggccggagcgtctccgccgtccgtgatgacagccagtttgtgccgggacccttactgcctcagctaccactgcgctagccacctggcaggggcggcggccgccagcgcttcttgcgcacatgatccggctgctgcggctgcggcgctgaagtccggatacccgctggtgtaccccacgcacccgctgcacggtgtgcactcctcgctaacggccgccgcggctgctggcgccacaccgccctccctggccggccaccccctctacccctacggctttatgctccctaacgacccactcccccacatctgcaactgggtgtcggccaacgggccgtgcgacaagcgcttcgccacgtccgaagagctgctgagccacttgcggacccatacggcatttcccgggacagacaaactgctgtcgggctaccccagctcgtcgtctctggccagcgctgccgcggccgccatggcttgccacatgcacatccccacctcgggcgcaccgggcagccctgggacgctggcgctgcgcagcccccaccacgcgctgggactcagcagccgctaccacccctactccaagagcccgcttcccacgcctggcgcccccgtgccggtgcccgccgccaccggaccgtactactccccctacgccctctacggacagagactgaccaccgcctcggcgctggggtatcagtgagggcggccgggagggcgagcgagggagaggagggagagggggaggggaggagtccagggagaggcgggatcacggcccaggctgctgacacccgcgcgtggggaggactcgggccacgaaaggaaagaaatgtataccgtatctatctacccgacagcagcgaccgagacccggtgggacactccccttctccccactttcacctccccacccaaactttataaaagttgaaaaaatatcatttgactttttatag

SEQ ID NO: 970 - DNA, 2567 bp, Homo sapiens
ctataagccagtgcaatttgagggctctttgggaaagcttaccgtttctagtgtgaataatccccgaaaaatgattgatgctgttgtgacatctcggagtgaggatgatgagacaaaagaaaaacaagttcgagacaagaggagaaaaacccttgttataattgagaaaacctacagcttactccttgatgtggaggactatgaaagacgttatctcctaagtctggaagaagagcgacctgccctaatggatgacagaaagcacaaaatttgtagcatgtatgacaacttaagggggaaattgcctggacaagagaggcctagtgatgaccactttgtacagatcatgtgtatccgaaaagggaagagaatggttgcccgtattcttcctttcctctccacagagcaagcagctgacattctcatgacaacagccaggaacctccctttccttatcaagaaggatgcacaagatgaggtgctgccatgcttactgagtcccttctctctccttctctatcatcttccatcagtgagtatcaccagccttttgcgacagctaatgaacctacctcaaagtgcagctacaccagcactctccaatcctcacctcactgctgtgctccagaacaagtttggcctgtcactgctcctcatcctcctgagccgtggtgaagacctacagagttcagaccctgctacagaatcaacacaaaataatcagtggacggaggtgatgttcatggcaacacgagaacttctgcggattccccaagcagccctggccaagccaatctctatacctacaaacctagtgtccctcttttctcgctatgttgaccggcagaaactgaacttgctggagacaaaactgcagctagttcaggggatacgataaaagatctccaaatgtgtcctgtacctccttttggctgccacctgcactgctgccatcaccaatggagtgtttttaatgaggggaggaaggtagctttttccccaaagcaaagtcttgtgggatcgattcctgtttacaggggttgtctctctaaatgtcagatatttccccactgctctatgaaatttggctgggtgatacttctgctggtttctttaccttctgtgttacagttctgcatgtcctacttttactcagttctgttttgcattttctttgccctagagacacaagtgtaatctctccctttatccctccactactccacctcagagtagattgtagcctgccaaaggattccttccctcatcctattgaagttgttttttcattgccccatattaatatgactatagaagagccaattaagtagaaatcaagatatacacacacacatagatacacacacacacaccccatacatgtatttatgtggtcttcagagggtccttaaagaatgaatttcagattgaaaaatatttagttgtctcattacctcttctaaacacaaaccagctgatgtattttaatctgtttctgttctatcttgtaattaatttggtgggttctacttgttttaacataaataaagagtatgcagcacgtttaataaaatcagaactcttaattggcttatgcccaggtctaggctgagaagtcctttttcttcttcccacctttatttccttagtttctgtccaccttaatcgaaacaacacatggttatgtctttttcctgctacaactacagggtacttgagcctttcccctcaagtgcattcgaagtcacccaggatgatcctcactagtagcctgctttggcagtgtggctttttgcacacttgccctgtcttcctgagactacttcagtaagccatgcttccttcttccccacttttatttggtgtcatgaatagaaacttccaaatgtaaccatggaagctaagtttggcctgctttgctttttagtctccacaccatgggcagaactgctgtctttactacttcatctcacccaagtcccgttcccaggcagccaggggcctgggtttgaataattgcagggccagcctgccatgatctttctcacttactcctctcccattcagcaatcaaccagactaaggagttttgatccctagtgattacagccctgaagaaaattaaatctgaattaattttacatggccttcgtgatctttctgctgttcttactttttcgaatgtagttggggggtgggagggacaggttatggtatttaaagagaataaacattttgcacatacatgtattgtacaacagtaagatcctctgttaaaaccagctgtcctgttctccatctccatttcttcccatgctgtaaccccaggctccaccagctgttccccagtgatgttacctagcttccctctaccgttgtctactgaccatttccactacatgcctttcctaccttcccttcacaaccaatcaagtgaatacttgattattatctcttccttactgtgctttatcttttttgtttggattggttctaattaatgaaaataaaagtttctaaatttacatttttatagggtattgtaaataaaaacaaattgtatactt

SEQ ID NO: 971 - DNA, 3475 bp, Homo sapiens
caattttttccaacgggcctcagagggagctggtctatcccggccctgtcattactccactgggttctgatctgctttgccacggcatggaggcagaagatctttcaaaggctgaagacagaaatgaagacccaggttccaaaaatgaagggcagcttgctgctgtgcagcctgatgtcccacatggagggcagtcctccagccccacagctctctgggacatgctggaaaggaagtttctggaataccagcagttgactcacaagagccccattgagcgtcagaagagcctgttgagtcttctccccctattcctaaaggcctgggaacactccgtggggatcatctgctttcccagtctccaaaggctggctgaagacgtgtctgaccagcttgcccagcaactccagaaggcccttgtggggaagcctgcggagcaagctcggttggcagctggacagttgctgtggtggaagggggacgtggatcaggatggctacttgctcctgaagtcagtgtacgtgctcacggggacagactcggagacgctgggcagggttgctgagtctgggcttccagccctgctcctacagtgcctttacctcttctttgtctttcctctggacaaagatgagcttcttgagagtgatcttcaagttcaaaagatgttcgtgcagatgttgctcaatatttgcagtgactctcagggcctggagggactcctcccaggaagtgagctgcagtctctgctgattgccacgacctgccttcgggagcacagctgctgcttctggaaggaacccaccttctgcgtgctaagggcaatctccaaggcccagaacctcagcatcatccagtacctgcaggccacagactgtgtcaggctctccctccagaacctctccaggctcacggacactctccctgcccctgaagtgagcgaggctgtaagcctgatcttgggattcgtgaaggactcctaccccgtctcctcggctctgttcctggagtttgagaattcagagggctatcctctgctgctcaaagtgttacttcggtatgatgggctgacccagagcgaagtggacccgcatctggaggagctccttgggctggtggtgtggctgacaacctgtgggaggtcagagctgaaggtgtttgacagcatcacttaccctcagcttgaaggcttcaagttccatcatgaggcatctggggtgactgttaagaatcttcaggccttccaggtcctacagaatgttttccacaaagccagtgactctgtcctctgcatacaagtcttgtcagtcatcaggaccatgtgggcctggaatgctcgaaacttcttcctgctggagtggaccctgcagcccatctcgcagtttgtagagatcatgcccctgaagccggccccagtgcaggaacacttcttccagcttctagaggccctggtgttcgagctgcactacgtgcctcatgagatcctgcgaaaggtacagcatctgatcaaggagagccctgggccatcctgcaccctcatggccctgcagagcatcctcagcatcgctggtggggaccccctcttcaccgacatcttccgggactcagggctcctgggcctgctactggcacagcttcggaagcaagccaagatcatgaggaagtcaggaaacaaagtgtccactcctggtgttcaggatccagaaagagaactcacctgtgtgatgctgaggattgtagtcacacttctgaaaggctcggtgaggaatgcagttgtcctgaaggaccacggcatggtgcccttcatcaagatcttcctggatgacgagtgctaccgggaggcctcgctcagcatcttggagcagctctcagccatcaacgccgaggagtacatgagcatcattgtgggtgctctatgctcatccactcaaggggagctgcagctgaaactggatctcctgaagtctctgctccggatcctggtgacccccaagggtcgtgctgccttcagagtctccagcgggttcaacgggctgctgtctctgctctctgacctggaaggctccctccaggagcccccgctgcaggcatggggagcagtatcccccagacagaccctggagctggttttgtacactctctgtgctgtgtccgcagcgctgcactgggaccctgtcaatggctacttcttcaggaggaatgggctctttgagaagctggccgaggacctctgcctgctgggctgttttggagccctggaggaagagggcaacctgctgcgctcttgggtggacacaaaggccaggccatttgcagatttgctgggcactgccttttcctccagcggctcactcccaccccggatacagagctgcctccagatccttggctttctggacagcatggccagcggcaccctccacttgcgtggggacctgaaggagtccctgaggaccaagcaggggccggttgtggatgttcagaagggagaaactggcagtgacccccaacgcaacttcaagcagtggccagacctggaggagaggatggatgagggagatgctgcaatcatgcatcccggggtcgtgtgcatcatggtgaggctgctgcctcggttgtaccatgaagatcacccacagctttccgaggagatccagtgctccctggccagtcatatccagtccctggtgaagtcggagaagaaccgccaggtcatgtgcgaggcaggcttgcttgggaccctcatggcctcctgccacagggccctggtcaccagtggcagccccctccactcacgcctcatcaggatctttgagaagctcgcttcccaggccattgaaccggatgtgctaagacagtttctaggtcttggaattccctcatctctgtcggccacaacaaaaatccttgattcatctcacacacacagaggcaaccctgggtgctcagggtcacagactgcacagggcttggctgaggggccctggccagctgccccagatgctgggctgcaccctggagtcacacaggccccgcagcccttgggggaatcccaggattcaactactgctcttcagacggcgctgagcctcatctccatgaccttccctgcctgctggaagccaaacatctggaaagacaatctggctcagaaaccagttgctggagatgctgctcagtgtaatatcttccccccagcttcatctgtcctctgagtaagtagctccaggaagagcaatttggcaggaggttacctcatacagggtgtggcattaaaccttttcttaatgaaaagtttagcatctctgagtctgttttctgcaatgtatttcctgcactagtcagaaagaaaattatattctctctacccaatgaaccagaccttgccctaagatattctgatgcaaatgttaagtggacatgagtaactagaaacagatttggtataattacaataaactccttttgtcaccat

SEQ ID NO: 972 - DNA, 2536 bp, Homo sapiens
tgtaatataaaggaaaattcaaagaatgtggttaatgttaaaacatatatttcaatatgtaaaagtccaggcatgactacaccagaagacataatgaagtgatcagatatacctatacatagaaagtgacaactgcaaatggagaggatacaggtgtgctatattaataactcaaatagcatggccttcagcaatatcgttctctaaaatagtaggagacacttggtaaagttccaaaaagaacaaaatacagtcttccctcagttactctgcacttacatcccaagagtgtataaaaaccatgcgaaaatactttgatatatgtgtgaaacagagtttggttccatgctcaagtgattttaagcacatttcacttacagaaatggctaatggcactttgggaagtctttggggtgtgggacggcgttttcattgtgcaagaccgaggcattgtgggacatctaacattcctggctcccagccattccatgccagaggcatctccctatcattgtcacaaccaaaagtggctccaggattccacagtgtccccgagggagcacttgcaacctcactgagaaacactaggctggatgttggcctcacaactcatggacggtgacagggaagttggcgatgaggcagggggcagatttggatgtccagtccagaaaaggagttggttgcactgcttttttagtcaaggagagtcttcactttcttaaatatttcaaacctggcttttccaacctggtaacagtttcaagttctgaccccaggtggaagataaaatgaagaaaacacaatattttgtaggaaaaaaaaatgcaactcctttttttgtttatttatgttaagggccaacagatgtgctttaattccctgcccttcttggtgggtcactgataggaatgcactctgtctcaggaggaggaacaatccagttctaacaggaatttttgaaatagttctgagatttaattcttgttttcctttaaacttacaggtatgatcttatctactttttcttcagttttgtaaaggatgcaataacgtctgattcctcttggtatttgcattgtgcacaatcgaatgttttgagcagatgtgtatgattatttagtattagtgctctgcaggttgcttctgcctgggagtcttaaaacaaacaaatcaaaagggcttgatccacttagagtactttccagaggattttaagtcttggatttttatttaacaatgacgatacccacaccctcttctttcacaattgtgggtgcattgtatctaatttgtaaatagtcatttggctcaaagatactgggcacatttcaaatgcacgctaatttatgacattccaagaagataaatctgtttgcagacttattccaagactaagtttattcatttgccaatcagatgcatactattcacagcacagcaggttaggcattgtggggaaatcagaaatactccggaccctttatgccctcaaggagcctgctgtccagcagggatgataaaaccgcatgtacatgttatcataagtaagtggtgaacctccagaaaagtaagatggagtacctatggagtctctaaggatgaaatggtattttccactggaggaggtgaaatttgaggtggaatttttaacttgacaaccttaaaggttcattaacatttagatgggtaaaatgtgttaaattttgtggaatggctttctgagctaaaataaattcaagtaagttttttttttggtgtttttaagtaataggaaatctgacttcccatcacttagtagtatgcatttattgtctgagtgtaattaagtgacttggaataattggtaataattttgttatgaagaaatctcattcaacattgctaccttccttaaaaaaaaaatcctctaatttaaaagctggatcttttttcgaagctttgcttttttccattgaagaagtctttttcacaactccagatcttgggataccactgtgatattttaaaactctggaatgtacctttaattggattcatggtaaagtgccatcagatagaaggcagacccatcacgatcattatgtaaagaattcagttgctaacgtaggaaagggttctcattaccaggtgggtcccacgtattgaacttgaggacaacacagaaactgagccagagccactcaggaccctgtgtggtttctgtgccctccctgttagaccacttgtgtcccaggacttgaatctaactgcctcctgctccctggtgctggttcagactcactgtccatctcccagtgcccttggcttctgcctgtaccacctgcctgtgggctggagatttgactcaaagcaagttagtccaggtgaaatcttggctgaagtgtcatgcttgtcaaaacttactctgtgttggaaatgttttctgtcgggtttggctggcagttactgagtatatgtataaatgtaaaaatttatcatttttatcaaggcatactcttaagattcatgcatttcatgtatattgtaccccaat

SEQ ID NO: 973 - DNA, 2035 bp, Homo sapiens
attttgcctgaagcttgctggggcgtaaatccctctcgccttgtttctcagagagcatttcaggccggttttgcagtcgctgctgcagctatggggtccctagaaatggtgccaatgggcgcgggtccccctagccccggcggggatccggatgggtacgatggcggaaacaactcccaatatccatctgcttctggctcttctgggaacacccccaccccaccgaacgatgaggaacgtgaatctaatgaagagcccccaccgccttatgaggacccatattggggcaatggcgaccgtcactcggactatcaaccactaggaacccaagatcaaagtctgtacttgggattgcaacacgacgggaatgacgggctccctccccctccctactctccacgggatgactcatctcaacacatatacgaagaagcgggcagaggaagtatgaatccagtatgcctgcctgtaattgttgcgccctacctcttttggctggcggctattgccgcctcgtgtttcacggcctcagttagtaccgttgtgaccgccaccggcttggccctctcacttctactcttggcagcagtggccagctcatatgccgctgcacaaaggaaactgctgacaccggtgacagtgcttactgcggttgtcactttctttgcaatttgcctaacatggaggattgaggacccaccttttaattctcttctgtttgcattgctggccgcagctggcggactacaaggcatttacgttctggtgatgcttgtgctcctgatactagcgtacagaaggagatggcgccgtttgactgtttgtggcggcatcatgtttttggcatgtgtacttgtcctcatcgtcgacgctgttttgcagctgagtcccctccttggagctgtaactgtggtttccatgacgctgctgctactggctttcgtcctctggctctcttcgccagggggcctaggtactcttggtgcagcccttttaacattggcagcagctctggcactgctagcgtcactgattttgggcacacttaacttgactacaatgttccttctcatgctcctatggacacttgtggttctcctgatttgctcttcgtgctcttcatgtccactgagcaagatccttctggcacgactgttcctatatgctctcgcactcttgttgctagcctccgcgctaatcgctggtggcagtattttgcaaacaaacttcaagagtttaagcagcactgaatttatacccaatttgttctgcatgttattactgattgtcgctggcatactcttcattcttgctatcctgaccgaatggggcagtggaaatagaacatacggtccagtttttatgtgcctcggtggcctgctcaccatggtagccggcgctgtgtggctgacggtgatgtctaacacgcttttgtctgcctggattcttacagcaggattcctgattttcctcattggctttgccctctttggggtcattagatgctgccgctactgctgctactactgccttacactggaaagtgaggagcgcccaccgaccccatatcgcaacactgtataaagaatgcccaccagatcgcctgccacttccacagcaatggcacggatgcctggcgctttgctatgaattatccaagaaaccccacggagcagggcaacattgcagggctctgttcacgcgatggtcgtcatctggctctcctgtgtgacccctcactttgtacagacttttggcaatgggagcacattccccccgcctttgggcaccccacggggtgctccccctggacacttatgtttcaagcagctcacctatggtcactcaggcacggtcgcccctccgagtgaccagtcaccttccagactatgcatacactgaatttagcctgatattgtccccctagccccgggcccagccctcctcagaaaactctgcatggagaagctggacgtgaacctcccccccagacctgtgtgctgtattcacaaacactacaataaacccaatgtgc

SEQ ID NO: 974 - DNA, 2267 bp, Homo sapiens
agaagtctgtgcccttacccatcacagcctcatccttatctcctccattccctaggggacttaacaggtgttgaaattattacagagaaagctgactcactcaccaggaatctgatcctgctgtgggctggcttgggtggagatgttcctcccgcccccgcacccatcctcctgtttgaactcaggctgctgcctgctgggcctgcctgcccttggagccctgctgagctcagcctgaggcctggctcctccaggctgggggaaaaccaggcttgctgtgctcggcagcagagattcttctggagtgagcatccagcacgtgtatggtgcccagcaccccccctttgatccactgttacatggcactttgttcaggtccacggccaagatgccgaccacaccagtgaaggccaagagggtcagcaccttccaggagtttgagagcaataccagcgatgcctgggacgctggggaggacgacgatgagctcctggccatggcggcggagagcctgaactccgaggtggtcatggagacggccaaccgtgtgctgcgtaaccacagccagcggcaggggcggcccacgctgcaggaggggccagggcttcagcagaagcccaggcccgaggcagagccgccctcaccccccagcggcgacctccggctggtgaagtcggtcagtgagagccacacgtcctgtcctgcagaaagtgccagcgatgccgcccctctgcagaggtcccagtctctcccacactcggccaccgtcacgctgggtggcacatctgaccccagcactctcagcagctcagcgctgagcgaaagagaggcctcccggctcgacaagttcaagcagctgcttgccggccccaacacggaccttgaggaattacggaggttgagctggtccggaatccctaagccagtgcgtccaatgacgtggaagctcctctcaggttaccttcccgccaatgtagaccggagaccagccactctccagagaaaacaaaaagaatattttgcatttattgagcactattacgattctaggaacgacgaagttcaccaggacacatacaggcagatccacatagacatccctcgcatgagccctgaagcgttgatcctgcagcccaaggtgacggagatttttgaaaggatcttgttcatatgggcgatccgccacccagccagtggatacgttcagggtataaatgatctcgtcactcctttctttgtggtcttcatttgtgaatacatagaggcagaggaggtggacacggtggacgtctccggcgtgcccgcagaggtgctgtgcaacatcgaggccgacacctactggtgcatgagcaagctgctggatggcattcaggacaactacacctttgcccaacctgggattcaaatgaaagtgaaaatgttagaagaactcgtgagccggattgatgagcaagtgcaccggcacctggaccaacacgaagtgagatacctgcagtttgccttccgctggatgaacaacctgctgatgagggaggtgcccctgcgttgtaccatccgcctgtgggacacctaccagtctgaaccggacggcttttctcatttccacttgtacgtgtgcgctgcttttctcgtgagatggaggaaggaaatactagaagaaaaagattttcaagagctgctgctcttcctccagaacctgcccacagcccactgggatgatgaggacatcagcctgttgctggccgaggcctaccgcctcaagtttgcttttgccgacgcccccaatcactacaagaaatgagcccaggcccacccgcagctggcctcactgtcccgggtggcgcgccccacctgcctggctggtggtaggcccctgtgagctggtcccgggctgctaaaaggccttgtgaggtggccccaccctccaggggagctggtgaagatgggccacagacctggtctagggctgacaaagacagggacagcctttgttttctgagataccaaagagagccaggggagggccccgggttcggcggccagaggcaggtcaggggtcccctctccctctccctgcaatgtccttgccaaatgactgcctcctgctgcccctagtccggggcagcctaggaggccgaccctctttggagtcctgctgtctgggtgccagggccggaacgaggtagtggccatctcatacctactctgaaatgcaaaacttctattctgttgagtgaaagaataaaatgtagacaaaatctagaccg

SEQ ID NO: 975 - DNA, 2138 bp, Homo sapiens
attttgacaggtatgtggtgcactacacgtctgccaacggagagaccagggaggttccagtggggaaggagcagagcagcactgtcctgacgggcctgaggccgggcatggagtacacggtgcacgtgtgggcccagaaggggaaccaggagagcaagaaggctgacaccaaggcccagacagaaattgacggccccaaaaacctagtgactgactgggtgacggagaatatggccactgtctcctgggacccggttcaggccaccattgacaagtacatggtgcgctacacctctgctgacggagagaccagggaggttctggtggggaaggagcacagcagcactgtcctgacgggcctgagaccaggcatggagtacatggtgcacgtgtgggcccagaagggggcccaggagagcaagaaggctgacaccaaggcccagacagaactcgaccctcccagaaaccttcgtccatctgctgtaacgcagtctggtggcatattgacctggacgcccccctctgctcagatccacggctacattctgacttaccagttcccagatggcacagttaaggagatgcagctgggacgggaagaccagaggtttgcgttgcaaggccttgagcaaggcgccacctaccctgtctcccttgttgcctttaagggtggtcgccggagcagaaatgtatccaccaccctctccacagttggtgcccgtttcccacacccttcggactgcagtcaggttcagcagaacagcaatgccgccagtggtctgtacaccatctacctgcatggcgatgccagccggcccctgcaggtgtactgtgacatggaaacggacggaggtggctggattgtcttccagaggcggaacactgggcagctggatttcttcaagcgatggaggagctatgtggaaggctttggggaccccatgaaggagttctggcttggacttgacaagctacacaacctcaccaccggcactccagcgcggtatgaggtgagagtggatttacagactgccaatgaatctgcctatgctatatatgatttcttccaagtggcctccagcaaggagcggtataagctgacagttgggaaatacagaggcacggcaggggatgctcttacttaccacaatggatggaagtttacaacttttgacagagacaacgatatcgcactcagcaactgtgccctgacacatcatggtggctggtggtataagaactgccacttggccaaccctaatggcagatatggggagaccaagcacagtgagggggtgaactgggagccttggaaaggacatgaattctccattccttacgtggagttgaaaatccgccctcatggctacagcagggagcctgtcctgggcagaaagaagcggacgctgagaggaaggctgcgaacgttctgatggcccgtgtgagcagtcctcgcaggagacaccaccagctgtgggagcttggggcggggtgggtagtggtcactgcggtctgggagtgctcagatagcccgcagaacaaatcatgtcaccaagcttcaagccatggaggttccttccctctcacctgcatttttgcccgtctttatgagggtcttgaaaatcaaaatagtagttgcacagtatgtgtaggaaagacagtactggaacggcaaggtttctcagcttatcttcagcaacatatatactggattagggcaagagaaggaatcacccagcacttcaccagttggaaatctctggaaatttacatctatgtatttaaagttctgctaatgcaaatcttttctctggaaagaagcacagaggaggagttctgatgacccaggggttagggctgagacaaccggacgtttgtcacctcctttcccattgggtttttaggaaaacagtgtgaacctcccccttttaatttctggtgttatgaggaagaataaaggggataaaaggggctaagatggactcatgtttagctaagttctgacttgtatccagcatgctggagaccaaagctgccgccttactgctatttttaagtgccctcttttcagtcatttgcataattgcgtccatagagctgcatatgttgtgaataaattctcactcatttcaactttg

SEQ ID NO: 976 - DNA, 2469 bp, Homo sapiens
tcagaatcacccagagggctggggaaaacacagattccagagtttctgcttcaagtaggtccagtgggcccaagaatttgtacttccagcaagttcccaggtgctgttgctgcttctccaaggagtgcactgagaacttctgctgtaggatgatgtggttgggctgcttccatgttggaagtgcccctgggtgtctctgtctcccctagggctggtcacatccccaaggaagacttctcactgcctgcctggagggacaggcgaacttcaccctgtgagctcatcctctcaccaccattagatgtgtggtgcgtcatgtcctgcaaacctgtgctgtgcctcaccagagggctgcagctgaggggctggacaccgagttgcctctttgcccagtgttcaaccagccctcttcacctgtgcctcaccctgtgctgcctattcccgacctttgggggattctggggtccagggctggctgttctaggcttttctcactgttggcttaggttggctagctcagttgtccatttgcatgtcagcttctgaaactttttgctgttgtctctcacattcttccgtggatttgtgtctttaaaaaacaaaaagatggaaatgtatgcccttagcctgcagtcaccccactttcttggaagacatcattctccttctctgcctctgccagagcatggggctaggtttttacttgatcagcatcataaggatttgttgtatacttaaaatgcatttgtgtaatcattggttccgacacgtttttgctttgaggcataagggacttgattgtatattttataaatatttgccagataagatagccaatggcttgcagtcatcttaaagataaaaattgatgttatagccttgaattaagttgaagtactgtatttgctctgagtggcatttaacctaataattctgaacttaaactttgaaatggaaataatctgagcctagcatcttgcttgtttgacataagctttcttgtggaacttcagtagttggcccttgccacacgtgctttcatctcactaataacgggttggaggttgtttgagcaaaacagtctggattttgctgcttgtattgggtgttcccaaggccaccaccaggctcagtgatgtgccaggaggactcacatgactcagcttagagtggtactttcagctgtgacttactacagtgaaaaggcacaaagcaaaattagcaaagcgaagaggcacatggggttaaatgtgggggaaaccaggctccagcttccaaaagtcacttttagtgacatcacataggagactcttaatatcccagagacaagttaagagcccgtgggaagtgttgtctaccaggggtgctcattagagactcagcgcctagggttctgttgggggccggtcacgcaggcatcctctgcctagcacacacaaagttccagactccagaaggaaagcaggtgttcagcagaaaccacagtgtttgcacaccatagaggcacagtgagttactcttaccagttaaggtggtgggaaccctcccaaaatccaagttcacagaccccaaccaagggccaacctgacaggcagcctcgagaggacagcagccaagcctgctctgttaggttgtttctgcacagtgctcaaataacatttcagattcactcccgggagctggggtggacaccaggcagagaccctccagtgagagagatgcatctgatgttacgggggacttcatatgtctcccctgacaaactgaatatagatttcactgtaagtatacctcaggaatacggaacactccaccccacctctgccctatctccccttttcccagcccatctggaactggtctttttcttcaaagtttctatcccaggaggctgcctcctcatcactttgcaaatgctttgggtagatcaggggcagggtgtgggcagaataagggctgtgggtttagaaattaatctcctatccaactagatgcagaatgagttcccagtttccacagtatggtaggacgtgcattggagaagttcttctcttgaaatgagaggatcgatatgtaagtagattccaggtgatactatgctaattgtaaacagttgttgttttttacagttgctccgtaaagactgggtgagtatcctgtaggccagatgcctggcctacaatgctgtgtgccttggtaactcgaaagcatatgctgtgccttcctccagagaccactgtgttccctcccagggtggtgtgagcatcctctccaggagtttttattagcagttttcttatgagggagggtcagcatcaggagcttggcattttctgtgaattgttcatatttgttgcccatttgcttttgggatgttgacctcttttagattgatttgtaccttttttataagttagccctttgggtaagagttccaagtgtttcttctggtttgtcagtttctccacc

SEQ ID NO: 977 - DNA, 2319 bp, Homo sapiens
tactaaaattggaacgatacagagaagattagcatggcccctgcgcaaggatgacacgcaaattcgtgaagcgttccatatttttggcatgggcgcacgagaagggtgtgtctgagacaggatgtttatcccaaatgccaggagtggacgaggcggacgagtggcagtgaggctgagccagcaacctccttggcacctggggacagtcgcttcctcagtttctgcgtaccgactgcctcacctgacacgcggcctgggcgcgagagaagccaaccaggtgcctgagttgactgactccttccgccctccagcttcctccctccgccctccaacctcctccctccaccctccaacctcctccctccgccctccaacctcctccctctgccctgcaacctcctcccctctgccctccaacctcctccctccgccctccatctcctccctctgccctgcatcctcctcccctccgccctccaacctcctccctccgccctccaacctcctccctccgccctccaacctcctccctccgccctctgccctcctccctctgccctccagcgttctccctcctccctccaccctgtttcctccctccacctcttctctcctccctccaccctcttccttctaccctcttccctctgccctcttcttctgccctcctccctccaccctctttcctccctcctccctccaccctctgccctcctccctctaccccctgccctcctccctccgccttatctggaatcggggtcttggtcctgggctggaggcagaccctggcccgggcgaggttaaaggtactgcaggagggcggcatcatgatgtcctgaagcttgttgcgcccggtgctgtcggccggctgaaggcagaaacagtcacagcacctgcagctatggaaggcgacgactgaaaatctaataggcaccttgatgtcaagtttccaagaccaaaggcaagaacagtcagatcaaacttcggaagagtcagagaaagtgagcatgacctagaggagggagacggtccttccgctgtctcctgcagagcgtctgtcgcacgtatgaggtgaaatccgcactgtcccatgaagactgtgaggggagttgccacccgcacacggcccaggagcgccagcagcttggggaccaccacaggcctcagggtctcttcagtccgacgggtccagctgtcgataaaacctcccggggaaggagtaaaggacaaccaagaacctgaactgcaaaagtatgaaaaacatttcatttccctcgagttctccacactttaggtctgcagcgccttgggggtgactgatggccctccgtgagacgcggtggccatgtgcttctacaagtgaaaaggagcaagtgtggttagagcctggagtatggacgtcccggggaccgctggcccatggcctggcttggggccttacaggggagcgagctgagtgaatgcaggggagggcccgtctttctacagtgtgtatcttgtttttgagacagactcactctgtcgtccaggctggagtgcagtggcgcgatctctgctcactgcaacctctgcctcccgggttcaagcgattctcctgcctcagcctcctcagtagctgggattacaggcacctgccaccacgcctggctaatttttgtattttttttttagtagagatggggtttcactatgttggtcaggctggcctcgagctcctgacctcaggtgatccacctgccttggcctcccaaagtgctgggattacaggcatgagccaccgcgcccggccctgccctgcttttctacatcaccactgtcttgtcagttagctcggctcaggcattgcatgcctgatctgtatctttgggaatcctgtgaggtaatggttctagatccaaaagaatggataaagagactgtttcagttcccgaaattatccaggcacattctgtgcgctactgaacttcagaaagcaccagtccatccagtgtgcagaggctggtaccgttttgtgtcatgcagttactggaatgtacaaaagcagctgtgatctttgtgagagctgcacagagcaggagtctgagagctgcacagagcaggagtctttatttggttcacttctggtctgcagcaaccacttgctactaaaagatggaaaagatgtacaaaaatgtcacagccctttagaaagcgacattatcagaaatgtatgaccttcagtcctccctccctctcctatgcccccaccagaccaggcggcgagaaggaacagggagtgaacatgtaacggaaaacaataaaactgaatttaactgg

SEQ ID NO: 978 - DNA, 2380 bp, Homo sapiens
gaaaaaaccacaagtgtaataagccatacttatgaagaaatagaaacagaaagcaaagtgcctgataacaccactagcaaaaccactgactgtcttcaaactaaagggttttcaaacagcacagagcataaaaggggctcagtggctcagaaggttcaagagtttaacaactgtctcaacagaggtcagtcttcaccacagagaagctatagttccagccacagctccccagcaaagatccagagagccactcaagagcctgtggccaaaatagaaggcactcaggagtctcagatggtgggcagcagcagcaccagagagaaagcaagcacagtgctttctcagattgtggcttcaatccaacccccacagtttcctccagaaacacctcaatctggccctaaagcttgcagtgtggaagagctttatgccattcctccagatgctgatgttgctaagagcacacctaagagtacgccagtccggcccaaatctctctttacatctcagcctagtggtgaggctgaagcacctcagaccacagacagtcctaccaccaaagtacagaaagacccatccataaagccagtcaccccctctccctccaaattagtgactagcccccaaagtgagccaccagctccctttcccccgccacgctctacttcttctccttaccatgcaggtaaccttttgcagaggcatttcaccaactggaccaagccaaccagccctaccaggtcaacagaagctgaatcagttttgcactctgaaggcagcaggcgggcagctgatgcaaaacctaagcgctggatatcatttaaaagcttcttccgccgtcggaaaacagatgaggaggatgacaaagagaaagagcgagagaaagggaaactggtgggcctggatggcacagtcattcacatgctgcctcctcctccagttcagcgccatcactggttcacagaggcgaaaggagagtccagtgagaaaccagccattgtcttcatgtacaggtgcgaccctgctcaaggccagctcagtgtggatcagagcaaggctaggacagaccaggcagcagtcatggagaagggtagagcagagaatgcattactacaggactcagagaagaagaggagtcattcttctccatcacagattcctaaaaagattctcagtcacatgacccatgaagtaacagaggatttttctcctcgggatccaagaactgttgttgggaagcaagatggcaggggctgcacttcagtcacaacagcattgtccctacctgaactggaaagggaagatggaaaagaagacatttcagatcctatggacccgaacccttgtagtgcaacatacagcaacttagggcaatctagagcagccatgatacctcccaagcagccacgacagcccaagggagctgtggacgatgccatcgcctttggagggaaaacagaccaagaagcacccaatgcttcccaacctacaccacccccactgccaaagaagatgatcataagagccaatacagagccaatctccaaggacctccaaaaatccatggaaagtagtctttgtgtcatggctaatcccacctatgatatcgaccccaactgggatgccagcagtgctggttcttccatcagctatgaactcaaaggactggacattgagtcttatgactccttggaaaggcctttgcgcaaggagagacctgtcccctcagcagcaaacagcatttccagcttaaccactctcagtattaaggatagattttccaacagcatggaatccctctccagccggcgtgggccctcttgcagacagggccgaggcatccagaagccgcagagacaagcactttatcgaggacttgagaatcgggaggaagtagtgggtaaaatccgaagccttcatacagatgccttgaagaaactggctgttaaatgcgaagaccttttcatggctgggcagaaagaccagctccgttttggagtggacagctggtcagacttcaggctaaccagtgacaaaccatgttgtgaggcaggtgatgcggtttactatactgcttcatatgcaaaagatccacttaataactatgcagtcaagatctgtaagagcaaagctaaagaatctcagcagtattatcacagctcacaggaattctgattgctgaggtgggtgattgagagctgttcaccatgtgtgcagcctgtgctccccttctatggatatgtgtgcaatttttgtatgtatttttttagctgtatattacagtgtttatgttgcaaaaaaaaaaaaaaaaaaaaaaaaaaaaaaaaaaaaaaaaaaaaaaaaaaaaaaaaaaaaaaaaaaaaaaaaaaaaaaaaaaaag

SEQ ID NO: 979 - DNA, 2136 bp, Homo sapiens
tactttagcctttgctctgaaatcccatgcacgctttgtgaggaaggacagccttggttggggggtgtttatggggagagcagagtggatggtgcgtatgtgaatacctctccccagatgctcccccaatcccaagctctcattatcttatatgcatattcataagggatggcctcagccctgctctgtaaatgggtcagaagcaggaaatagaggccagtacagacagcgaagcccaagggataggagggctcaaagccggcacacatctgagtcctcatggacgggaggatgatgagaagcatgaggctgagagaggaggagtcacccggacccagccacacagcgtcctgcctctgcggctctgccccctgcatcctgtgcagctgctgccccgccagccgcaactccaccgtgagccgcctcatcttcacgttcttcctcttcctgggggtgctggtgtccatcattatgctgagcccgggcgtggagagtcagctctacaagctgccctgggtgtgtgaggagggggccgggatccccaccgtcctgcagggccacatcgactgtggctccctgcttggctaccgcgctgtctaccgcatgtgcttcgccacggcggccttcttcttctttttcaccctgctcatgctctgcgtgagcgggctgccatccagaatgggttttggttctttaagttcctgatcctggtgggcctcaccgtgggtgccttctacattcctgacggctccttcaccaacatctggttctacttcggcgtcgtgggctccttcctcttcatcctcatccagctggtgctgctcatcgactttgcgcactcctggaaccagcggtggctgggcaaggccgaggagtgcgattcccgtgcctggtacgcaggcctcttcttcttcactctcctcttctacttgctgtcgatcgcggccgtggcgctgatgttcatgtactacactgagcccagcggctgccacgagggcaaggtcttcatcagcctcaacctcaccttctgtgtctgcgtgtccatcgctgctgtcctgcccaaggtccaggacgcccagcccaactcgggtctgctgcaggcctcggtcatcaccctctacaccatgtttgtcacctggtcagccctatccagtatccctgaacagaaatgcaacccccatttgccaacccagctgggcaacgagacagttgtggcaggccccgagggctatgagacccagtggtgggatgccccgagcattgtgggcctcatcatcttcctcctgtgcaccctcttcatcagtctgcgctcctcagaccaccggcaggtgaacagcctgatgcagaccgaggagtgcccacctatgctagacgccacacagcagcagcagcaggtggcagcctgtgagggccgggcctttgacaacgagcaggacggcgtcacctacagctactccttcttccacttctgcctggtgctggcctcactgcacgtcatgatgacgctcaccaactggtacaagcccggtgagacccggaagatgatcagcacgtggaccgccgtgtgggtgaagatctgtgccagctgggcagggctgctcctctacctgtggaccctggtagccccactcctcctgcgcaaccgcgacttcagctgaggcagcctcacagcctgccatctggtgcctcctgccacctggtgcctctcggctcggtgacagccaacctgccccctccccacaccaatcagccaggctgagcccccacccctgccccagctccaggacctgcccctgagccgggccttctagtcgtagtgccttcagggtccgaggagcatcaggctcctgcagagccccatccccccgccacacccacacggtggagctgcctcttccttcccctcctccctgttgcccatactcagcatctcggatgaaagggctcccttgtcctcaggctccacgggagcggggctgctggagagagcggggaactcccaccacagtggggcatccggcactgaagccctggtgttcctggtcacgtcccccaggggaccctgcccgcttcctggacttcgtgccttactgagtctctaagactttttctaataaacaagccagtgcgtgtacc

SEQ ID NO: 980 - DNA, 2288 bp, Homo sapiens
atttttagtagagacggagtttcactggccaggctaatctcgaactcctgacctcaggtgatctgcccaccttgacttcccaaagtggtgggattacaggtgtgagccagcacgcctggcccgttgcttttcttgttgatgttactagcactgttaggagctggagaggtggcctgggcagagtgctgtgggtacctagggcgggacatgcctgactcccctcgggagcactcatgctttttgttaattagataatttctttttttttttttgagatggtgtctagctctgtctctaggtggagttcagtggtgcaatctccacctcccagatttaagcaattctcctgcctcagcctcccaagtagctgggactataggcatgtgccgccacgcccagctaatttttgtattttcagtagagacggggtttcaccttgttggccaggatggtctctatctcctgaccttgtgatccgcccaccttggcctcccaaaatgctgggattacaggcatgagccactgcgcctggcctaattagataatttcttacttgcttcacatacatactggtaaaatctgtttcccctcctgtaaactgtatttagcatagccacagtgacacttgtttaaatgacttagtgtagggtgttttaggagcttttctgtacagaagctttgagggcatggtccttaggttctcaccgctgcactggctcagggtgtccgcccctgccaaggttgggtccctctcttcccatgtgctgcgagggtgctggctgcctgtgagttctttccaaagcttcccggcggaagccttggctgctgactctgctcggtccacaggaggctaacgagccggcagcagagcctgatcctgagctacgccgaggacgagacagatgtggaggggacggtgaacggcgtcaccctcaccagctctggtggcagcaccatggatagctccgcaggaagcaaggctaggcgtgaggctggggaggacgaggagggattcctttccaaacttaagaaaatgtttacctcatgatatcccagccgaggaaaaagatccactggaaactaggccgggaagcagcagcccctccaagggccagggcacctgggagacgggaggattccagaacagcagcactgagctcccacccgcagagcctctggacggccttggcaacagcaaaatcatgggacaacacctctctccacggaaaggtcacagtggacagcccgggcagtaggatgcagccccagaggctggtggcagtttcctgtccattggtaggtgacggcccctggctcaggcagagggagatggttagactcttgcagggctaaaactctaatttggaattgaatattgtggatatcttagttaaaggccatgcttacagcttagaaatgaagccttaagctgcatcaagttacgaagtgattaatttccttctcagcaaacctccgggaggttccagaatgagttcttcctgacaggttgtcttcactgggagcgtggggcccccaggccccaccagcaccgtcctcccctaatgaggggccctgccgaggcatcagctgctctgctcagttagtttttattcccggggtaccaagcagctgcacagtcggtgcctgggaggcacgtagaggcccagagagtccctgggggttctgctctgaccgtgtgggtggtgatccttgtcaggatgtacagtccttgctcccaccccatccaggatggccgcctgtccctgactattgagtcctgttgttgtaagccaggcatggagggctcctgcccttctgctgagccacagcccattgcagcactgtgctggccagacttcagctgccttgggaactgaagccctgccactgttgctagtcaggggcttggttctcccacttacactgttgacatctattttctgaagtgtgtttaaattattcagtgctaatcattgttttttcctttgtaaatgttgattcagaaaaggaaagcacaggctaagcagttgaaggttccccaccattcagtgagagcagaacccccattccccagcctctgctggtagcatgtcgcagtttccatgtgtttcaggatcttcgggctgtcgttagacaggttaatgaagaacacttctcaacagtttcctttttgttttcctttataattcactaaaataaagcatctattagtgtctgatttaggaatgtaaaatgattctgtattaatgtaaataagattatctattgcaaaaagatatttcaaacct

SEQ ID NO: 981 - DNA, 4127 bp, Homo sapiens
gtgggtagccgactggggtctcctggcgacgaccatggcgggggatgtgggcggtcgcagctgcacggactcggaactgctgctgcacccggagctgctgtcccaggagttccttctcctcactctggagcagaagaacatagctgttgaaactgatgtaagagtaaacaaagacagtcttactgacctttatgtccaacatgcaataccattgcctcagagggatttgccgaagaatagatgggggaaaatgatggaaaagaaaagagaacaacatgagattaaaaatgagactaaaaggagtagcactgtagatgggttaaggaaaagacccctcatcgtatttgatggaagttcaacaagtacaagcataaaagtgaaaaagacagagaatggagataatgatcgactgaagcctcccccgcaggcaagctttaccagtaatgcctttagaaaattatcaaattcctcttcgagtgtttcacccctaattttgtcttccaatttgcctgtgaacaataaaacggaacacaataataatgacgctaaacagaaccatgacttaacgcataggaaaagtccttcagaccctgtgaagtcgccaccattgtcccctgttggaactactccagtgaagttaaagagagctgctcctaaagaagaggcagaggccatgaataacctgaagcccccacaagcaaaaaggaagatacaacatgttacttggccctgaagaaaagtttccaaaaatgtaaatatactgtaactgtagtttttcaaatatgttcatatatattgacaatatttacagaaatcctgattattgtggaattttcttaagaggtttcaaataggtttaaaaaaataaaggatttattttccttcccttcttccctccctcccttccttttttaaaattcttgcctgtcttgccctgattaggaaagaatatctttttaaaccaatggcttagtatatgtcatttatattgaccctactgaaattattagctacaaatgtgctataaagcatccattgaattggccaggcgcagtggctcacgcctgtaatcccagcactttgagagactgaggtgggcagatcacctgaggtcaggagtttgagaccagcctgaccaacatggagaaaccccgtctctactaaaaaatacaaaattagctgggcatagtggtgcatgcctgtaatcccagctattcaggaggctgagacaggagaatcgcttgaacctgagaggcggaggttgcggggagccaagatcgcaccattgcactccagcctgggcaacaagagcgaaactccatctcaaaaaaaaaaaagcattcagtgaattttcggagttactctcattagccttgttcagagtctttgggggaaatttgagatttttgagattttttttaaaaactcaaatattttactagtttgcctgccattttatttcttttacaaagcagaagcatataccaatttatcacagtattttagtaaatactgcaacattcatccttaaatgttcaccaagaaaagcatctttgtagtagtgctggaaaactattcagaatatacagataaaaatgctgttctttaattgcttacattgcttcttcccatagaaagcaaaaaggaatcagtgcttgctattgctcctttccttgaagttgtaacaattgatacatatattatgagttgactggtcgattctgtacctggcccatcctttagaatgttcttgtcatgtagcagtcctacgtactcttttcatgagcagtctgtgatctcactctgtgagttcagctattactcgctcgtgggagcttaatcttttcaaaatgaagttgatttaaaaagtcttcaggcagagtaatcatgttagaggtggtattcgatggaagaaagtttagagagttaggagtgggggtagaattctagaatttataagagtccaggaagcatagcagtcaggggcaaaaattagcgtaatatggagtaggcaatagaggagctactggagtcagaagtcactgcagagtgcaacataggaagatggactcctagcttacatgagattccctgcagctgtaatatagacaattcccacatggctgttctacacagaattacctgctaagattttttgtttatttttgtttgagtggtattttcactccaattgtataatggaaatcagtaggaaaatagggtttaccttatattcatgagttctagtttctactgttctgctatgtgtttctaagcaagagcaaaggatacttcatacttttttcgttatatgattgatcttcaaattgggatttacctttttcaatatgttttaaagtagtcttattcctcttttgatttgttaaacaagcattttagttcagctattgaatagccttccaaaaaattaattcagccttgcaggtaagtaccatactaagactttaacccaatagtttttaatcattctgcctttattccaaactgtaaatctgtacacataagataaaacatactaagtattgcataaattgttaacgttacagtaaattgttatctgcagggctgacagacataatgttggtgggcaactgtgatcctatacatacatatatgcaaaaggggattttaaaagtgcagattatagagtagattgacaaattttattttatattcagttgtcctctctgcttccatctgtgttgctctcttagttgagagagagttagccatttgacgattttaagtcagtgggaacttatttttagttactcaataaaattaatattttatttgtattttaacttacagagtaggttggtaataacagctgaactgtgtaacattgttgcttcaaattgaagtttatattatgaacattcagaatcaatgctcatgtagcagcatattattgagctattttgagtttgaaatgtggagaaacgctaaaccatgtactatgtgttaacataatcccaccttcttagagctttgttccttctgaaggtgtatagatacagcttgtcttgaaatgtctttctccacataatgaagcatgctgaatgctgggaatctggagcagcagccctgggagccctgagttttgaagtgttttggtttgcttcaaaggttagaagaacttgatatgtatggcaaacaactttagaatactagttactcactaacatgaggcgggtaatgttgctctagattctatattccagtaaagccagcttttcttattattggagtaggcaaatgaatggcattagaattagtgggtggcttgtaagttgtagttataggcactttaccacttcctgccattagcaggcatccttgttttttcttcttttccctctttgttccttcttttccctttctccttatacattttctttctctactttaattctccttcctccttactgtagatcccaagcttctagcttaggtttgcaagtcatattgcttggccctccacattcactgagaggtgaagataggctgaccccctgtcctcttacatttgagggatcatagactgctgtgtgaattctggaaagtctcgggtccctaccagggcactgaatggcttctcaatggctgtagagacagtacagttttccaaagcagcctaattcatctggacagctaccaggcactttggaaagttggttcagttactactatgaggccataatatatttgctggtattaaaattcttcagaattggaattactatttgaaataatattttggttgacttaagttttgagagacaattctaaaattgatctagagactcattcaatagcaatgtgaccttttaaatacttacattaagtaaaactgccagtagattaaatcatatatatatatatatatatatatatatgtaagagcttcctctatttactactgttgaacttcagtaatttttagaggctaaataatggtcagaatgtttttaagtgtgctcttttattacatgcttgtgcaggttttgtaattcagtacagaaaagtttaaccttgtacatttttgtatgtaaaaagtcttttaagtagtcttatccttatttaaataaacagaataaaattac

SEQ ID NO: 982 - DNA, 3144 bp, Homo sapiens
tttctgaaggaacaaattttagcaagtccttattctgccattcctgcaatcactgcaagaaagcatttattttgataagacttaattacacattgactttgtttctttttcatatatcaaataaaaagttgtactgtgcttttaaaatgttatttttatgtccattatattattcgaattatcattttaacaaaaactggtttgcacattacagtttgaaaagtgttggtctatttcatactgccattgtgacagatcactttagtttacatcttacttatattgtaaattgtaagcaatcagaacccctcctcaccccaagttggataaaatactttcaaatggggaactgtgaacatctgaggaaagtgattcttagtgttggcattagaaacacccacccagaagaacttttaaaaatatgcattcatgtactacaccccaggcaggtctactttcaatcttaaggaagtaggtatgtatttttaaaatcaagctatttttcaagttccatagacaattctgttagataatctatactaagaactactgatgcatagaaaagtttattattgttgtttttgtttttttgaaggagtttcgctctgttgcccaggctggagtgcagtggcttgatctcggctcactgcaagctgcgcctcctgggttcatgccattctcctgcctcagcctcctgagtagctgggactacagatgcctgccaccacgcccagctaattttttgtatttttagtagagatggggtttcatcatgttagccagtatggtctcgatctcctgacctcatgatccgcccgccttggcctcccaaagtgctgggattacaggcgcgagccaccgtgcctggcctagaaaagtgtattacctttttaacatcattattctttactccatttttagttttgaattgcagtgtttgaccttaaaagttttatattacaatttttttaattagtcttttattttttccaagagacttctaattaaaagggaatagtaaataaaagcactgtgcttgccttttgtgcttttattaaagtgaaatctctacaatctttcctaagctgttaatcactgtttactaatgaacataaaccacttcctaattattcagactcaagaatttttttctagagggtattggggtaggcaaagaaaagcaggagagtttgtaacaaacagtatgtgggatttttttagatgtgttcaatttgaaagtaacttgtgaaacaactggtgatattttggtataagacgttttgaaagttatttgtttatttctaaggataacaaagctgatgtaattttaaagtacaatgcagatgaagctagaagcctgaaggcatatggcgagcttccagaacatggtaagatcaaaatgattttatctcctcattatttgatattaatgtttgttggtatttaggtgaaggtatttccgtagaactcttgttttacatactgttttagtgtatacttaaaaatttgttataagtagtcttgcctatacttcagtttacttatgatactttggaaaagatattaataactggaaatctctaataaaaacgttatgaacttgaaagtagaagtctctaataaagagattatgaattatgaaagttcctttagtgacaactttataaattcataagctctggatttgtatataagatctgtcaaagaaatacgttttttatagtgtttttctaaacagttctcaagactggcagttttcatttaagcagaggcaacaaatgtaatactaatgtttgattattatagaaaaaagtattcatcttagcaaagttttaactatgggattatttttaacaaacaattgtgttttctttttcttaaagacaaacacaatgcatacttactgccgaaagcttgacaagattaaaataagtccctcatgacaccatcaaagagaatatgcactgttgtaaagcctgcgtattttacttggcagctattttcattatttatcatattgcattttatgaaaagatttttatataaacatgaagatcttgatgaaattattggcatttcaggaagtgctgaaatgttattggaagtgatgaaattattggcatttcaggaagtgctgaaagtttcgctttcattacttggggataagcatgatcatgatttaaccaagtatttctcactgatttgataagtctgtttaaataattggttaactagttgttgtaatttcaagagaactttatgtattttgaggataagttgttaacctgtgctcaaatcctttttgaaggctacatggaaatggttggctattgagttagcataatcagtctgcctaccatacttaaagtaccttttgtatatgtgctaagtgagaattaaaaataccttttaaaaacaaatgaaaaatacagcacaatacagcacattcgttctttgttttttgaaacagagtcttgctctgtcacccaggcaggagtgcagtggcaccatctcagctccctgcattctacgcctgccaagttcaagctattttcctgcctcaccctctgcaccctctgagactacagacatttgccaccatacctggttaattttttatttttttatttttagtagagaccagatttcaccatgttggctaggctggcctcgaactcctgatctcaagtgatctgcctaccatggcctcccaaattggtgggactacaggttatataatcagtatgtctgttattttacctttagctaaaatcaatgaaacagacacatttggtcctggagatgatgatgaaatccagtttgacgatattggagatgatgatgaagacattgatgatatctaaattgaaccaagtgtttttacatgacaagttctctgaggatggttctacagttgggattttggccatcatcaaccaagaagagaaattcatttagtgtgtagtttctgaaagcaaactgatttattttcattgttttaaagtatttatttctttaaaagctgaggacactgaattaccttaagttaaatgttaatactttattgttttgatgtaatggaacttaaggataaaagaccataatatttgctgttaaaataaataaacgagtgcctttcctact

SEQ ID NO: 983 - DNA, 2741 bp, Homo sapiens
actcccggcacgcccggtgccgccttccggctccagtccccgggctcggcctcggcgaggtgtaattcgcagcgcgggccggccccggaggctctcggcgagcgcggcgcggtaacaagtgggcgaggatgccgtacgagatcaagaaggtgttcgccagcctcccgcaggtggagaggggcgtctccaagatcatcggcggcgaccctaagggcaacaattttctgtacaccaatggaaagtgcgtcatcctaaggaacatcgacaacccagcccttgctgacatctacacagagcacgcccatcaggtggtggtggccaagtatgcgcccagcggattctacattgcttggactgaagacagtaagaggatcgccgtggtcggggaaggaagggagaagtttggagcagtcttcctctgggatagtggctcttctgtgggcgagattacaggacacaacaaagtcatcaacagcgtggacatcaagcagagccggccataccggctggccacgggaagcgatgataactgcgcggcattctttgagggacccccattcaagttcaagttcacaattggcgaccacagccgctttgtcaactgtgtgcgattctctcctgatgggaacagatttgccacagccagtgctgacggccagatatacatctatgacgggaagactggggagaaggtgtgcgcgctgggcggaagcaaggcccacgacggtgggatttacgcaattagttggagtcccgacagcacccatttgctttctgcttctggggacaaaacttccaagatttgggacgtcagcgtgaactccgtggtcagcacatttcccatgggctccacggttctggaccagcagctgggctgcctatggcagaaggaccacctgctcagtgtctccctgtccgggtacatcaactatctggacagaaacaaccccagcaagcccctgcacgtcatcaagggtcacagtaaatcgatccagtgtctgacggtgcataaaaacggcggcaagtcctacatttactctgggagccacgacggacacattaattactgggattcagagacgggggagaacgactccttcgctgggaaaggccacacgaaccaggtgtccaggatgaccgtggatgagtcggggcagctcatcagctgcagcatggacgacaccgtgcggtacaccagcctcatgctgcgggactacagcggacaaggagttgtgaaactgggcgttcagccaaagtgcgtagccgtcggccccgggggatacgccgtggtcgtgtgcattggacagattgtcctgctgaaggatcagaggaagtgcttcagcatcgacaaccccggctacgagcccgaagttgtggcagtgcaccccggcggggacacggtggcaattgggggtgtggacggcaacgtccgcctgtattccatcctgggcaccacgctgaaggatgagggcaagctcctagaggccaagggccccgtgaccgacgtggcctactcccacgacggcgccttcctcgcggtgtgcgacgccagcaaggtggtcacagtgttcagcgttgctgacggctactcggagaacaatgttttttatggacaccatgcaaaaatcgtctgcctggcctggtccccagacaatgaacactttgcctccggtggcatggacatgatggtgtatgtttggaccctgagtgacccggaaaccagagtcaagatccaagatgcacaccggctgcaccatgtcagcagcctggcctggctggacgagcacacgctggtcacgacctcccatgatgcctctgtcaaggagtggacaatcacctactgaggagccccacccccgcctctggatggaccgaatcagggactagagtttaactgcagcggaacatgtcatttctctatttctgtgacgcgcccccatgcccccaccccaccacaagaggcaggagggcccagtcatgaccctcgtctctgcagggtgtctgtacacgttcttctgaaagctttagacagtaacagtttgcacatgaaaaataaagcgagcacctaaacaatgtgtggagcataactaaaacccacagcccaaccaaaccttgagaatgcgaaacattccagaggcagtagcctccaaagcacacagagcccctggccccgccgcggctctcactatctgtcaggggaggttgtacaggtgaatgagccggggggctcatgttcctgcctgcagaacatttctgtactagtgagaagagggaatatgcattgcagttcagcaaagccggaattctgtgttgaacagatgtctgtctccctagtgtgtgactcacaccttgtggctgccttcagagcgccacctccagatcagatggggacacacaacccctggatatgtttcattgtcagattttgtgcttgattttaagaatggaattgtgggtatctttcctttttttttaatgtatcttaactgttgcctgtcagtgtttacaaactagtgcgttgacggcaccgtgtccaagtttttagaacccttgttagccagaccgaggtgtcctggtcaccgtttcaccatcatgctttgatgttcccctgtctttccctcttctgctctcaagagcaaaggttaatttaaggacaaagatgaagtcactgtaaactaatctgtcattgtttttaccttccttttctttttcagtgcagaaattaaaagtaagtataaagc

SEQ ID NO: 984 - DNA, 2350 bp, Homo sapiens
actacaaggtgcttatctgctgctttgctggaggtgattaggggattccggcttctcccactgcaggtgatggctgcaggtagagcacgagctggcagcctcaggcagtgggccttgacccagctggcccgggctggcacttccagttcactcctggggcgaatgctgcttcctctgcagcctgccacgggctgcccacgttcccctcaccagctcgggtgggctgctgagcgccggccgtctggccgctgtgaggagcgtggtttcctttgctcacatttgctctgccgccatttctcccgccgtgggccagtgtttcctggcagccctgtggttgctgtcctcctcggacctggttcccttttctgcctcctggggaccccgtgcccttgggattggactggttgtgtgttacatacggtgtttctctggagtcattttgaatttggccaaatttccctccagggtttctgctttgagtgtcagctgagagcgctttccccggccgagtccgtgaggtgctcctgggtgcactgaggttgcctgggcccccgctggaactgtgctgtgtggtgggagctgcagcccccgccctcctccagggagaccccccggcccaggaccctgtgcacagcagtccctcctgacctgcggcccatgccccgtccccagccagcccctgttgggtgcccttctgtggcatccagtcctgctgccccacgcctggccctgccctcgcgtcctgcctgccttcgggccttgcccaccttcccgcctccctgttcagagaagccgccctgaggccgtctggacgtagatttgggcgcagctgcctgcactctgcccattcagcctggaccccaaccaagacctgtggagagcagggccgacgctgggctcaggcagcaggaggctgtcctcgtgtcagagtcgtggccgcctgacagatgccacctccctgctgggaccgttgtgagggcccctcccccagcagccttgtaagtgggacgcaggtcacagctctgggcagagcctccctgctgtctgcctgccaaggctgaggaagagggagtaggggccgttgaggaggtgcagggagaggagcgggagggctctgggtggctgccaagggggagctctgcgctcagaccctcaactaagaccaggaggtgcctgatgaggccccagcctgcagagccagctcctggtggaagaggaaatgaggcatgctccattcattcggaggtgggtgaggcttctaggacccctggccgcccttttccagagagccgtggggtctggggagagcctctctgctggctgtctaccattttgactctgggctgtgggcagaacctgtgccccggccaggggctggggctgtcatgcccccacgcagcctcctgtgtctgggggtcgggggtccctgaggtcctaggaggacccctgcctctgagccgcttctttcggaatctgcaggggttccctgggctggccctgaggaggagcctcccccagtcgagcaggccatcagccaggagagcttgcccacagaggggctgtttgatgtccccaggacattgctgtaaacacagtgcagaagccgatggctggccctgaggctctctgtgacccggcgggctcactcagcctcctggcacataacctgccctcagagtgtcccggaatgtcctgagcaggacggagtgccggagggaccttgggtgcctggtgctgctgggaccacagcctttgggtcagcctggcctccatgagggtgcaggctccagggtgcgacctcagggtgccctgaggtggggtctctgggcagccttcccctgagcccctgggaagcttctcagcatgccggcctggctgcagggtcctattgcccagctgttcacagtagccggtggccgggctctgagcacatcgggccacacatcttgggtgtgccagacacgaggctgagagcccccggggaggcggcgtggctcggcgcagcaccccacgtgctgacccagggtttggtcctgccaagtgtggctggcaggggctgaggtcacctggggcagcacgagtggggctgtggggttactggtggtcaggcctgagtcgggtggggcctgctggaggcccagagtccagcagggccctgctggctcatctggtaccaacctccagtggatctgaggtggggtctggtggggcctgtgggcggggccacctgctgaaaatgcacctgggccccaggggaggctccaagcatagggtggctcccacatcagtccccagggaggggcaaggcaagcggcttggcctcacaggggtggggcctcttcctctggac

SEQ ID NO: 985 - DNA, 2625 bp, Homo sapiens
agttgcgcgctgggattgttgccgtgcgctggagccgggtgtttgtgaaccgaagtttagcaatggaaaagataaagtgttttggttttgatatggattatacccttgctggagagccagtgtaactccttcaagactggagtgacacacactgcatctgcatctgcctcatgggacttgtctttgacacactgtatggaaatcttttgaaagtcgatgcctatggaaacctcttggtctgtgcacatggatttaactttataaggggttctcaggtagctgttcagaagagaccagaaactagagaacagtatccaaataaatttatccagcgagatgatactgaaagattttacattctgaacacactattcaacctaccagagacctacctgttggcctgcctagtagatttttttactaattgtcccagatataccagtgaatttagtgctagtgagagatgccacattgccaacctgagaggtgggacagcaccagcagctccatgcaggctctcacctcccacacggcccctctccttgccagtgtgctgcagccaccacttctgattggcttctcctgggaatgaagacggccagcagaggtgctaattgtgacaactgagtgggaggtttgtgtgatgattatctgtccaagcagaattacactaaaaccccccaactcatttcacagcagctacccaggagccattcagggatgttgtgaaacaggatttaaagatggggacctcttcatgtcctaccggagtatgttccaggatgtaagagatgctgttgactgggttcattacaagggctcccttaaggaaaagacagttgaaaatcttgagaagtatgtagtcaaagatggaaaactgcctttgcttctgagccggatgaaggaagtagggaaagtatttcttgctaccaacagtgactataaatatacagataaaattatgacttacctgtttgacttcccacatggccccaagcctgggagctcccatcgaccatggcagtcctactttgacttgatcttggtggatgcacggaaaccactcttttttggagaaggcacagtactgcgtcaggtggatactaaaactggcaagctgaaaattggtacctacacagggcccctacagcatggtatcgtctactcaggaggttcttctgatacgatctgtgacctgttgggagccaagggaaaagacattttgtatattggagatcacatttttggggacattttaaaatcaaagaaacggcaagggtggcgaacttttttggtgattcctgaactcgcacaggagctacatgtctggactgacaagagttcacttttcgaagaacttcagagcttggatattttcttggctgaactctacaagcatcttgacagcagtagcaatgagcgtccagacatcagttccatccagagacgtattaagaaagtaactcatgacatggacatgtgctatgggatgatgggaagcctgtttcgcagtggctcccggcagaccctttttgccagtcaagtgatgcgttatgctgacctctatgcagcatctttcatcaacctgctgtattaccctttcagctacctcttcagggctgcccatgtcttgatgcctcatgaatcaacggtggagcacacacacgtagatatcaatgagatggagtctcctcttgccacccggaaccgcacatcagtggatttcaaagacactgactacaagcggcaccagctgacacggtcaattagtgagattaaacctcccaacctcttcccactggccccccaggaaattacacactgccatgacgaagatgatgatgaagaggaggaggaggaggaagaataaggaggaaaaccaaaaccccaagcacccattaaacaagtcctggcaggactcacaggaacaaacgaggtccctgttagggttctactcgggggagggagggggctccatgaaaggtacgtctgaaaagtttctgaagattttattatcatagatacttgttttggttttgtgtatctgtactctctgcagatggtccaaaattgtaatggagtctgtattagaagaaaataagggtaaaatcaggctgaactgcatgtatatggctccactgtggcttgtgacacttttaaaatcatccgtatgtcagtgtatctggatacacgaggaaaaggaaagagtctcagagtggaacaaagagtgggaagaggtgatctgtaatgttacaaattgtgctattactccaaggtccaacttttccagtgcattacatggtattgtatatcagtggagaaatgtattatttccatgatcaaatgtagtctctgttaaggtcaagttttcttttataagcctttaattcatcctcagtgactctggcaaggctgcttctctatcactggctttgcacagaagtatgctctacttgcgttgctttagggcaggattctattttgagggaaaagacagtatccttattaccttttgtttgtttaatagcacaaatgcttatttgttatccaaaaacaacctccttcttatctgtgataaatctatagaaagaatttagctgcaagtggacaaaggaacaagccccc

SEQ ID NO: 986 - DNA, 2012 bp, Homo sapiens
attttgggctaaaacaaaggtctctttttcttggtaacctgtgtttttctcacttccagtcacttgaaattataattaccttcttgaaacaaagaaatggtaatttattttgctactgtagtaaatactgtatgctacctgattttattttgttttttgttgtttctgagacagtcttactctgtcacacaggctggaatgcagtggcacaatcttggctctctgcaacctctatctcccaagttcaagcgattcttttaacatcagcctcccgggtagctgggattacaggcatatgccaccatgaccggctaattttttttgtatttttagtagagacgaggtttcaccatgttggccaggctggtctcgaactcctgacctcaagtgatctgcctgcctcagcctcccaaagtgctgggattacaggcttgagccaacacgtgcagcctgattttatttttgagatctttctataaacgttttccccttggactaacaaattaatcatagaatagctgtgttcacattttgtgctgaaagtaatgatgtaatattttcgcataggctgttttgccagttgttattcccagaattttatagagaatgtgatagtatctcttttctcctaaaaagggaatgccttttataattatggctttaataaagagaagagcaattagcttgtaattcataagttaatactaaaaggtatgtagtttctccttatgagtaaaagtatttgtgtaaaaatcctaattactttattcttcctcagaattccatcatccctggccctcccttcctatttggagcctgttcagtactgctggctctgcttgttgccttgtttattccggaacataccaatttaagcttaaggtccagcagttggagaaagcactgtggcagtcacagccatcctcataatacacaagcgccaggagaggccaaagaacctttactccaggacacaaatgtgtgacgactgaaatcaggaagatttttctatcagcacccaggtcttagttttcacctctagttctggatgtacattccatttccatccacagtgtactttaagattgtcttaagaaatgtatctgcatgaactccgtgggaactaaaggaagtgggaacttagaaccagacagttttccaaagatgttacaatttcttttgaaaaaccttttgtttattagcaccaatttctcgccactaagctatttgttttattatacatcctttaattaaaaactatatatgtaacttcttagatattagcaaatgtctctgctaccatttccttaaggtgttgagctttaactctatgctgactcagtgagacacagtaggtagtatggttgtggacctatttgttttaacattgtaaaattttgagtcagattttaatattgtaaaatcttgggtcaaatatttcaaagccttaatgcagatgcactaaaacaaagaaatggtaaatgaattgtttgcatttaaaaaaaaaaactcttaagaaaactgtactaaatctgaatcatgttttgagcttgtttgcagtacttttaaacattattcactactgtttttgaagtgagaaagtatcagccatttagcatttaagttggggtatttagagcctgtaatctaaatgctggctcaaatttattccccagctacttcttataccactactcttttaatgtttgcataatcataagcacctcaacacttgaatacataatctaaaaattatatagtaaagctggtagccttgaaaatgtcagtgtgatatctattatgtagataaatatatatagtggcctttcaggactgtcacagtaacactttatttacagagctaatgtttgtcctaaattttcaggaccctagaggagagctttatacaattaccgatgtgaatttctctaaagtgtatatttttgtgtccagttatattatttaaaaaagtgttactttgtaaaaattgtatataaagaactgtatagttt

SEQ ID NO: 987 - DNA, 2533 bp, Homo sapiens
ccaatgtcaccaacagcaatggggcccaccatcagcctggacctggacgtggatgatgtggagatggagaactatgaggtcccatggagccccatgctgggaggtggggtttgggagacctgcagccctgggcgccgctgaccccgtctcctgcccgcatgcaggccctcctgaacctggccgagcggctgggagatgccaagccccggggtctcaccaaagcagacatagagcagctcccgtcgtaccgctttaacccggacagccatcagtcggagcagacgctgtgtgtggtctgcttcagtgacttcgaggcgcggcagctgctccgagtcctcccctgcaaccatgagttccacaccaagtgtgttgacaagtggttgaaggtaacactgcccaggtcggctcctgggtattcctcatgcagtgacggggggatgggctggcctgggctgtttccctccttgtccttgtcatcatctcggaagttctggctccagcggaccaagtccccccaggtggctgcacagatgtggtgggttggggctggtgagagcaacgcctgacgtgcatgttcccacaggccaaccggacgtgtcccatctgccgggccgacgcctccgaggtgcccagggaggctgagtgaggccacgcagccgcctgcccgggagaaccctgcctgaagctctggaaacttgtgggtggggcccagggaggatggggagggagtggcccaggcctgccccttcgctcctgcctgcatttccagagctggtgccagggtcagcccagcgaggagtccctgcaataagcccctgcatttgccaagctccaaagactccctccctagtctgcctgcccgcccgcccgccacggagctgcctgagtgtccctgatcgggtctccctcctgtgcaccctcaggtccctccttttcctgctggcactgagtgccaggggtccgctccctcagtggggccggtggagatccttggccccaggatgggcagacagagcaccatcctgggtcagaaggtctcatgctctgaaatggcgtgccctctgcccaggtggcactgccaggtgcgtagacagacggtgtcacgagccatttcctgagccccagggctgaatcccccctccttgaccccgaacagtgaactcaggcagctggctctgtgttggctgctgtgagggctgagtctggttccctaggggaccctcatcccaggaataacattccagccccaccctcaggctggagggcgtcccagcctaatcccgagctggggcacacgtatcctgaggggcttgggccatacggggagagggagccctgtgttcccggtggttgtccctcccagggatgcagccagacccgtgcccaatctcctctccctctgttgttttgcatgaacgtgaggagcagcagtttttgttcattcatttggcccaaaatcacgtgtaggatttggggatgtggatatttaagacaatttcttttttcttttggtttaataggggcgggtatagggaccaactgggaccgagtgcccagggggccgagcacggtcatgctggccggcctgcatgcatgcgtgtgccgggctgggctgggcggccggcggtcgtggggcagggttgggggtctgtgctcagctgataactgccatgcactgtactgcacacgtccctagagcctaccgggacccgacgcttttcagggcatttctccctccagccagggcccaactcccacctgcctgggcgaatctcctccaaggaagtcccaggaggatggggaccaggaaggctgtggacccccatctccagggggccttcccagcctgatccctgtcctccaagttctggaggaggccgctgtagggtctggctgagcttcccacccactttccctggtcccaatcctttcttgtcctatacccagctggggttgctgccctgaacgaactgcgtgtggggccggcacatcctagcaggcagcccctggcgcctgctgcctcagggatgctccaaccaccctcgttctcctcgcagtggccctggctcccacctcccgccccagcctgccgtggggcccgtcagcctggtcccacccccatggagaacccaaagtcttactgtatataactccaggtgacgtttctatatttatagcagtgttgaaaacccacgtgttttacacagaaccaccctctccaacccctcccttcccgaccccaacaaaacgttttcaaaccccttacagttcctggggcaggcggaaacaggctcacagattgtgtgtcggctgcagcagtgattccaacaagcagctattgggggggaaacacagcatttaaaaagatcatcattatatatatgtgtatactgattgaaatttttaacagatttgtactttttttaaaatgaaagttgctagttctgcttgaccaagtagtgcaatcattattttttttaatattgttgctgatttcagagggatattcactaataaatgtatgatgtatacc

SEQ ID NO: 988 - DNA, 1916 bp, Homo sapiens
ttaaaagatgaggcaactggggtggggcattcaaaccaacacagcagatgacagaatgccagagtcttcctcaattcctgtgatgcatggaggactccagaagtctccatgtgccctgtggagggtgtgcaaggagactggccttggagctgcagtgggtgaggtagctggggaagacagatggggctggaatgagagtcagtctgctttcaggggatccacagcaccagcgacagtacagtggggccttgttgacaggaagagatggtgctctgtgcctgggccctgctgcaaacctagcatctctccacacaatcctaatatcccttcagtttttcctccaccaggtcatctgctttgcagattctatgtcttcctctttcttggttgaccgcctcattttagcagaacagtccctccagcagcatcctgagacaaggagaatgcaaggaaaatgtggggggactgtcatttaaaaaattctttagagctcttgtgggttgctatttggctgggcataaattctatttcacaagtcacttttcttcagaattttaaagatactgcttctttgcttgtagttttcagtgttgctgctgagaagctcacactcaattaatagtttggctgggtatagaattctacagcctcagtcagcctcctgagccactgttgaggaatccaacgccatcctgtaccctgatcttttatatatgtttttgtttttatttgcttttcatttttcttttctggaagcttttgatattttttcttgatctatggtattctgaaatttcctaataatttgcctcgatgtggatctttttgtcatttgctgtgtttagcatgtggtagattccgataagtaagctcatggcttcagttgtgggaattttatttttgtatttttccttgaatattttcttccccttgttttctccatttttctctttttgggacgtttaactttttggatgctggatatccttgatggatcctccaattttcttatctttctttcctatttccaatctgtttatctttttgttttactttctgagcattctcctcatctatcaaatgtgttattttttaaggttttttttggactattaattttaattttcaagagctctgtcttattctcatttgatccccactctttctttttacattcatttttattttcttagatgcaatatcttctcatctctgtgatgatgtaacttgtaattttttgaagtctactcacgtttaaaatgggtcactaaagatctgatgaaaagctccatagggttgaaaagggcttttcagttggcagaactcactgcaaggtaataatgtgggaagctaaccatttcactgaggaaccaatcatcaggaatattcctattttgtagatgagactagtcactgagaacataagtaatttacccaagttcatatagctagtaactggtgtgctgagattcaaaccaagaacatctcattccagaagcagtgtgctaaaccactgtgctgcactgcactgcctttcagagcagcagcagctaacatttaacaagtgctttctgtgtaccagacactgttctaggtacccaaaaatcatttaatttaatcctcataataacattttgaagtagccactcttgttagccccattactgaccagcaacttgaagcacagagaaggtaaaccacttgcccaagatcacacagctggtaagtgctggagatggaatataatcctaggcaatccgccccaagcatcctttctgctttgtctccaggagtctccatttcatcatctgaaaaatggcaatgtgattcctaactcagttattttgaggataaaatgagagaacacatgtaagaaacctgtacctaatagacctgaaacagatgttactttcatt

SEQ ID NO: 989 - DNA, 2308 bp, Homo sapiens
aaagcgagcccggcagctcaatgacaaatcggtggaggacggctggggtccggccccgggagggggcggggcgcgtttaagagctgcgggccgggtgcggacggcggaggcggcgggactggtccctgctcttcagtgggtcatctgtgtgtcacagcctcagaagaccagcgagatggctgccaacaagagtaagggccagagctccttggccctccacaaggtgatcatggttggcagcggaggcgttggcaagtcagccctgacgcttcagttcatgaatgtttcaaaatcattggcatatgacaagaaaaagtatacagcaaacaaaaaagtagaaggtattctagagtttgtagaagactatgaacctaccaaagctgacagttatagaaagaaagtggttcttgatggggaagaagttcagatagatattctggacaccgctgggcaagaggactacgcagccattcgagataactactttcggagtggggaagggtttcttcttgtgttctcaatcacagaacatgaatcctttacagcaactgccgaattcagggaacagattctccgtgtgaaggctgaagaagataaaattccactgctcgtcgtgggaaacaagtctgacctagaggagcggaggcaggtgcctgtggaggaggccaggagtaaagccgaagagtggggcgtgcagtacgtggagacgtcagcgaagacccgggccaacgtggacaaggtgttctttgacctaatgagagaaatcagaacaaagaagatgtcagaaaacaaagacaagaatggcaagaaaagcagcaagaacaagaaaagttttaaagaaagatgttgcttactatgagtgtcaaggtgacggatgaagccagctgctcctaaggacacagggctgggttggtaaagagaaggctatggttgacttcttgcttgtgcttcccactctccccgacttcattcactcaaacttctttaaatggggaaaaatatttgtgactctgtggctggcagaagaaataagcccatgcaagtggaagggctgctttgtcaggaggttgtggaatttctttcttctccccttcttccctcccaaaagcttagctatgtataaagtgccacagataggaaacagctgttaattacaaagagaaagaattgtcatagcatcttattttgttcctagttttataacattaccatccttcgttttgaactacagatgttgtagtgggttttggaggagggagtggagtaagatgccctcccacttttatcagtttagtagtagtactgagaaaaatcccttcagctctaagaacactgaaaaatccaccgattttttgggtaagcttcttggcaataccctgtggaactgaaacagctaaaaaaatgaatttgaattgcgccagataggtcaataccaagcttctgattcctcctcacatatgaaaagtgaaagttgtgagttgttttcctcttatttaaacattggcctattataatctgtgttggttatttttctcctgtaagcatcctgatttttctgtaggaacttttctttggcagaccaagtgaagactcaggaatggtgtgcattataaatgacacacattgccacttgtgtagatatttttaagttctttggctaagtcctctcctaactgcctgtcctctggttaggcccctccctctccactagtggtgaatgcatgtgtctgtctgatcagcatcactgcacacggaggtctagtgagcctcttgctaagtgtcacacacactcttcccaaagacgtgatgagttaaagttgtattctgaaatcatgaagccagagcctgtgccagaccttctgctacctctcatagaattgctctgtaattctaaatttaaaattagaagtagagagagataagccatcgcccctttgcctctgagaattggctgctgtttctaatataattattttctaagatagccagatagttagaaaaagattttcattgatgacatatctttaaactttcttgcatcagtattctaaattgagcaaactgaaagattttcatcaggaaaggagcactgtgggaagagcccagtattcacattttttccccatttttcagaagcgacatttcatatataggtgccaaaagtgaatcggggtgcggagagtgggaaccttttgaatttatgattgtcacagagatggtagaaattatgatctgactggaaaacaatcctgtatcccctcccaaagaatcatgggctttttttttgaataaaaaagcagacaaatag

SEQ ID NO: 990 - DNA, 2158 bp, Homo sapiens
ttttggtcttctaatgtttagtcaagtgattgtccccctttttttttttaacgtcttggaggtgaaatgaactggtattatggaaagtggaaagctcactttgtcctaaggtgtcccatttcatttttaaatttttttttttttctttttgagatggagtctcactctatcacccaggctggagtggaggggtgcgatctcggctcattgcaacctctgcctcctggattcaagtggttctcctgcctcagcctcccgagtagctgggactacaggcatgtgccaccatgcctggctaatttttgtatgtttagtagcgatgggattttgccgtgttggccaggctggtctcgaactcctgacctcaggtgatccacctgcctcggactcccaaagtgctgggattacaggtgtgagccaccacttccggtcctattttatttttagtagttttcagtcctaattctccccactgagtcttggtgtctcatatgacattccttctgatagttgaagatagctatcttgtcttctcttgggtaaacaactctggctcccttaactggatctccagtgacagtgacatcgttttaaatcctttcactttttttttttttggaggcagagtcttgctctagtggtgatatcatagctgcctgcagcctccaactcctgggttcaagtaatccttccacctcagcctccaagtagctgggaccacaggcgtgtgccaccatgctcggctaatttttttttttttggtagagttgaggttttgctatgttgcccaggctgttgtagaactctgagctcaagcaatccttctgctttggcctcttgaaatgctgaaattacaggtatgagccactgtgcctggccctttcactattttgaatctcttctaggcactatgtaatcattgtcctttccttaaagtgtgattccttgagctgtagaaataattccaggtgtggtggtttgaactgaacagagaagtgcaggctgtcacctctcctgttgagaatccttttccaacactgaagtagaagagattctctgagcttttagggaagctctcagaatttctctttgataaatattgaatttgctgtcaactgaaacatcttagtcttaattgcttcaaaaaaaggcattatttgtatctctcagattctcttttctttggtattgtagttaagctttttcttttgtttctaatatacttgacccattaaggttggctttggtagatttgctccaatagttaagcctgttaatgtcctttttaatttggattctgtaattcacaaaacactgactgggctcctttgggccaggtactgggttgggtcctggacatggcaaagaataaggtgtggaatctactgtctggattagctactttttaactttgtcatctgaaagttaggtaagaatgcctttaatgttctcaacaggtcattattaaagactatgaaagaaagcagagagagagggccaagtgcaaagctctgcagcaagttttactgtagtccagtgatacatgaccagaagtgcaattttctgtagacatatagaatcttaggggcttttttgggccatgcatgggccacaggccatcccctcctccttcccttgagtaagaaacagttgttaatggagtgctatacatattaatgataatggaagactgactgctatgggctactacctagtggacacaaatcccttaataaaatgtaaacatttactccagcattacagttctcctttttgcccaagctacatctgtcttgcccacaaggttatcatgagatgctttgtcaaattcttgcagaagacaagataggctgtgtttctgcagtactcaaatctattaggaggccatataatgtggtgaaaagagaaaggactttgaagttacactggggtttgaattcttactcccacttcatagccatcgtgatcctgacaggatattctaatgcctgtaagcaagctccttttctttaaaatgggagtaccttactcataggactttatgtggattattacatagacagccgtcatatgtaaagctactagcacagagcctggcacatgtttgtttaataaatgtttgctgtttgatgttaaatgaataaatgatgcgggattt

SEQ ID NO: 991 - DNA, 1862 bp, Homo sapiens
gtgctcttgcctggcccgctgctgtcgccgccgccgcgctcgtggggtccgtgtgcctcgtcggcccggcccgcgggctttctcccattggcggaaggcgacggcgggggggctcgctcgtgattggtcggtggcggggaggccgcggacctggcaccttattggacgcgccagctccggtctaggggacacgggcttccaccgtgttagccaggctggtcttcagctcctgacctcgggtgatccacccgcctcggcctcccagggtgctgggattataggcgtgagccaccgtgcccagccaggctatgctgggtgtctttttgagatttaggaacctctcagaataaaatctggaagcctgttccatttgcattatgagatttgcattacaatgcaggctggggtgcagtggtgcaatcatggctcattgcagtctcccggctcctcggctcaagtgatcctcctgccccagcctcctgagtggcgggagctgcggacacacaaacacaggatactgccagaaactgggcaggaggctgtttgtgaatctcagaaggcacccggatcttgctctgctgttcctgctcaggctggagtgcagtggcgcaatcatggctcactgcgggcttgaccacccgggctcaagcagtcctcccgcctcagcctcttgtcgagatgtccacagaaggaggatttggtggtactagcagcagtgatgcccagcaaagcctacagtcgttctggcctcgggtcatggaagaaatccggaatttaacagtgaaagacttccgagtgcaggaactcccactggctcgtattaagaagattatgaaactggatgaagatgtgaagatgatcagtgcagaagcgcctgtactctttgccaaggcagcccagatttttatcacagagttgactcttcgagcctggattcacacagaagataacaagcgccggactctacagagaaatgatatcgccatggcaattacaaaatttgatcagtttgattttctcatcgatattgttccaagagatgaactgaaacctccaaagcgtcaggaggaggtgcgccagtctgtaactcctgccgagccagtccagtactatttcacgctggctcagcaacccaccgctgtccaagtccagggccagcagcaaggccagcagaccaccagctccacgaccaccatccagcctgggcagatcatcatcgcacagcctcagcagggacagaccatgcaggtgatgcagcagatcatcactaacacaggagagatccagcagatcccggtgcagctgaatgccggccagctgcagtatatccgcttagcccagcctgtatcaggcactcaagttgtgcagggacagatccagacacttgccaccaatgctcaacagattacacagacagaggtccagcaaggacagcagcagttcagccagttcacagatggacagcagctctaccagatccagcaagtcaccatgcctgcgggccaggacctcgcccagcccatgttcatccagtcagccaaccagccctccgacgggcaggccccccaggtgaccggcgactgagggcctgagctggcaaggccaaggacacccaacacaatttttgccatacagccccaggcaatgggcacagccttcctccccagaggacccggccgacctcagcgcctcctgcaggctaggacactggtgcactacaccccatgcctgggggccgagattctccagcagaaagatgcaatattttttgtttcctttttttccatttttttctctaaggaatcaatatttcaatatgttgagtgtgtgtccaatgctatgaaattaaaatattaaataac

SEQ ID NO: 992 - DNA, 1983 bp, Homo sapiens
caaatgccaattttctattttcaggggcaatatgtcctgaaccccatcaggatgaagccccagctccatgaagcccctcttgaactggtccatcctactgttccagtctcagctccctctgctccaggccttgaacttcacattccagcctggggactcctggcagttccctaaatatgcaaagagctcagctttctttcctggtcctggtcctggtcacttggccctctctgtctctcccttccttcttcccatctctcttcctttctggctcatgtccctcgcacatgctgtaaactcttcctggaacatctcccttccacctgtgaatctcttgccagctcacttcttttctccctttaagaatccacttctcaaaagaaaatggcaactctgtgaggtgatagaaatgctgattcgcttgatcattgtggcgtccacaatgtatatataaaacaagttgtacacattaccatgtataaatttgtgtttgtcgattatatgtcaagaaagacaaggaggtgtggaaagactgcacctctgtcaagacgcctttctgaccaccccccgaccctggttgacactccctgacatgagcccccgagtgtttacctacgctatgtgtatcagggcatcccgaccacttgctcactcacctgtctccccactgtgaggtcagcggcagggccttgttcagtgtcttagtcatatcccctccagcacccaccatgacctctggcactaagtaggggctcaataagccaatcattgtgttgatgtaccagtgacattgagggaagaccaagctcgccgacctctaagatcctgtccactctgagagtctgtgagtctgtatttctgctcccacagttagtcacggaggaagttgccaaagcagatgatgagacttctgtttggggttgcccaggtctgcctggcctttgcaatttgtaatcaggtcctttgaaagagaaactgaactgagagaaaaacacagtttggatgaggcaagagttgcaaaataatgagttatgtaatggtgatggtggcctgtggtagcatctttggccctgcccagatgatacaagactttgtatgtatacccttgagcatggccaaaaggacaattgtcaaaaccacggcttaagtgttcaaaagcctcttttcccataagatgttgcctcttgaggtcagactgaaatcctgtacctgtaataatttcctccttaggactggatgtacatgaaaagattggagatatatatgtaccttttttatatgccatgtaaatggtataacccttgcactctttggccattaacagccaattgtcaattagtttattgtgtattagatcaaactgtattgcccaggccagctcctgaagaactgtgaactatgaacatctcagcctagaaggataatgtgaccttcaatttgcacaccatccattgtctctttcaaactaagagcctctctaagctagataggccaaggattatttttttaacttttattttaggttcaggggtacatatacaggtttgttacataggtaacctcatgtcatgagggattttgtatagattatttggtgacccaggtactaaacctagtacccattagttgttttttctgctcctctccctcctctcaccctccaccctcagttagttcccagtgtgtgttgtttccccacatctatccatgtgttcttattatttagctcccacttataagtaagaacatgcagtgtttggttttctgttcccgattagtatgctgaggataatggcttccaattccatccatgtttctgcaaagaacatgctctcattctttaatatggctgcatagcgttccatggtgtgtatgtaccacattttctttatccagtctatcattgatggccattgtggttgattccatgtcttggctattgtgaatagtgctacaataaacataacatgtgcatgtgtcttt

SEQ ID NO: 993 - DNA, 2565 bp, Homo sapiens
cagacccctcctgcgaggccaggggctgtggccattgggagtttgtccccacggacccctcctcccccagagggcacgccagtcttgaagcaacatgagcagcccggagccccccacagagccccccgagcccgacaaccccacctggtcgactcagcccacgtatagcaaccttggtcagatccgtgcccacctgctgccctccaaggcctgccgcctccggacccctgggtccctctccaccaacccagagcccctgcccccacccctgcccaagaagatcctaacccggacccagtcactgcccacccgcaggaccctccatcccagctccatccaagtacagccgcctcggagaccctttctggggtcccacagtgtggacaagagccaggctgcagtgggaccagcctgtctccctgcagagctgacctttggcccggctgacgccccactgggcctctccctccgcgatctgcacagcccggaggctgtgcacactgcactggctgcgcggcagctgcagggcctccgtaccatctatgcccggctccgtgcccggctcatggggggccaccccgggccctgccaccccggccacagcttccgcctcctagacagctcaccctgcgcagagagcggggacgccctgtattaccgcgtggtgcgcgcgcacgaggacgcctggcacatcctggtcgccaaggtgcccaagcccggggcggacgtgccccacccgtggggcctggagctgcaggcctccctgtctccacacttcaatctgcaggggctgtgtggcctggtgcctgaaggcacactgcccggggcgccctggagaggcgcagtggcgctggcagccgaggttccagagcgcacggtggcgcagtggctggcggaggcctgcacgcagccgccggaggagttcgtgtgggctgtggccctgctgctgctgcagctgagcgcggccctgaagttcctggaggcgtggggcgcggccctagtcgagttgcggccggagaacttgctgctggtggcacctcggggctgtgcgacgacggggcccccacgcctgctcctcactgactttggccgcgtctgtctgcagccccctggacccccgggatccccgggcccccacgcgccgcagctgggcagcctcctccgagcgctgctcagccttgctgcgccctcgaccacgcctttggccgcgggcctggagctcctggcagcacagctgacccgcttgcggccctcggcgtcccggacgcggggcgcgctgcaggcgctgctctgggggcccgggcctgagctgcgcggccgcggagcaccgcttggtccctggctccgagcgctcgggccctggctgcgggtgcgccgcgggctgctggtcctgcgcctagcagagcgggccgcaggtggggaagctcccagcctcgaggactggctgtgttgcgaatacctggccgaggccaccgagtcctcgatgggccaggccctggcgctgctgtgggactgaccccaacccagggcgaacacacctggtccaggcctgcccaggaggcagggctggggctgaggtcagcgtctccatgatagccaagacaccctcttcctgcagagtccaggagcgcagcagagagagcaatgccccactccagagcctcccctcccgtgctggggatgtgggtcaagggcttcccaggaatgcagctgcccctccagggctgggggctggccagcgcctcctgtgttgggcagcagctctctgaagccagggcccccacgccacttccaggtgtggacaaccccgctgatcaatgtctctctgtgttctgccttccccagcagccagggcgctcttccgcgtgggttctgtcattgtctccatgagaggccaatgccgggaccagaggcattcctggctctggagcacccccttgtgctgaagatggccagtgattttgggcatgtgaatgcccctgtccctggtggagaattgcttggtggtgtcacgggaagggaaggctccctgggaccttagacacccagctcatctcagcggggtctggactcaccttccctaaaacagtccccgcggttccctgccacctcccctcaatccctctgcgcccaccctgcctccctccctgttcctccgtgacacaccaacttctttcgcgcccccaagcatttgtgtaggctgttccctctgccatactgttccagttccactttctttttctttttttttttttttttttttttgagacgatctcggcttactgcaagctccgcctcccgggttcacgccattctcctgcctcagcctcccgagtagctgggactacaggcgcccgccaccacgcccggctaattttttgtatttttagtagagacggggtttctccgtgttagccaggatggtctccatctcctgacctcgtgatccgtccgcctcggcctcccaaagtgctgggattacaggcgtgagccaccgcgcccggctacagtttcactttctctaaacaaataaaggtgcccactctgggccatcgctagctcctt

SEQ ID NO: 994 - DNA, 2586 bp, Homo sapiens
caaattccttatcatgaaacacaacctttgtggcctcgttgtctgccactcccctgtattcattgtcatcagcttgaactgctttcagttccccccaacgctgcttgctcactctctcagctccaggcctttgcacatgcagttccttgtgccctccacccttgccacgcaaatccctactgcctatctatccaactgtgaatcaccccacgtcagctgttcaggagacattcctggcccctcccctgtagactttgtggctccctctcttgtgcttcccacctgtacacacacctggactcttgtgcccttatcacgtccttagagcttttccacttgtgcatctcccgtgcccctacttgacagtgtgggaactagacccctgtctagttcacataccctcatcccatgagcattttgggcatccccagggtgtgtgactctcctgtgctagtggacaaggttagacaattaccattaccttttcgtcttttcccctcctccagctctgtgacttccctttgcccctaccacaccccatgtagctatcagttttgctggacacggccacacccatcaggcaccccatacctgctgggagtcacggacactcctatagcagcagtgctgtggggctgctggtccctgcattgccttatagagccgtggggcttcgccctacagatacatctaaattacaaataccagtccagcccagaatcagttcttgctgttgaacgcaactgtctctgggtcagcttgttgtgcctgttttccttcttcccttagaaagagttatttccttcagaacctttctacccctcatgaaaataggcttcccaaaggtctgcccaccagccaactagacagatgtggcctgcattgtccccctggaggcaaaggatgtgtgggtatttatttatttaaaatagtaagttatggccgggtgtggtggctcacgcctgtaatcccagcactttgggaggccgaggcgggtggatcacctgaagccaggagtttgagaccagcctggccaacatggtaaaccctgcctccactaaaaaatacaaaaattagctgggcatggtggtgcatgcctgtaatcccagctactcgggaggctgaggcaggagaatcgcttgaacccaggaggcggaggttgcagtgagccaagatcgtgccactgcactccagcctgggcaacagagcaagactccatctctaaaataaataaataaataaataaataaataaataaataaataaataagacaataaattatataagcagtgctgaatacagcttcatcatttaaaaatccaaacagtttggaaatatatagacaagtatataaatgctcttcttgcaccccttcccccatcctaaagcctaccatacaggtaggcactgttaattatttggtggaaatgtttacactttttgctttgcatttacacatgtgagtggcagggatagtatctgagaaattaatttttttctctcctgaattttctctttttctgccctcacatttatggagctcattacctccagagcagcttttcaggttagaaaactgaatttatcttcaggcatctctggcttttgtgtgctgaaagcttaagcatttagggcaactccaggatttgctgagtggctcatcaaaggatgaggattctcttgcacagactgaatgccttgactggaaacgatggaagaaggatttccttgggagtggaaaggaccccaacccttttagccctgtcctccccaggctggctgggggcaggactacaatcccagaaggaggcagtcatatggtagggctagccaggggtgtccagtcttttggcttccctgggccacattggaagaagaagcattgtctgggccacacctaaaatacactaacacaatagttgatgaacttaaaaaaaaaaaaacacacaaaaacatttcataatgttttaagaaagtttacaaatttgcattgggccacattcaaagctgtcctgggctgcatgcggcccacaggctgtgggttggacaaggttggactaggccgtgaagacacaggcaacctgatccaaggttcctggctgccccaagaggcacagagcagcagaggctgccagacctggcctctgctgacttcatcggcagcctcatgcctggcacttctgaatattctggagaattcagacatacctgaaattaagttttctattgtcaggattgaagcttaccataatcaatgagttgagttatagactaaaatttgatttcttgcacacctggatttgtgaatggagattcgttcctatggcttgtattatattactcatattctgccacttaaaaaaattaataagaaatcttgaaaaattttccacagcagcggaaatgaatgaatgagatagatttatcttattcaaaagatgaatattattattaaaaaaaaaatagaccgggcacggtggctcatgcctataatcccagtactttgggaggctgaggtgggcagatcacttgaggtcaggagttcaagaccagcctggccaacatagtgaaaccctgtcgctact

SEQ ID NO: 995 - DNA, 2204 bp, Homo sapiens
gtgactttatgctaaactgaactctgcactccccacaaaaatgagttagagagcatcataacacaagaaagttttaacataggtttattgccatctttggagacagagtacatgagctgtggtcataaagagggattgttacaagatagactggtcaggagaacaaagatgacttatctaatcctgactgcaacaaaggggcaattatgaaacaaggtattgcagttgcatcagtccttatttaactggtagcatgcccattacatgccttcttaaagaaaacaatacaatgatgctttctaatcaattaaatttggttttatttgtcagcctgttactatacaggattttgggaaaggtgttccactttcttttttttcttttttttttttttttgagatggggtctcactctcttgcccagacgactagagtgcagtggtgtgatctcagctcactacagcctcaaccttctcagtctcaggcaaccctcccacctcagccacccaaacataaggtataaggttggtgcaaaagtaattgcagtttttgccattacttttaatagctgggactactgacacgagccaccatgcccagctaatttttgaattttttgtagagacagtgtctcactatgttccccaggctggtctcgaactcatgggctcaagtggtccttgaggctcaagtgccctggcctcccaagttgctaggattacaggcattagccaccacacttggcccacattcttaaaatatctgtctaacattcctagaaaaattgcttgctaatgttaccatcatagttaagttaccaaaactgctttcaaactaaaggtttgaaaagggatcacttatttgatgtgttgcaattctgtgacagtttgctaagatctttttaacagagaactctaggacttttcagaattaaaaatgtctaggtttatttgatgattccacagagaaaataaatagccaaaaagacagcaggaaacatatctaactaaataaaggaaggagcatttgggagagaatgcctccaggcacaagtggcaggccaggtcccagcttgctgctttactgacatgcctgatgtccatcccagcaccagtaagagctgctacactctgggagtggcctgatgtcccacaggcgaggcaactagtagcagagctttgtctgttgctcacggtccacagagctgtggcagtgggcaccatagcttgagcttcttttcctctttggtgctttaagttaaacaagttcttgttgatggacagtgtcccacagtgagccttcaaaatgcttctccttagaaatttaaagtttgttttggaacatggttgctgaaagcctttggatatttgaaacaatattcatgctagtgttttaccaacaaacactggctacttatgtaaaacctgcaaaataaggattactaacattcattcatgtgtctgtgtgtcaggcctggagtatggtatttcacctgcattttctcatttattgtttacaaaacaataaagctcatggtatgttatgtatgttttgcaggtgagatgagataagaaactccggctaagaaaggttaatttgcctaatgtcacatagcaagaaagtgaaccctgattcagactcaggacaactgacccagggctcttatctactatgctaaaaaagccactcgttagcacacaccaacattggtaatatcataaaaatggcacaaacgtaaactacccagggataaacttaactgaaaaaatgcaggtgataatataaaatgttcagattcttattgtgggacataaaagacttaaacgaatggagaggtatactgtgttcctgatgaaagactcaaccatgtaaaaatggtcatcttaaattcaacccagtcatcttaaaaatccctatgcacatttcatctggaagaataactggttacaaatagccaggataattctaaaagaaggaaaaagtgaaattgtaagatggaataagggtggggacttcacagggagcgtgtcatgcttgatcaacaattaaaacagtgtacacttggaatcaaactagaattaacatttcatagcaagtgcattatttaataaatagtcttgggacaactgactaacatttggggggaaatttagagctcaacctcatgctttatactaaaatatactccaggtgagtttgagtgtt

SEQ ID NO: 996 - DNA, 2309 bp, Homo sapiens
ctttatcaggatgacacagtgacgataagcctggccaatatggcgagaccccatctccaccaaaaaataaaaaacaaaattagccaggcgtgctggcccgtgcctgtagtcccagctactcgggaagctgaaacaggaggatcagttgagcccaggaggcagaggctgcagtgagccaagatggcaccactgtgctccagcctgggcaacagagcaagaccctgtctcaaaaaacaaaaagaaaaagcaacagtaacaatggccatggccttcgggaaattgatcattctctcctgctgggggcgcagccatgaaggctcagccctggagtccccgctcaagcaagcctcagtttctccatctgtaaaaggtaccgccacccaccagaggctgtgatgacacccccatgacctgagcacaacagtccccagcatgggcctgcacaggggtggctgcgagccgggatcccacgcctgctggagggagtgggcctccctgctgggtgatcacgggctcctacctggtgaagggcgccgtggggctccgcagcctctgtctcagtttcagcagcatccacagggacctgcagcaccagagcccgagggaggatgccccggtggggagcaggagggttagctccacaacgctggccccggacatacagtctgggacaggtgctgcatctcggataaacggcctgccctctccctgcccccacagtcccacaccctcctggctgtgcctcatgctcccggggactcatctctaacacggccccgtcccacccgggacatcgtcctgcacttctgacgtggccatccagggcctggcccagcctctgcaaaccactggcaagtgctcaaaggaacatcaagccccgtgaggtgttcacagcctggcagggagtcctacacagaaaaggatgccaagaggcctgcagttggacaggcgtggggacgccgtttcccctccgggcctcagctgccttgtctgctctgtgtggaaaggtccaaatcagtgccatgccagcaccccctgcacacacaccccggacattggctggacctgtctggatgatcccctgggcccccagggctggcatctgcaggctgaggaaggggctacccagtgggcagcctctgtgctcccagcaggctctgcagccgtgcatggcacccacccgggccagtccaccaggcacctgcactctccagcctcggccgtggggtgtgccgggttgtgactgtgacagaatgggcagggcctggtcacaactcctctggccactgggtacccagggtgcaggatgcaggatagcgccagtggcacagcaggtgggagcctcctggggggctagggcaaaacactgattcctgggctccccagacccacagaatcagaagctctgggccaagcgcgatggctcacacctgtaatcccgggactttgggaggccaaggccggtggatcacctgaggtcaggagttcaagactagcctggccaacatggtgaacccctgtctctactaaaaatacaaaaattagctgggggtggtggtgggcgcctgtaatcccagctactcgggaggctgaggcaggagaatcacttgaccccgggaggtggaggttgcagtaagccaagatcgcaccactgcattccagcctgggcgacagaggaagactgtgtctcaagaaaagaatcagaagccctgggcgccggacccaggcatctccatttagcaacctcctggctgatgctccggcagccctgggccttagggcagatgtctggtcgtgatgagcacacatggaatgctctccacccactccccctgctcactgcaaatccagagaaatgatgaaaaaccacatgcccgaaacaagaatgccgcagcaggcggggcacacaggacttcgatggccgtgaaacaattccatttgattctgcaaggggggacacgtgtcagtgtccaaacccacaggatgcccaaaacctagcgtgaaccctaacgtgagctactcacttggggtgatgatggatccatggaggggcatcagttgtaacaaatgcaccatgtggatgctgccagtagtcggggaggctgtgtgtgggggtatatgggagctctctgaacgttatgctcaattttgccatgagcctaaaactgctctaaaaaaataaagtctgggccgggagtggtggctcacgcctataatcccagcacttagggaggccaaggcaagtggatcacctgagcccaggagttggagaccagtctgggcaacatggcaaaaccgtgtctctacag

SEQ ID NO: 997 - DNA, 2944 bp, Homo sapiens
tattgcagatgctacaattgatttgctgtttaccaaaaatagggaaacaaatgctgtacatgtaaatgtaggagctggctcatatttagaaattaatattccaatgacagttgaagaaaatggttacactcctgctattaagggacaactcttacatgtggatgccactaccagcatgcaatatcggacccttttagaagcagaaatgttagcattccacatcaatgccagctacccccgaatatggaacatgccgcagacatggcagtgtgaattagaggtttataaagccacttaccacttcatctttgcacagaaaaacttctttacagatttaattcaagactggtctagtgacagtcctccagacattttctcatttgttccatatacgtggaattttaaaatcatgtttcatcagtttgaaatgatttgggctgctaatcaacacaattggatcgactgttctactaaacaacaggaaaatgtgtatctggcagcctgtggagaaacactaaacattgatttttctttgccttttacggactttgttccagctacatgtaataccaagttctctttaagaggagaagatgttgatcttcatttgtttctaccagactgccaccctagtctggttgggttgaatgctggactgtcccaagtgtcatgcttacaattgattatacatggcatccaatttatccacaaaaagcagatggacagctgaaacaatcattatcagaaatggaagagacaatgctatctgtattaaggccatcccagaagacatcagacagagttgtttcttctccctctacttcttcacgcccacctattgatccctcagaacttccacctgataaacttcatgtagaaatggaactttctccagattctcagataactctctatggacctctactaaatgcctttttgtgtataaaggaaaactactttggggaagatgacatgtatatggattttgaagaggttatctcaagtcctgttttgtcactgtcaacatcatccagctctgggtggactgctgttggaatggaaaatgacaaaaaggaaaatgaaggttcagccaagtcaattcatccacttgccttgcgtccttgggatattactgtacttgttaatttgtacaaagttcatgggcgtcttcctgttcatggaactactgatggtcctgaatgccctacagctttcttggaaagactatgttttgaaatgaaaaaaggatttagggagaccatgctgcaacttatcctgtcacccctgaatgtgtttgtcagtgataactatcagcgaccccctgtggatgaagtactcagggaaggtcacatcaatttgtcaggtctccagctgagagcacacgctatgttctcagcagaaggtcttcctttgggaagcgattccttagaatacgcatggttaattgatgtgcaggctggaagtcttacagctaaggtcacagcaccacagctggcatgcctcttggagtggggacagacatttgtttttcatgtggtatgtcgggagtatgaactggaaagaccgaaatcagttataatatgtcagcatggaattgatcgtcggttctgtgaatccaagttgagttgtattcctgggccttgtccaacttcagatgatttgaaatatactatgattgtttagcagtagatggagccgatatttacattgttgagcatggttgtgctacaaatataaagatgggtgcaattcgagttgcaaactgtaatctccacaatcaatcggttggggaaggaatcagtgctgcaattcaggattttcaagtgagacagtacattgagcaattaaataattgcagaattggacttcagcctgcagtgctacggagggcctattggcttgaagctgggtcagccaatttaggacttattactgttgatattgctttagctgctgaccatcattctaaacatgaggcacaaagacatttcttagaaactcatgatgccagaactaagaggttgtggtttttatggccagatgatatcctgaagaataagaggtgtagaaacaaatgtggttgtctcggtggctgcagattctttggtggcacagtaactggcctagatttcttcaaacttgaagagttgacaccttccagtagctctgcattttcaagcacaagtgcagagtctgatatgtattatggacagtctctgctacagcctggagaatggataattactaaagaaattcccaaaattatagatggtaatgtgaatggcatgaagaggaaagaatgggaaaacaaatcagtgggaatagaagtagagagaaaaactcagcaccttagtcttcaagtaccattacgatctcatagttcatcctcttcctcagaagagaacagtagttctagtgctgcacagcctttgttggctggtgaaaaggaaagtccttcatctgttgctgatgaccatttggttcaaaaagagttcttgcatgggacaaaaagagatgatggccaagcaagtatccctacagaaatttcaggaaacagccctgtgtctcctaatactcaggataagtcagtaggtcaatctcctcttagatctcccttgaaacgacaagcctctgtctgttccacccgtcttggaagtactaagagtcttactgctgctttctatggggacaagcagcctgtaacagttggagtccagtttagtagtgatgtctctcgaagtgatgagaatgtactagactcaccaaagcagaggagaagttttggttcattcccatatacaccatcagcagactctaattcatttcatcagtatcgatcaatggattccagcatgtcaatggctgatagtgaagcctacttttctgctgctgaggaatttgagcccattagcagtgatgaaggccctggaacttatccgggtag

SEQ ID NO: 998 - DNA, 2169 bp, Homo sapiens
atttttatgccactcctgctgtcttggttcagtatgtccagggaattatcagaatttcttttctaaaataaaaatctgtttatgcttgcaattccttgacagttctcaattatctgcaaagtgcatccaaacttcttggcatagcatcaaagatctttctgtatgcctcttgcttccctttgcggcccctgccaccccactgcccacactgcattctagccgtgatgacaggcttgaattttcagttatgctcatgtctgtccatcattgtatttgttattcctctctttccaccaagttgtctgcctagagagctcattttccttaagaatttcttcacaaaccatctctactatgaagctcaagtgtgtcatgaagtgttagcttctccaacttgtgtttcttgcagacactctgtgcaagacattgacttaggtgctaaagagggaaagctagatattatattgttcttgaggttgaaagcttacagtctagtaggagagtcaactttgctgtctttacctcagtgtttttctccctctgtgcttccctagcacgtggtacttacatatttctggaatcttgattaaacacctgtttgaggactgtttgagcacaatccttctggattgtgacaccctcaagggagcagagatacaaagatggctttgtatactaaatgactggccctcatagatacctagtacatatttgtcaaataaatgaatgcattctatttttggaataattctattcagaatcagataaagtttactttaagctatgaagaaagaagtctcttagcaactcttacaataatcacaatcaaagaatgactgtttaacttaatataaaccagtttgttttaataaaatatttgacaatagtcatggttacacaatgcataaattatggctaaattattatcaggaaggaaaaatctttacttattatttcaaaagctattttgctagtctattaaaagctattagaactgcacttcttaagattaaattctataattgaacattttaactaaccaagatattatctctttgccactgacattatttcaaattaagcttaactatttctttttagcctttggaaagtattctgaaagagtctgtgttctataaatatacttaaagaggcatgtcttataaaggatttggatactattcaatgatgtatgacttggctttagcttttttattcttaatctctcagcttttctcttcagcaggggaagagtacctaatggcctttcagtaatcccttggtaaatttttctttcaagcccattacttactgtgaaggtcaacttcattagtgtatttatcttatttttttcagcccaaaataggtatattgaaatgaatgggcctaatgtcaaatgtcccgactacatcctggaagagagagaatcttcagctgtattagttgatgcagttaaataatatgtactctccaggccctcatacaattgaaagttcagggtatcgttgctgctctgcttctaatccttccagaagtgattggtgctaggtgatggagtaactattaattgatataatgtgagccaaaaccaacagtcacgaataagcaaaggatttaaatttaactccattaagtcttgtgagaaattattttcaacataggttataacatacctgtgacatcacatgaaatgctgtagtcaatttgacatcatggggcagagaagacagagttggaaatcagaattttatagacatctaatgtgataataacattagtagctgagatgcggtaagctctttgaccatgtttccagaatggataagacctggttgagatgaaaactttacactgtttttttatattaactatcttttactctttgcctgaaatgtccaactctagttgctcgtgattgcgtgggtcagtctccagaaggttggactttaatattacccgtcatcttttccaagacaaaattgtattcattctaactcttagccccaaattttcttttttaaccttaatatctaacatgattaggtttatggtaaattatatactcaaacagaagaagagactaatagcaagcaaaagtcttatattttcatttgttttcatccaaaaagtagaaaatattttccaaacattgggaaacattttagtcag

SEQ ID NO: 999 - DNA, 1914 bp, Homo sapiens
cttcggccttctatacctactgggcgggctcggatcccgtttccctggccccccacatctgtgattccctgctgaggcctctttaggctcagcagagacgttggaactgggctttccttgtggccccctttcctcgctccctgccctgggctgacgtcagttttatcttccttctccattcccttttgcctccttccccactcgctctcctcttaagatgtccaaattcttccttctcagccactttcaacccagagaaagcccgagtcccaaagcaacaggaagatgtgcgggggaccgcgagtgtggggacatcctgccgcctcgggcaactctgtcgtcccccacagggttcaggtgctcagaaaacagcagccactgagttcactgtttccgcaggccccgtattcccggccgtgctcagctgggcttgtggagtcgcgagcgggggcgctcctgcggcaccgcccctcctgggcagcccggcttccaggagagactcggcctcagtctccgaatggcaggggtctgggagaggatgtgatggcaaaggcctgcccctctcaggccgcctctagcaagttctctaccttgagagaagcgagtaggaggaggaaggaggccaggctgagccatctctgaggaatgtggctttggcaggacatccagtgctgccccgctcctccctcagtcccgcccagggccctggagccgggccgggctcctcctcctccaggggaagggctcggggcaggaatcccttccctttccccaccccagaagaagccccagagcgtagggatatgcgtacggcagaaagggagacagaaggcagggctagagaaagggaacaggagaaaagagcttcgacaagccaactgcccttcgctcaggccccagcggaaaggcgcagatacccggagacttcccagagagactcgacccaccaaaaagcgcaccgcggccgcgcagcccttccttcagctctggaacccagcgccccacacctcaaatgggagaactggtgacctctagtggcccatgaccagcctgcagggcctggggctggcggggattctctgacccaaactctcctgggctctaatgctgttcccctgcccaccctaccttctgccttcacactgctgaggggtccatagccgacaaggaagagctcatttctcatttgtcatgaccatctttaataaaaaataaattagttctgggtgggaaccatttcaggaggcagggagtggggctaggggctgggcggggtggtgggggagcggatgctcacatttctctttttcaccctctgcccagctgggccttgctctggagaggcagtctctttcctcctgccttcctgagtaaggcaggattggcagtggctgaccccagccctagctaattagggaggcaggggcagagatactaggcaaatgagaaggggtcagagacacagggcggcttagaagatgtgaggtctgaacatgagaaatgaggcttagggcacaaaactggagttggtggggagaccacactctaagtagctcagattagcaaggaactgcagacttgctttcctttccacctaggaaagtctcaaggaaacaggtcttgtccttctcagtctgtgtaacctctttttgaaaagtgatacacgtttgagcacacacatatccatgcagtcccaaaagcacacctgaggcatatgtgcacacacccatcacaccaccacatgggcctgaccacagccctgaaagtcactttgtgtcagtcaccttgccaccctctgtcacctggaggacatccctgctgagactgggacaggctggagagccagggggttcagagtgggccgatcaatgggtgaccgatggtggcacagaaaaccgtgaaggtgccccggac

SEQ ID NO: 1000 - DNA, 1807 bp, Homo sapiens
ataaggccacctccgcaggccaggacaacccagaagcaaaagagcagagctaccatgtcctcttggagcagacagcgaccaaaaagggtgaccctgtttgcagcacgatgtctgaagaagaggcggctcagatccccagatccagtgtgtgggagcaggaccagcagaacgtggtgcagcgtgtggtggctctgcccctggtcagggccacgtgcaccgcggtctgcgatgtttacagtgcagccaaggacaggcacccgctgctgggctccgcctgccgcctggctgagaactgcgtgtgcggcctgaccacccgtgccctggaccacgcccagccgctgctcgagcacctgcagccccagctggccactatgaacagcctcgcctgcaggggcctggacaagctggaagagaagcttccctttctccagcaaccttcggagacggtaccccggacgactagacatggggacctccagtgggggcaggccagattagaggcgggagggagggagggatggtgacaaccaggcttttagttaactcaagaaaaaacagccaggttaagataactgcaacgtgtgtgtgtgtgtgtgtgtgtgtgtgtgtgtgtgtgtgtgtgtatacatatatgtatatacgtatagtgtatatatgtatatatacgtataagtatatatgtatatatacgtatgagtatatatgtatatgtgtatatatacatgtatatatgtatatgtgtgtatatgtgtatatatgtatatgtatgtgtgtatacatatgtattgctagtaagggcagttaactccctcaacaccctctgtgagggaagggttttatcacccattttataggggaaactgaggcacggagccaggtagaagtccagggatctttgagtcccagccccagggaactagggtggcagaaatggagctggagtcccacggtgcctggagtgggggggcccttccttccaggtggtgacctcagccaaggacgtggtggccagcagtgtcacgggtgtggtggacctggcccggaggggccggcgctggagcgtggagctgaagcgctccgtgagccatgctgtggatgttgtactggaaaaatcagaggagctggtggatcacttcctgcccatgacggaggaagagctcggtgaggacgacaccctcaaccctaacccctgagtcctgccccgtccccatcccctgtggtacagatcagagaggtctgagactcacccaaggtcacacagcagatcagcaggaaacatacaactcaaaaccaggcctgtcctccctcccggtcacttccacggcccctcaacctgcatcccgccaggagtcagaacacccagaccctaagggcatatagggcttttagacttgaggtcccaaactggtggcccccaaatgcctgtgcagcgtgttttaaatattttcattctttgcatgcatttaacaaccagattttgcattacatgtcccgattcttggcttgttttgaaaaaccagacacactgccaggcacagtggctcacgcctgtaatctcagcactttgggaggccaaggtgggcagatcatgaggtcaggagttcgagcccagcctggccaacatagtgaaatcccgtctctactaaaaatacagaaaattggccaggcgtggtggcgtgtgcctgtattcccagatgctcgggaggctgaggcaggagaatcgcttgaacctgggaggtggaggttgcaatgagctgagatcgcgctattgcactccagcccaggccacagtgcgagactccgtttc

SEQ ID NO: 1001 - DNA, 2438 bp, Homo sapiens
gttttctatgtgcatttctctgaggagcggtggtggtgggcaccttttcagacgcctgtttgtcatttccatgctgtcttttgagagctgtctgttcaggtcttttacccatttttaattggattattagattgtctgctattgagcctgagctcctcatatattccagtgattaatccttgtcaggcggcggttctaagatacagtctcccatcccgtacccgcgggctgtccctgcggctgtactctgctcattcttccctttgctgtgtggaagctttgggcctggatgtgctgactttgccttttgcctcctttggaaaatacttagaccttccccgcgcagctgcgtccggtttcccggcgtggctacatccggttatgcgatgtcggatcttcctggtgtggccgcctcccgtcgcgcagcgtcagaaactcggatcttcgcggcgtggccgcctcccgacacgcggcgtcagaaactcggatcttcctggcgtggccgcctcccgtcgcgcggcgtcagaaactcggatcttcgcggcgtggccacctcccgacacgcggcatcagaaactcggctcttcgcggcgtggccgcctcccgtcacgcggcgtcagaaactcgcatcttcccggcgtggccgcctcccgtcacgcggcgtcagaaactcgcatcttcccggcgtggccgcctcccgtcacgcggcgtcagaaactcgcatcttcctggtgtggccgcctcccgtcacgcggcgtcagaaactcggatcttcccggcgtggccgcgtcccgtcacgcggcgtcagaaactcgcatcttcctggtgtggccgcctcccgtcacgcggcgtcagaaactcggatcttcccggcgtggccgcgtcccgttacgcagcgtcagaaactcgatattcctggcgtggccgcctcccgtcacgcagcgtcagaaactcgatcttcctggcgtggccgcctcccgtcacgcagcgtcagaaactcgatcttcctggcgtggccgcctcccgtcacgcagcgtcagaaactcggtcttcctgccatggccacctcccatccggcggcatcagaaactcggaccttcctggcgtggccgcgtcccctcacacagcgtcagaaactcgatcttcctggcgtggccacctcccctccggcggcatcagaaactcggatcgtcctggggtggctgctcttgttacgcaacgtcagaaactctcctgcgtgggcaccaggctcagaagagtccggcttgtggtggcagggccaagctttggctcattgtgattttttgtgtgagagcttgacttgtatcctcggccacaaaccctgtcggttgttctgggagtgagggacttgggccgttcactttcacgccgtgctctgccagatcccgcgtccgcacagccaggaggtcctcaaagagggcagcgggctgttcccagatctcctggtgagggagacggaggccgtcatccacaagcaccgctcggccacctactgcgagcagctcctgcagcatgtgcaggccgtgccagccacacagtgaccacgctggtttcagccacggcacacccttgtccccacctgagccagagtttgtggcctttaaatctcataaacaaggcacctctgtgccagcagtgagactgtgacagcaagaatgtactcctcaggacacctgcccgctctttccctggaataacagcctctgagtggattctgcatgttatgtgatttgttctgttcatcgagagggctcccaaacatctgcagctgatttgaaattaaaaatgtgcctggttccccttcaccttctgccatgattggaagtttcctgaggcctccccacccatggagaactggtacatacagcctcaaacaggtggattttacaaccaagcgggaggattttgcccacaggaagaccttggaggtggctgccatccagatggctcgggcagcccagctgacctgctgcagaggccttcctggagggtctcgggcatcggggtgtccacactgcatcctggacaagagtgagcctccgtctctgggagacacgctgagtgggagccacacgtgtaccctggaggaaggccttctgtgttactcagctctcgcattgctgtaaagaaagacctggccaggcgcagtggcccatgcctgtaatcccagcactttgggaggccgaggtgggtgaatcacaaggtcaggagtttgagaccagcctgactgacatggtgaaaccctgtctctactaaaaatacaaaaattggccgggcatggtggtgcgcacctgtagtcccagctactcaggaggctgaggcaggagaattgcttgaatctgggaggtggaggttgcagtgagccgagattgcgccgccacactccagcctgagtgacagagtgagactctgtctcc

SEQ ID NO: 1002 - DNA, 2841 bp, Homo sapiens
gcattgaagcccccagctggcagggagactgctgtgaatggacagggtgagctcatccccttgaagaacattgagggagaattgtcaagtgctattcacatgaccaaggatgccaccaaggaggctctacatgccaccatggacctcaccaaggaagctgtgtccctgactaaggatgccttcagtttgggcagagatcgaatgacctccaccatgcacaagatgttgtccctgcccccagccaaggagcccatggccaagacagatgagggggtggcagccccagtgagtggaggtgctgcacgactccgatttttctccatgaagaggacggtatctcaacagtcatttgatggtgtctcattggatagcagtggccctgaagaccggatttcagtggacagtgatggcagtgatagctttgtgatgctcttggagtctgagtctggtccagaatctgttccaccaggatctctttcaaatgtctcagataatgctggtgttcaagggagccctcttgtgaataattatggccaggggtcaccagcagccaacagttcagtttcacccagtggagaagacctcatctttcacccggtctcagttctggtcctgaaggtgaatgaggtgtcttttgggattgaggtacgtggtgaggacctgactgtggccctgcaagcagaggaactgaccctccagcagctgggcaccgtgggactctggcagttcctgcatggacagtgcccaggtacatgctttcaggaatcctcaactttgaagactggccacatcaggccagctgtgggccttcgctttgaggtggggcctggagcagctgttcattcccccctggcctcacaaaatggcttcctacatttattgcttcatggctgtgacctcgagctgctcacttcagtgctcagtggcctggggcccttcttggaggatgaggagatcccggtggtagtccccatgcagattgagcttctgaactccagcatcaccctaaaggatgatatcccccccatctatccaacatctccaggccccatccccatcactctggccatggaacatgttgtgctgaagaggagtgatgatggtgtgttccacataggcgctgctgctcaggacaaaccatcagctgaagtacttaaaagtgagaagagacagcccccaaaagaacaggtgtttttggtgcccacaggagaggtttttgaacagcaggtgaaagaactgcctatcctacaaaaagaacttatagaaactaaacaagccttggccaatgccaaccatgataaagaaaaacttcttcaggagattaggaaatataaccccttctttgagctctgaaaccagtggctcagccatctgtgccaaggagagaggctatcaccagcaatagcaccacctaggacagagggcactgtccagtgctgaataagtcactacggatgccagagggactggggagcactcacttcacttgtgtgggtgtgctttccactagctgttcttacttggactgaggacaagggcaaagcatgattgtatcccaggaaactggggcttgccctgtgtgtggcacaagcatcatgtcttgcctgtataaagccttttggtcctctgtgtactaggtggaatcttctcaacactgtagggccatttcacctcatggtttcatggcagggacatttgcttccttcacaggcctgtgtgaacaagcaaaagtacccacctcctcggtcacccacagagccaccaaagattccatgtcccagagcttcccatagcagacctgaaaagtccatgacctgagctttggccatggtagtggagtggaacaggaaatagtccagcagaggagtgtgggggaagggggcaggagaggcacaagaataagggagacctggactctgcctttttgggaaaaggaaccaagctcatagcaatttggctgataacacaatcagatttttccaggttaagcttcctttctgttatactttcatcattgtgatgctgtggtagaaagtaaataacagtagtggctcagtcatttaatctttcccctctataatacaacttacttgaaatttaaatcaagaaaaaatttctgacgctgagctaggttggtggcatgatatgccaggggtcagtgggggagcttgcttcttagccccctgttgtccgcctggagtcctgcttgtctttcccagctgtgctgagtggctcttctgtctccctggggtccctggcacatctgctttcccagctctgtgaccttaccagttctctcctcagcccttggtggtttgggagctgaatatatgttttaaacttttacataaacaactcaacctgttgcctctcacttccctccatcactgtggcttttaaaactcatgtattttgactcaagtgaaaaaaacacaaaaatccctcatcccagctaggttttgccccctgccctataagagagctatttccccctttctttcctttgaattcttctccaacaccatcccttcattcatactgccctgtgatacacttgaagctgtgttgattggacagacgttcatcagctaacttacctttacttggcaagatggtaaaatagtaacttagtgatgttactaaagtctcgaccattcacctttccatactgaaggaaaggtaaaaaggtttcttctatgggaaattatgcttgacttgcatactctagtttgatgaggataaaaagaaacatgtaattgcagtggtgtttacaactaattgatcacaaccaatcatagatttctttgttccttctccactctcaacacttcatttgactag

SEQ ID NO: 1003 - DNA, 2406 bp, Homo sapiens
ctcgcgatagccagccgcggctgcccttgcgcttcccgagctggcggggtccgtggtgcgggatcgagattgcgggctatggcgccgaaggtttttcgtcagtactgggatatccccgatggcaccgattgccaccgcaaagcctacagcaccaccagtattgccagcgtcgctggcctgaccgccgctgcctacagagtcacactcaatcctccgggcaccttccttgaaggagtggctaaggttggacaatacacgttcactgcagctgctgtcggggccgtgtttggcctcaccacctgcatcagcgcccatgtccgcgagaagcccgacgaccccctgaactacttcctcggtggctgcgccggaggcctgactctgggagcacgcaagacaggatctcactgtgttgtgcaggctggtctcaaactcctggcctcgagcagtcctcacacctcagcctcccagagtgctgggattataggcatgagccactgtgtacagagattctgggtcccttcttccagcgcctgcctcgaagtcctctctggagagggcacagatgtccacgcgtgttccagcacaaggggggcatgcaacagctcagggtcacgtccacttccggagctgggtgcccgggcctcgggctccctgagaaagggcggacacacccaccccgcacccagaggggcaggggccctgacacctgtccaagccctaatagagtcattgttaaacgctctgggttcgaaccccagaacttgattctttccttgttctgtcctcagaggacggcagcacccaggcctcagctttcccacctggtaaatgggaataagggcccctcagagatgccccacaaagaaagacgattccacctccctgcaggcatcccatccactcacgggcatcgcatccactcaagggcaccggcctctgtctctactgcagccggcagggggcagcgcccaccacagcacggcctgctgggcagtgtggacccgggcggtcatccccaggcccccagccccgcggtgaccacaggcgtcagattccatcccttcctccgcactccaggccttgtctgtccctcatcccccttccttcccatgcatcctgcccacagcagccgggaagtgatggcttctaggaatgggcaatacagccccaaacctccagccaaggacaccgaaggctggacaggagaaaagactagtccacgtccccacgacggtcaccctcagccctgcaccatggccacttctgggactggttccacgcaggcctccgccccctgcaagcccttccccagccctccaggcccgtgtgcggcccaaaccctgtaccagatctcttagccctcttccacggatgcacgcgctgaggccctccctgggtagtggagcttgaaatttaaaggccgcacgccccttcgcacctcccagccccaggtgcctccctgtgttcaagggagccgacggctcagaccaggagctgtgctcgccgcccacccagcccattccgggctagccgccagggttggcgcaggcctgccaggcgcccccacctcgcctgcaggacgggccccccagaatggaacacgagggggtggtctcttgctgggctccagggaaccccaaagccgaggccccccggcccataaacatttactaggttgtggagggctgacgtcactcccaccccacacacaagagggcccccgtctggaacatcggtcccagcaggctccctgaggggctgtgggggacccttcctgagtttaccttgaacttcatggagcccttcccagccccaggcagtcagggctggaactgaggaggggcagagcctccctggggagctaggagggcttcctagaggaggaggcggcacagcagagagggcccaaggatgaagaggcttttccatgtgtacccagcgggagggtggtccaggcagagcacacagcaacagcagaggcctgctgtgagggagagcagtgggcgatcaggggcctcctggtccaggagaggtgcctgggggctgcagggcacacacttgcttcccgagaatccatccctggagacacatccccagcagagacaaggctccaagaacaccggcctggccctgcgccgtggctcaggcctgtaatcccagtactttgggaggccgaggctgggggatcacttgaggtcaggagtttcagaccaccctggccaacacagtgaaaccctgtctctactatacaaaaataagccaggtgtggtggcaggcacctgtaatcccagctacttgggaggctgaggcatgagaatcccttgaacctgggaggtggaggttgcagtgagccgagatcatgtcactgtactccagcctgggagacagtgagcaagactttgtatc

SEQ ID NO: 1004 - DNA, 2988 bp, Homo sapiens
gtgctagcaaccagcgagactccgtgggcgtaggaccctccgagccaggaccccaaattacgtgaacttttggatgtggggaacatcgggcgcctggagcagcgcatgatcacagtggtgtatgggcctgacctcgtgaacatctcccatttgaatctcgtggctttccaagaagaagtggccaaggaatggacaaatgaggttttcagtttggcaacaaacctgctggcccaaaacatgtccagggatgcatttctggaaaaagcctatactaaacttaagctgcaagtcactccagaagggcgtattcctctcaaaaacatatatcgcttgttttcagcagatcggaagcgagttggaactgctttagaggcttgtagtcttccatcttcaaggaatgattcaatacctcaagaagatttcactccagaagtgtacagagttttcctcaacaacctttgccctcgacctgaaattgataacatcttttcagaatttggtgcaaaaagcaaaccatatcttaccgttgatcagatgatggattttatcaaccttaagcagcgagatcctcggcttaatgaaatactttatccacctctaaaacaagagcaagtccaagtattgattgagaagtatgaacccaacaacagcctcgccagaaaaggacaaatatcagtggatgggttcatgcgctatctgagtggagaagaaaacggagtcgtttcacctgagaaactggatttgaatgaagacatgtctcagcccctttctcactatttcattaattcctcgcacaacacctacctcacagctggccaactggctggaaactcctctgttgagatgtatcgccaagtgctcctgtctggttgtcgctgtgtggagctggactgctggaagggacggactgcagaagaggaacctgtcatcacccatggcttcaccatgacaactgaaatatctttcaaggaagtgatagaagcaattgcggagtgtgcatttaagacttcaccttttccaattctcctttcgtttgagaaccatgtggattccccaaagcagcaagccaagatggcggagtactgccgactgatctttggggatgcccttctcatggagcccctggaaaaatatccactggaatctggagttcctcttccaagccctatggatttaatgtataaaattttggtgaaaaataagaagaaatcacacaagtcatcagaaggaagcggcaaaaagaagctctcagaacaagcctccaacacctacagtgactcctccagcatgttcgagccctcatccccaggagccggagaagctgatacggaaagtgacgacgacgatgatgatgatgactgtaaaaaatcttcaatggatgaggggactgctggaagtgaggctatggccacagaagaaatgtctaatctggtgaactatattcagccagtcaagtttgagtcatttgaaatttcaaaaaaaagaaataaaagttttgaaatgtcttccttcgtggaaaccaaaggacttgaacaactcaccaagtctccagtggaatttgtagaatataacaaaatgcagcttagcaggatatatccaaaaggaacacgtgtggattcatccaactatatgcctcagctcttctggaatgcaggttgtcagatggtggcacttaatttccagacaatggacctggctatgcaaataaatatggggatgtatgaatacaacgggaagagtggctacagattgaagccagagttcatgaggaggcctgacaagcattttgatccatttactgaaggcatcgtagatgggatagtggcaaacactttgtctgttaagattatttcaggtcagtttctttctgataagaaagttgggacttacgtggaagtagatatgtttggtttgcctgtggatacaaggaggaaggcatttaagaccaaaacatcccaaggaaatgctgtgaatcctgtctgggaagaagaacctattgtgttcaaaaaggtggttcttcctactctggcctgtttgagaatagcagtttatgaagaaggaggtaaattcattggccaccgtatcttgccagtgcaagccattcggccaggctatcactatatctgtctaaggaatgaaaggaaccagcctctgacgctgcctgctgtctttgtctacatagaagtgaaagactatgtgccagacacatatgcagatgtcatcgaagctttatcaaacccaatccgatatgtgaacctgatggaacagagagctaagcaattggctgctttgacactggaagatgaagaagaagtaaagaaagaggctgatcctggagaaacaccatcagaggctccaagtgaagcaagaacgactccagcagaaaatggggtgaatcacactacaaccctgacacccaagccaccctcccaggctctccacagccagccagctccaggttctgtaaaggcacctgccaaaacagaagatcttattcagagtgtcttaacagaagtggaagcacagaccatcgaagaactaaagcaacagaaatcgtttgtgaaacttcaaaagaaacactacaaagaaatgaaagacctggttaagagacaccacaagaaaaccactgaccttatcaaagaacacactaccaagtataatgaaattcagaatgactacttgagaaggagagccgctttggaaaagtccgccaaaaaggacagtaagaaaaaatcggaacccagcagccctgatcatggttcatcaacgattgagcaagacctcgctgccctggatgctgaaatgacccaaaagttaatagacttgaaggacaaacaacagcagcagctgcttaatcttcggcaagaacagtattatagtgaaaaataccagaagcgagaacatattaaactgcttattcaaaagttgacggatgtcgcagaagagtgtcagaacaatcagttaaagaagctcaaagaaatctgtgag

SEQ ID NO: 1005 - DNA, 2583 bp, Homo sapiens
aaaatggagcgccgggcgtaaggcaaagcctggcaccgtctgcgcggccgctatctgctcccggagcgtgagtgcggggtgtggggcgtgcgcgtgcgcgctcagagggggctcaaggcgagcgcgccgggcagttgcgggcgcgtggctgctgaggttggcggcggtgccgcgcgcccgacgggccggtggttgcggggcctcccgcctcgacccgggctgggggcagccgtggcggccgccggggaccgcaaggggcggaggaaaggagggggccggtcccggcacgcagaggagcagccgaccatgccccgagacaacatggcctccttgatccaacggatcgcccgccaggcttgcctcaccttccggggcagctggggcggccgcggcgcttccgatcgcgacgcggcttctggcgcggaggcgccgatgcagccgggcttccccgagaacctgagcaagctgaagagcctcctgacccagctccgcgccgaggacttgaacatcgccccgcgcaaggccacactgcagccgctgccgcccaacctgccgccagtcacctacatgcacatctacgagacggacggcttcagcctgggcgtgttcctgctcaagagcggcacgtccatcccgctgcacgaccacccgggcatgcacggcatgctcaaggtgctgtacggcaccgtgcgcatcagctgcatggacaagctagacgcgggcggcgggcaacggccgcgggccttgccgcccgagcagcagttcgagccgccgctgcagccccgggagcgagaagccgtgcggccgggcgtgctgcgttcgcgggccgagtacaccgaggccagcggcccctgcatcctcacaccgcaccgggacaacctgcaccagatcgacgccgtggaagggcctgccgccttcctggacatcctggccccgccctacgacccggacgatggccgggactgccactattaccgggtgctggagccggtcaggcccaaggaggcctccagctcggcctgtgacctgcctcgagaggtgtggctcctggagaccccacaggccgatgacttctggtgcgagggagaaccctatccaggtcccaaggtcttcccttgaagccactggcgcccaggagcggtgggccgaagacgtgccctaccctaccacaagggctgtgtctctaccccctagcctgggcgttggatctactggaatgagcagcagccgcttcctcggcagccttgggaagcacgggcgactggacagcagccgccgggcacggttatgggggcggggtgggcggggaggctagattgtttcctggtactgtcactgccactggggctttgatttggaggaatggggcaggggactatctgaagcgcttccatcctaaagccataatgaaaatatcttcctctcttccccattctatacaaaatactaagtggttttcttgctcccactccctaccccttagttaaatagggtttattttccactcatgcccttatgcctttttttcttatagttttttaacttattgactgtgcatgacccagtggtttgaattgtttttagttcaagtcattggtaaaaactaggtttaaggagatgagctactgtttaaagtgagctggcctgcctaattaattccttgtgaaaactaaatgattttttcagtttggggatcattctcacaacataactatgcatgtagaggacaagatttattttctttcctccctttgcccagtagccacatctggtttactcaggcagcatctactaagaaattcagcacctgcatatctctgtgacatggtcacttagagcttatcttccctatgaatctccagatctgtgagtcgagcagatttcatgttgcagattcacctttaatgcaaagactgtattatcctcacatgactttttttcttgtcttactgtaccttaaaaggtgatagagtaattctgtattttctaacgggaagattcaaaggagctgaatgtgttatgcttccaaacaactgaatgtaaaacactcctagccagttgttgcattccctatatttatttacttccaatattttactgtaaaagtagggagaaatattatgttgatagttgtttcatattctctcaggaactttaatgttcccgactcgggtgattccagctgtgttgctggcagtgttgtctcaaccctctccctaaaatgactgagccctgggttcatctaatgtggttttccttaggaagagatagaaggcacagaagatcacagctagagaattgagaattaactatactactagccattttagggcaccaaaacttgggattaaacacttcctacttcccactcccaactcctgaaatgaagtcttgctatctgtgactagttttatttttgtgcttttaatagtccgagcagtcttaccttgtttacacatgtattgacaccatttgcttcaggccatggagcactgtttctccctttttactatttataggattccgttttttcacaagacttttaataaaaagaaattgtagaaataaacacattaaaatttg

SEQ ID NO: 1006 - DNA, 3089 bp, Homo sapiens
agcgcgagtgacggtgcgccctccgggctccggagcggcggcgccgaacaatccccggcagggctcgcctcgccggtgacatcactcctgaagatactcctcgctcccagcgcctgccttccccaggcgtccgttcgtgtgcccgtctccgcctttccgcctcggaagagcgctcatcactggctggggacagagccgggcaccaaggagcgacaggatcccgaagagagagagagaaggcagcgagggaaggaggaccccggcaggcagcagcatgaaattcagcccagcgcactacctgctgcctctcctgcctgcgctggtcctcagcaccagacaggactatgaagagctagaaaagcagctgaaagaagtctttaaggagcgaagcaccattcttcgtcagctgacaaagacatcaagagaacttgatggaattaaagtcaatcttcagtccttaaaaaacgatgagcagtctgccaaaactgatgttcagaaacttctggaattaggacagaaacaaagagaagaaatgaagtctcttcaggaggccctgcaaaatcagcttaaggagacatcagagaaagcagaaaaacaccaggctactattaattttttaaagactgaagttgaaagaaagagcaaaatgatccgagacctccagaatgaggtgatacaaatttaattctattgctcttatgatgaaaatacaactgcagtgaaatggcaagcatctcttcagttacactgctttacattatcactctacgtttattcatggaaggaactcaaatgttaaaaagttataaatagctgagaaacgttcaaaaatgaggttggccaatgcagtgagaaaagaaatacaaattagaacaaaagaatactatttcccctaaaattgacaaaagtctacttaaccgacagtatctaatgtgagctagagtgtgatgaagcatacccttgtcaactttggtgataaggcaatttagcatttccacaaaaattttaagtgaaaatatcattagtcatagcaattctacttctctaatacaattataaggaagccatatcacaaacatatggagatatatacatactgacatgtacatatacacatacacatatatacactatgttacatacacccacattcattatatcattatgaaattaaagaacaactggaaaacaccttttggttcctaataagggaagatttaaatactttactataaagctatattattatactttatgcgaaaatcaaaaggaagatatattctatatttctagcaagaaaagaaagttcacatatgttgttgattgaagaaaaggaagttccaggctaataaaggtgacgggcttccctctttgataagtcctatgtgtcctatctatctcgacagaattctatcaggaataacactgtacttgttccacagaaattgtttgataagcttgtctggaatagaatctgagttaaatgtgccattgttcttccccagataactttttggagtctccatagatcatacaaagagagaacagagaaacaaggcaacaaattgggatacgctgcaacactctgcactgaacatctgacttcaattagccaaccctcaatttccaatacaaaaatcacaaaaggattactaagggagaatttataatggaaaagaggtgaaaaatggcttctttgctttgattatcagcagggtgtccagtacagtaggtatagctggcatgggactggtagtgcaggctggctcttggaaaggagtatgtattccaggctggttggctgctgttccactgggagctgaagccagggctcatggtcactcgtgacttactagtttgataggctctcactgtggagctagactcgtttgcttgttatttcttaagaatctctgtatctttctccttttttaccttctgtggttgtgatctgtgaggaaaaatgtgtatttctcccagattcagcctatatttatcctgatgtggctgtgaactggaccatctgctataggaaggagcacctgaagacttgttggctgaagttctctgtctggcctcgaaagacattcaaattagccaccactggagtagatgacctaaaagttcttacaactctcaattatacccagtgatgtctcgattagcacttattataaaaattaaaatttataattcaacatttataccatccagaaaaagttaaaatatattaatagcctatttctcttcaataaagcgtatatataactctatttgttaatgtttctattctccataacattctgtttatagataagccctatgctatttctagtcaagtgctaatctcttgaatgaagctgaattaggtagtcaactactagatgtatcctgaaaaacaagtaatgtgtatatttcatttattttatacataagagctacagactgttgtcacaatcttttcaagggctattaaattcattattttaactaacatttttgaacatctgtcttatgttgttaattgaggacatttctgaatgtataacaacataagaataatagtttttaaacttcaaagagatgacaggttaatgagtaaaggagaaatatgaaatatcacagaattccttgacactaaatgatgttttgcaaatactgaacagaatgatgtttgtaaactttccactggttttcaagagtcccaaaacattaggaaaatgtacatcacctaactttgtcacatatttataattgtttttcctttttgtttccaagaagcacaatgtagaccaagaggtagaaaaaatatttttaaagatacatgtctaagatgttcagcttttgtcaaatgaagcaatagtcacaataatgtcacagagacaatggattgccagcttaatcctcagcaataacataatactcattatcaggcatttattcatttattcgttcatgaatgctattcattcacattcattaaataataactacaagttgaataatgttttcagcactggacacacagaaaaatcagacagattcgattttttgtttagatgaagaagaaggaacagaatataaacagc

SEQ ID NO: 1007 - DNA, 2315 bp, Homo sapiens
ctgtgacccggaggcgctggggctgtcctgggtcgtcatgcgagaaatcgtctcaccccagccagtgtgacggaatgagagcaaaagaaagttttgatagcagcgtacgatttatattcagctgtatgctgggcaggtccaacttggcatttcttggctgtatctctgaaggaaagtcatcttaatctctatgagcctccatttcctcagctgtaaaatgggaagatcttcctcacactgctgtggcccagaaccatatcctgctccacaagcctcgtccttggcaagaagttgcacctgcccagagagaaaaccttttgaaactggcacaaaggcactggagagactggcagggccccctacttgacgatctggctcatccatctgcacactgaccacgctaagagctgtctgcagtgatggaaaccttctctagctgtgctgtcctctatagtggcaccagctgcctgtggctactgagcacttcaactgtggctgcagagactatgttaaattgtatttaatcataattaatttaattgtaaacaactacatgtggctagtggtttctgtactgggcactgcaggtgcacatttcctgctggccatggacagtaagctccataagagactaattgtgcctggtttgcttataggcttatcctcagcacctgcaccagcctagaatatgattggcactctattaattaaaagttcccaggtaaatgaattagtggattctctgtttcctccactatgccacaacctccttaagggcagagatggtgtcttcaaaaaaaaaaaattctggtcaaaaacacataagatctaccaccttcaccattgttgtgtccagttcagtagtattaactacacttacattgtgatacaacaaaagattgtgtctttttacattcttaggacccagcacagtgtctggcacataatcttagtaaacactggcagagcacatgcctttgccaaggccagaacagaggttcagtgccatccattaccaccctttcacacatccactggggctttaaaaacaacctggaatgaaagctgttgagtctagagaaatgggctacaaagaaggtttacaagataatctattaagaatagggaatacaggccgggcacggtggctcacacctgtaatcccagcactttgggaggctgaggtgggtggatcatttgaggtcaggagttcgagaccagcctggccaatgtggtgaaatcctgtctctaccaaaaattatccaggcatggtggtgcgtgcctgtagtcccagctacttgggaggctgaggcatgagcatcgcttgaacccgggaggcagaggttgcagtgagccgagatcgcgccactacaccccagcctgggtgacagagcaagactccgtctcaaaaaaataaaaaaacctaaaataaagcttaatacacatgacatatggattggcagtcacacataaatatgattgataaggatacaaatatttggaggtgctgcctgaccatctgttgctgattatgtggagatcacttgtctaggaccctgagatagactgatgtttctaactctgccacacacggtctctcccaccctccagacactttcttccttcagttcagggaaccctcaatacacagtaagaatgaagaggttgcaggtctgagcttgaggaggactggactaaaaggagtttagccctgccagggcattccgaggactgtgaagatccggaatattggccacaggcatctatgtatttgaatcatatccatttttgagctcactcctagcagaggagtcaaaacttacgttctggcccccaggtacatttccagtctcttactcataaaattgtgacatacccccaggggtgcccaaaggggtttgtgaatcaagatagtttgaggagaatcgattttctgatcctcagtttttctatgctctttttcctaaaagcgatattcctaaaaaggcatccaagacaaggcatcccctttcccatttgctggggaagacagctttacaagagaaagctgcccctctcacccatgtgaccccccactctggggcactgccctaggggtagaaatctccaaggcatcaaacaaagtgactcctgggggtcaagtgacagaggagcaagtctttctgcaagtcaagtggtttccagctctgctttcagcaaaattgaaagaggcactaatcaaattgccagcggatcataaaaaaacattttgataataatgttattaggcatataacttggaagaagttcaaagaattgaatggcatcctcataac

SEQ ID NO: 1008 - DNA, 3346 bp, Homo sapiens
ttaccagtatcaagagtagaatgcatgttaaagctgccatccctggatttggtgttttcttcaaaccgaggagaactggagactttagggactacatatcctgcagagactttatcccctggaggtaatgctactcagagtggaacaaagacttctgctagcaaaactggaataccaggttcatcgggattaggcagccctcttggccgaagtcgacatagtagtagtcagtcagacctgaccagttccagcagtagttcatctggcttgagcttcactgcatgcatgtctgacttttccctttatgtatttcatccatatggagcagggaaacaaaaaactgctgtttctggcctcacacctggatcaggaggattagggaatgtggatgaggagcccacttcagtcactggtcgaaaagattcactcagtataaaccttgagtttgtaaaagtgagtttgtcacggatcaggcgttcaggaggtgcctcattttttgaaagtcagtctgtaagcaagtctgcaagcaaaatggatactacgttaataaatatatctgctgtttgtgatatagggtctgcctccttttaatatgatatgcgccgactcagtgaaattctggcatttccaagagcatggtatagaagaagtattgcaagacgtctattccttggagaccaaactataaatttgccaacatctggcccagggacacctgattccattgaaggggtaagccaacacctttcccctgaatcatcaagaaaagcttactgcaagacctgggagcagccaagtcagtcagcctccttcacccacatgcctcagtcacctaatgtgttcaatgagcatatgacaaacagcaccatgtcaccagggacagtaggacagagcctaaaatccccagcttccataagatcaaggagtgtatctgattcttcagttcctcgaagagattcactttcaaaaacatcaactccttttaacaaatcaaacaaagcagcaagccaacaagggaccccatgggaaacacttgtcgtgtttgctatcaacttgaagcaattaaacgttcaaatgaaatgagtaatgtaatgggaaatacaacttggacaactagtggtttgaagagccagggccgtctgtcagtaggaagtaatcgtgatcgagagatcagcatgtctgttggtctgggaagatcacaattagattctaaaggaggagtagttggagggaccatagatgtcaatgctttggagatggttgctcatatttctgaacatccaaatcagcaacccagtcacaaaattcagattactatgggttctactgaagctcgtgttgattacatgggctcaagtatcctcatgggcatcttcagtaatgctgatcttaagcttcaggatgaatggaaagtaaacttgtataatacattggattcaagcataactgataaaagtgagattttcgtccatggagatttgaagtgggatattttccaagtaatgatatcaaggtcaaccacaccagatctgataaaaataggaatgaagctccaggaatttttcacacaacaatttgataccagcaaacgagctctgtctacctggggaccagttccttaccttccgccaaagacaatgactagcaacctagaaaaaagttcacaagaacaattacttgatgcagcacatcatcgacactggcctggagtattgaaggtggtatcaggatgccacatatccttatttcagattccattaccagaagatggaatgcaatttggaggatcaatgagcttacatggaaatcatatgacactggcatgttttcatggtccaaattttcgttcaaaatcttgggccctttttcatttagaagaaccaaatattgctttttggactgaagctcagaaaatctgggaagatggctccagtgatcattctacatatattgtacaaacactagattttcacctgggtcataatactatggttaccaaaccatgtggtgctttggaaagtcctatggcaacaataaccaagataacaaggcgtcgccatgaaaatccaccccatggagtagcaagtgtgaaagaatggttcaattatgttacagctacaaggaatgaagagctaaatctgcttcgtaatgttgatgctaacaacactgagaatagcactactgtgaagaattctagtttgttgagtggattcagaggaggttctagctacaaccatgaaacagagactatctttgcattaccaaggatgcagcttgactttaaatccattcatgttcaagaaccacaggagccttcattacaggatgccagcctgaagccaaaagtagaatgtagtgtggtgacagagttcactgaccacatttgtgtgactatggatgctgagctcatcatgtttcttcatgatttagtatcagcttatcttaaagaaaaagaaaaggccatctttccacctcggattttatctactcgaccaggacaaaaaagtccaattattatacatgacgacaattcctctgataaagatagagaagatagcatcacttatactactgtggactggagagattttatgtgcaatacatggcatctagaacctactcttagattaatttcttggactggaagaaagattgatccagtaggtgttgattatattcttcaaaaattgggctttcatcatgctaggactactattcctaaatggcttcaaagaggagtcatggatccactggacaaggttctgtcagttcttatcaaaaagctcggtactgcactacaggatgaaaaggaaaagaaaggcaaagacaaagaagaacactaaaaaagtaatttgatctgtgaacaaattatgattgtgtctgttttattacactggagtgtttttttagtataataatttgaaatataactttaaaataattctaaatttgtggctataattaaaagtttgtaagttaacctgttctagttccatcattctgtgtacagtgaagtattgcatgataatgtaaattttgtgaaaaactagattaaaatatataactgcttgttatggtttataattatataatgtgcaatacaattcctgcatctttaaaatgtctgcagaataactgtgaatttttttgttattggattggccgtaacttttagaaaaaaatcttgttgatgataatgtgattttggggaggtcattaattgctttttcttttttaaatgtagacttatataaatacctgtttgtatatagcttgagtaattgtgatatgattgtataccactaaaatattgttaactattataataaagtcacagtaatggttt

SEQ ID NO: 1009 - DNA, 2240 bp, Homo sapiens
cccgcctcggactcccaaagtgctgggattacaggcatgagccaccatgcctggccggatgtgaattatcttaaaaattttcaggtaattctaatgggccaaggttgagaacccctgctctgggcccatccgagcaccaggctgtcacaaacgcatgcatgcactcacgcccgtgggcttggggggcttcggaaatgtgcttctgcttttttgagatggggtctttctgttgcccatcccggagcacagtggcacgatcacagctcactgcagcctcgacctcctgggctcaggtgatcctcccgcctcagcctcctgagtgtctgcttctggttttcatgatgacctggggcccaggcatactacacttgtgctgttcaggggccagtcctgcaccaggagcccatcagccacagctccgccgagaagcactgatatgcagagctaagcagctttgtttccacgtggatcctgcgtaggttttcttggtccatccgtagacaccgcactcctgcagaggatcttctcgggatgccccactgtctctgttttccctcttcactgaacactcagtcggggctcgccatgatgcctctgtgtctgctggcttctcccccattggaacagccttcttggcacgccacactgctagctgctgggcactgtgctttctgcctttaccgttctgccgtgatgttgccaaaatagcagcaacaacaacaacaacaaaggctgggcacctggctcatgcctgtattcccagcagttcgagatcagcctgggcaacatggtgagaccctgtctctacaaaaataaaaaatgaaatgagctgggtggggtggcgcatgcatgcctgtggtcccagctacttgggaggctgaggtcggaagatcgctggagcttaaccttgaggtcaaggttgcagtgagccgagattacatcactgcactccagcgtgggagacagagaccctgtattaacaaacaaaaacacaaaccacaaagggcaggtctgaaactgccatttaaaaaaaaatttaataaacttaaaaaaatatatatccacagatgcaggtgaagaacctgttgtcttcctcaagcctctttttcacccatgggtggaaatggtgccctggacacccaggcccacgaggtctttgcgtggggtccctacacagggctttagcttacactgtgctgccctcctgtcccccgagttcccagtctgtcaaaatccaacctggtctcccaggcccagggcaaatgccacctcctccatgaagcctgccacatcctttgcacacccttgggcgctgaccttgttctcccagcgcacaggcacgggtacagtttgcccctgtagtagtaactcaggcacaaaacgaactcttgctgaggctcggccgcgcagagctgagggttgccgcttccaggttcaagtgcattttgagtttcattcccagcttccttctttttctggtctttaatttcttctccggattaggtcccactcaatgctttccttctcaatttccaaaagagtatggtcagagccagcagcacaccaccttccccatgggtgggggggggccagcctgtggcgggggtgcgggtcccatcttttcgaaggaattgacccacagtgggcgggtccacctttgaccttgccccagggagcgcagacagaaaaaagatccttgcttagtttgaggggccgctggggtgctcggtttgtcttcagaggcctgtctgtaacaccaatgccaacccggtggcactgactggtcaccctgaaggccacggccagtgtcctaggaagggactcaatttctagctgtgccacctgagattctggggttaggctggttgtgcttctgaagttccactgtgctcaaagtgcttggtgaaagttagcgaaggtgattttacaaaaatagatgcataaaatgtctaggaaacacaaaaaatcctcattactcttctctccaaatattttttaagccccaactggaccctaggcaaaagtgagtggcactcctctgccaggactccaggcaagccccggcatcttcttgctgccgtcccagacaacagaagttaccagatgaacagacttggatgggccacgggggtggagagctggaaagcttggctgtgcctctcgatgatgattaagatttcaatatttacagcaaaaccacaaagcaaatgatagaataaagcaaaacaatggaaaatctg

SEQ ID NO: 1010 - DNA, 2618 bp, Homo sapiens
agatgtcggggtcacccgtccaaaagcccacgctgcaccggtccatcagcaccaaggtgctgctggcggagggcgagaacacgcccttcgcagagcactgccgccactatgaggactcctaccggcacctgcaggcagagatgcagagcctaaaggaccaggtacaggagctgcaccgagacctcaccaagcaccactcgctcatcaaggcggagatcatgggagacgtcctgcacaagtccctgcaactggacgtgcagatcgcctcggagcacgcctccttagagggcatgagggtcgtcttccaggagatttgggaggaagcctatcagcgagtggctaatgagcaggagatttatgaagcccagctccatgaccttctccagctgaggcaggagaatgcctacctgaccaccatcaccaagcagatcacgccctacgtccgctccattgccaaggtgaaggagcggctggagcccaggtttcaggcacccgtggatgagcagtcagagagtctacagaacacgcacgacgacagcaggaacaacgcggcctcagccaggaataatccaggaagtgtcccggaaaagagagagaagacatcagagcctaaaggaaacagctgggctccgaacggcctctcagaagagcctctactgaaaaatatggatcatcacagatccaaacagaaaaatgggggcgatgtccccacatggagggaacacccgacttagcaaatgggaccggtccccagggtcaggctcttagagcaggcacaagactgggacactggacagaaggttgttcccatgatggttttttttattttttatttttgagatggagtttcgctctgttgcccaggctggagtgtaatggtgcaatctcggctcactgcaacctctgcctcctgggttcaagcgattctcctgcctcagcctcccgagtagctgggattacaggcgcctgacaccacgccccgctaattttttgtatttttagtagagatggggtttcaccatgttggccaggctggtctcaaacgccagacctcaggtgatccacctgcctcagcctcccaaagtgctgagattacaggggtgagtcaccgcgcctggccaatgttgttgttgtttttaagacagaatttcactctttgttgcccaggctggagtgcaatggcgcaatctctggctcaccgcaacctccgcctcccaggttcaagcgattctcctacctcagcccccagagtagctgggattacaggcatgtaccatcacacccggctaattttttgtattttaagtagagagggggtttctccatgttggtcaggctggcctcgaactcccaacctcaggtgatccgcccacctcggcctcccaaaatgctgggattacaggggtaagccactgtgcccggccggttatttctttaaaaggtaatcatttgtcaagagtaaaacccagaagctctgacaggccataatttcagatcctttggcttgggcagttttgattttccccgtgtttgcatggcatgaagtcttcgtccttgtcacagtagcttgggatgactcccagtccacatggaaaacatcagggagtgacaatccagcaagaaatccctcgctagttccacacctacgcaccgagcgtcggtgtgccaggccctgtgctgggcagagtgtggtatgtcagggtgtgccggttttaggtaacaagactccaccactgagtggcacctgccctattgcaaaggaatccagttcctccggaataacagtcccactgttaacctggtgctactgggaagttccacacagtaatctgagcagtgactcatggaaggatgaggaacgtttgctccagcttctctccctttccagcaagggcagagctcctaaagccaggggttagcacctggccagcttatgtggcagatggtctcagttacaacttcgctgctttcccaaactcctgcagccctcctgagtccgacttccgttgatagcaaggcactgggtggcagcaaccttttttctagtagttttttcccagcagttttccatttctccacagtatccttttcatttagaggagcttaataaatgctttttaaaaagtaacccacgtgacgtaaaattttacaagtttttgtggcaaaatgatgcccagatagtcacatttaagcaaatattcagcttgattcagtgattaacagcaaatgggtctacgtgctaacatggcagcacattcaacacataacacatcactcacattgacgtccactgtccctgcacctgctacttcaggggcactgaggctcctgttccaaggccttacaaacctatgtggtggcctgcagggcaaaaggaattatcattacaactggttagaggtaggaattcagaaagaaattgaggaggccaaacacacgtcgtttgaggctaaaggcttaagacgcttcttacccaagagtgacctcagagtttcacatcccagacaatcacactgtggttgagtgaaatcaagtgcagttttatttaagaactggaaagaataatcagtatctgtgaaagaaaatccaatttagaatatttaaataaacatttatgt

SEQ ID NO: 1011 - DNA, 3641 bp, Homo sapiens
tctttccttttcacctttccattgttcctgacgagtagaaatggcagcgggaaggcagcagatggactgcgactcccgtcagccgggggccgggggccggagcgcgccgacgccgaacccgctgccgccgctgccgggcctgtgtgcgaactgagtgcggggattgccacttctgccgagacatgaagaagttcggggggcccgggcgcatgaagcagtcgtgcctgctccggcagtgcactgcccccgtgctcccacacacagctgtgtgcctcttgtgtggggaggctgggaaggaggacacggtggagggagaggaagagaaatttggtttgagcctcatggagtgtacaatctgcaacgagatcgtccaccccggctgcctgaagatggggaaggctgagggtgtcatcaatgcagagatccccaactgctgggagtgccctcgctgcacccaggaaggccgcaccagcaaggattcaggtgaggggcctggccgccgtagggccgacaacggcgaggagggcgccagcttggggagcggatggaagctgacagaggagccaccgcttccaccgcccccgcccaggcgcaagggccccctgcctgccgggccccccccggaggacgtgcctgggccccccaaacgaaaggaaagggaggcagggaatgagcctcccaccccaaggaaaaaggtgaaaggaggccgagagaggcacctgaagaaggtgggtggagacgcctgcctcctccgaggatcggacccaggcggcccgggcctgctgccccccagggttctgaatccgagccaggctttctcatcctgccaccctgggctccctcccgagaactgggaggtaaaccaaagccgcctttggcctctgcagagggcccagcggtgccgtccccgtccccgcagagggagaagctagagcgtttcaagcggatgtgccagctgctggaacgggtgcctgacacctcctcttcctcctcggactcagactccgactccgactcttcgggcacatcgctgagtgaggacgaagcccccggcgaggcccggaatgggcgacggccagcccggggcagctctggcgagaaggagaaccgtggggggcggcgggctgtgcgccctggcagtggggggcccctactcagctggcccctgggcccagccccaccaccccggcctccacagctggagcggcacgtggtgcggcccccgcctcgaagccctgagcccgacacactccccttggctgctggatccgaccaccccctgccccgggccgcctggcttcgcgtcttccagcacctcgggccgcgggagctgtgtatctgcatgcgagtctgccgaacttggagccgctggtgctatgacaagcgtctgtggcctcgaatggacctgagccggcggaagtcactgaccccgcccatgctcagtggtgtggttcgccgccagccccgtgccctggacctcagctggacaggtgtctccaagaagcagctcatgtggcttctgaaccgactacaaggcctgcaggagctggtgctctctggctgctcctggctctctgtctctgccctgggctcagccccactgccagccctgcggctcctggacctccgctggatcgaggatgttaaagactcccagctccgggagttgctgctgcctccaccagacaccaaaccagggcaaacagagagccgtggtcggctgcagggggtggcagaactgcgtctggcaggtttggagctgacagatgcctccctgcgtctcctgctgcgtcacgcaccccagctgagcgccctggacctgagccactgcgcccacgtcggggaccccagtgttcacctcctcacggcccccacgtccccactccgcgagaccctggtgcacctcaatcttgctggttgccaccgcctaacggaccactgcctcccgctgttccgccgctgccctcgtctacgccgcctagacctgcgctcctgccgccagctctcacccgaagcttgtgcccggctggcagctgccgggccccctggccccttccgctgccctgaggagaagctgcttctcaaggacagctagttgggcgccccccaccctcccccggactcgacaggagcctggacctccggcttcatttcacccctgctgggaggccaggttcccacctcaccaccctgggattcctgagtgtcagtgacttgggattcccacccagggactcaagccagccacccccttctttcccccctgcactgatatctctgggggtttctccttcctatgtcctgcccctgctacctgcttcattgtccatcccctgggggagtgggtcagaggtactggagggtgctgagccgaagggacggtgggaggggggttatggtgcaagtgttgggggggagaatggggaaaggacacacacaggatatgggagccaggggctgggggaggtggaaggggcggggggcggggcagacagcagaccaccaagggttcagggaacaaagaccagttacttggagtggggggtgggggtggggccacaaaaggaaaaccggaggagcaattggggatccaggtgtcagaggtaggggaaccaggggcaagctggggctgagctggaggtggggatgagagcaggtgtggggacagcaatacccccttgggggtcacctctctgcttcccccctccccaggcttcagttccttccccctgaccctgactccttgaacgtcactgaaaacggcagctattgcaaggagtgggggccgcgggcagccgctcttcagctcgcggcccaggggagtggcgaggggcgccccaaccccctgcccgcctctccgcacaatacttgaacattcatctgtactgaagtgttacttgaaccgggggaatctcggacctgggggagccggggtgtgaggggactggaccagcttggactgagacctgagaccgggccggtgggcgcccatttgggactgcgccacccccaggcttgttcttgttttactgtattgagcggcggcacccgccggacccgcattatggctgggggcgccagcccaagaatggggaccatgggactcctccagcctggctcttcccactctttcatcgtcatggaaacttgtatcccatttgcccagggaactgccactcctggttgccatggaaatagcagccaacggacacctcccgatgccagtgctaaggctggaaatggccccctcttagttgccatgggaacctagtaacagactctgctggccctccttccctgccccttcctcgagcgcggggtggggcttcgggaccccggggatgagccgggccaggtcccgcccctccgcgcaggcctccggggggccggggcttaccatgtaggggaggggagatctatccacatacctcaggtaacagggaggtgcgcgggtggggggagggctgggcggaccaaaggccggaggggtggggcctggggatagcgagaggcttgagaatggggccgcttgggggagggaagaggcagcccggcgaggggcaagcgggggacccagccgggctgggcccctgggccccgggtctgtacaatacggtttgctataaaactcaaaatcttcc

SEQ ID NO: 1012 - DNA, 3305 bp, Homo sapiens
tgggcatgtgagtgtggcacacctcctgttggatcacggggctgatgtcaatgcccagaaccggctgggggccagtgtgctcactgtggcttctcggggcggccacctgggtgtggtgaagctgctcctggaagccggtgcctttgtggaccatcaccacccttcaggcgagcaactggggttgggcggcagcagggatgagcccttggacatcacagccctgatggctgccatccagcacgggcacgaggccgtggtgcgtctactgatggagtggggcgcggaccccaaccacgcagcccggaccgtgggctggagcccgctgatgctggccgcactcactgggcggcttggagtggcccagcagctggtggagaagggcgccaaccctgaccacctcagcgtgctggagaagaccgccttcgaggttgcactggactgcaagcacagggaccttgtagactacctggacccgctgaccaccgtcaggcccaaaacagatgaggagaaaaggcgacctgatattttccatgcattgaaaatgggaaacttccagctggtcaaagagattgccgatgaagaccccagccacgtgaacttggtcaatggggacggggcgacgccactgatgctagcagctgttacggggcagctggctctggtgcagctgctggtggagaggcacgcggatgttgacaagcaggacagcgtgcatggctggacggccctcatgcaggcaacctaccatgggaataaggaaattgtgaaatatctgctaaaccaaggggccgatgtcactcttcgtgcaaaaaatggatacacggcctttgacctggtgatgctgctgaatgatcccgacacggaacttgttcgactgctggcatctgtctgcatgcaggtgaataaagacaaaggccggccgagccaccagcctcccctgccccactcgaaggtccgacagccctggagcatcccagtgctgcccgatgacaagggtggactgaagtcctggtggaaccgaatgtccaatcggttccgaaagctcaaactgatgcagacgctgccccgtgggctgtccagcaaccagcctttgcctttctctgacgagcctgagccagctctggactccacaatgagggctgccccccaggacaagacaagccgctctgcactccctgatgcggcccctgtgaccaaagacaatggtcctgggagcacaagaggagaaaaggaagacacgttattgacaaccatgcttcgaaacggagctcccctcaccagactcccgagtgacaagctgaaagcagtcatccccccattcctacccccttccagttttgagctgtggagctctgatcggtcccggacgcgtcacaacgggaaggcagaccccatgaagactgcgctgccccagagagccagcaggggccaccccgtgggcggcgggggcacagacactacacccgtcaggcctgttaaatttccaagcctccccagaagcccagcctcttctgccaattctggaaacttcaaccactcgcctcattcatcgggcggctccagtgggataggtgtgagccggcacggtggggagctgcttaaccgctcaggtggcagcatagacaatgtcttgtcccaaatcgctgcccagaggaaaaaagcagccggattattggagcagaaacccagccatcggtcaagccctgtggggccagcaccggggtccagcccgtctgagcttccagcctcccctgcaggtggcagcgctcctgttggcaagaaattggagaccagcaaaaggcctccatctggaacttccactacctccaagagcacctctccaaccctcacgccctccccctcacccaaagggcacactgcagagtcctcagtgtcttcctcgtcatcccatcggcagtccaagagcagtgggggctccagcagtggcaccatcacagatgaggatgaactgactggaatccttaagaaattatcacttgagaaatatcagcccatttttgaggaacaagaggtggacatggaagcgttcctcacactgactgacggtgacttgaaggagctgggaattaagacagatgggtccaggcagcagattctggcagcgatttctgaactgaacgcaggcaagggacgcgagagacaaattttacaggaaaccattcacaactttcactcttcctttgagagcagtgccagcaacaccagggcccctggcaacagcccctgtgcgtgatcctccttcccgcagccaccagcgtgagctctctgaatcccgggaccccttcacgtggccacagccccagccctgcccccgtcacactgctgtgccttagtcatgttgttccctttgctcgggatgcccacttcacgtcgacggcattcattggtagtacttcttgctgcaacaaacttcaacacacagagacagattcccatgtaacagtccagtgggggtgcttctgcttggcaggttggttcacacagtgatgcagggactcagctcctttcatcctgtgctctgccctccccgggagcctcagagtttgcttctggctggcggcaagggaaagggacgatggagaaggcacggctgcttcttacctgccttgctcttaactgacacacatcactcctgctcacgtcctcttggccactggtagtcatgtggccccacctggatgcagaggaggccaggatgtgcagtctccacatagtggcttcccagcaacaacttttgacttagatgggggccatggttgggtgggtgaggccagaagaaactgcctccggcaagaggtagcagccgctcaggtggctctgctggcatcggagcccacagaagtgaggagtggccgatggacctgccctccaaatgtgcctgactctgggtcttgctgtcactggatttcctggcatggcagacagaaagaaagatagtttgaccaagtcgtagaagctgatccagcgggtaaaaagggggcagggaactcgtcccttttattcttgcctcagagctgcctgaagacatgggccaggccggaggctggacaactttggataacgctgacctgtacttccaagtaaatgcctcctgaagagcccgggacccttcctgggagaattctgcagccagaatgaaggtgccatcagcaggaggcactgtgaagcaccatcctgtcgctgtccttgtccattcctagcaagttaatcgtgtcttgttaaccagcagttcctgttcaacgtgtaaagagacctgatgttttccctaataaagctgataacag

SEQ ID NO: 1013 - DNA, 3166 bp, Homo sapiens
ttatctgtactactggttttctccctggcttcacgtgtctctgtgttcccctatgctggggtgtcctcccagtgctttcaggcttcatctccttcctaacctctcctttctatttttttttttttttttttgagatggagtcttgctcagtcgcccaggctggagtgctaacctctcctttcatgtggagatggacagggatggcaggagcactgagtgctcttgacaacaccattgaagatgatgctgacgatcagctaccctgtggagaaggcaggccaggctgggtgagaggggagctccttggaagtcagggggtctgtaaggacagcaaggatctctttgtcccaacctccagcagcctttatgggtgcttctgtgttggccttgtttctgggatggccatctcagtgctgttgctggctagcgatttcagaaaactagatttttctaggcctgagccctgttttgagaaagaagcttccctctggtttgtagctcaacattaatgagttttggttcctgttgtttctataattacaaaaccccagcacaggtatttaagagccaaaggccatgcttgtggaagtaagggaggatctttctaaatggatcctgcaaatcctccttacagatctgagtggatggtcaggcccagagcaaccctgagaccccaggtacccacagcattggctgttcttcataggagactcagagaagacttcataggagactcattattgtttactggacatcaggtgctatattgtatagcattcacattccacaggtgaggaaacaggctcagaggaataagtggcatgccaagatcattgagtatatcagtagcagaattaggattcagactttgttaggcctaactccaaagccctggcttttttttttttgagatggaatcttactctgtcaccgggctggagtgcagtggcatgatctcagctcactgcaatctctgcctcctgggttcaagtgattcccctgccttagcctcctgagtagctgggactacaggcatgcaccaccacgcccagctaatttttgtatttttagtagagaggaggtttcaccgtgttggccaggatggtctcaatctcttgaccttgtgatctgcctgcctcggcctcccaaagtactgggattataggcatgagccaccatgcccggcctttgctcttaactactgatgttgtcttcctgatcttttctacaagaagcttttaaactttttggactttaacctacaataagaaatccattttacatgttcacatgtatctataacaacatttatatttctaaaacaaacttttcatgaaacaagatatacctacatatgtcaggcactctgatattttctattctagtccaccttttcaatttcattctatttatgggaaatatatgttggttgggagtcactgagttaatttaatgacccactaataggctgtgagtggcattggaaaaatacctgcttgtaagatatgcgaacacacgtttcaaggttgtttgtgcatgtggaaatattttggggtgctatctgttttaccatcagtttgtacaaggacactaagacagtgtagcctgctgacttgagaatgttctgtaaggactggaaacactagaatcttgaagaaacgcctggctagaggtgagggtaagctgttaattacactgattacagtttgtgcctctcagactgagaactcttttcttcttgctgggggcattgctatctctaggatgtttgccctgaagtcctgatagtctctttggggttttaataaatggctgaaaaaattgttgtggggtttcaacaggcgttcataggcacccttgcttggcaatataacatggcttttgatgtttgggtgtgggaagggatctttgaagtgctgagagggactcagtctttttccaaaatctctgcttgtgtctgtccagcctctggctccactgcttggctgagatcctggcccatagtagaatctgtgtagaggaaacgagagctcactatttgtgaggcagcctgttccactattggactgctttaaatgtagtgatcagtgattatgctataatccaatcatgtattaattgggcaccaactatgcactaggcatggtatcaagtaccaggagtacaaaaataagtaaaccttgatttctgctatcaattactctcttctcctacttctgtactactgcttttctattgtgagtttgtttagttcattaattggtttattcattcattcaacaatcatatactgattagctactctgaccaggtccagtactaactctaaagaagttatgcccatcccatcttcaccccaagccttctccttttgagactcctcatccagtttctttagttcttcatatatcactgtttttcagatctctggctatccttgccattgacctcagaaatcctgtatttgaccttaaccttcttatacccagtccatacccaaagtgatggaaatggaatagatttctttttaaagttttaaacgaatattttgactgaaaaattttggcagtcttgtatgcaaatgacactgcagagcattgttttctcccccccacgtaggagattttattcaactaaggcacaggcatattaaaagactttcagtacaaggaaaaggggtagtttgttccctccaaatttgactacagctcgaaattgtctttattaatgcaaagttcttttgtcaccttgactttgggacactgttaccaaacctcgtgggaaatatcaagttccagaagattgaatacatgcaggaaacaaatgttttttgggccctagagtgaacatttggtccatatgaaaatgaccaggaagacaattaggtgaaggttttttaatgatttgtgctacgtcagtctcttcccataagacatattcaaagttttaacttttccttaagaggcttccatggggagcaagcatttgataattcatcctttaagaaaaacaccaccgtacactgcttgaagagttcctcttctattacttaaaacgtttttattgtgcaacatttaaggcatacaaaaacatataaagaataccatgatgaaaatctatgactgtattaccaagcttaagaaataaaacagttgagtgatctctc

SEQ ID NO: 1014 - DNA, 5052 bp, Homo sapiens
gaataatgcacctgactttaccaggggggaacaaccagccgagtagaacaaggaacagatgtaaagggaataaaaggagagagaaaaagagatgagattcgtttaaagaaatccaggggcagaagaggtggctgccgcggcagaggcagctagagcttacttccctgtctgcgtgagctgcaggcagaggacgctttcaccagttgcagatgtaacctcgggaattcctgggccgtcggtttgtttgctaaacaaagtcttttcttctctggctcagacactgaagagcctcctggatttttctgcgatcctgccacaagctggcagttacccgagagccttcccaaggagctggaggagaaatgagcccttgtgggcggaagatgggcgaagggcgtcagcagcagcgggctccggtcgggaagctccttctgctccccgggaggagagatacaccccatgggcggtcaggcagcagcggcgccaggacgcagcgctccctgctctggctcttggtgcacgtgtggctgtgggcggcctcgggctcctctgcccagttgttcaacctcaccctttccgtagatgaggggcttcccccggacacgctggtaggtgacatccgcgccgggctgccggccgcgcagcagcaggaggggagcggcttctttctgtcggaggactccgatgactccccgctgctggacgacttccacgtgcacccggacaccggcatcatccgcactgcgcggcgcctggaccgcgagcggcgggaccactacagcttcgtcgccgccacgctgctgggcgctgtggtgcaggtggagattcgcgtcaacgacgtgaatgaccactcgccccgctttcccctcgactccctgcaactcgacgtctccgagctcagcccgccagggaccgccttccgcctgccaggtgcccacgatccggacgccggactgttcagcactcagggctacaccctggtgcaaccgtccgacctgcccaaggaccccgcaggcccgttcttccagttgcgctaccggactccggggccactaccgtcaccgcttttgccaggctcctcgtcacccctggagcctctagatctggtgctgctgcggcgcttggaccgagaggaggcagcggcgcaccggctgcagatcgaggcatgggacggcggccgaccccggcgcaccggcctcctgagcgtggagctgcgcgtgttggatgagaacgacaacccgccggtctttgagcaggacgagtaccgcgccgcggtgcgcgaggacgcccagccgggcgccgaggtctgtcgcgtgcgcgccaccgaccgcgacctggggcccaatggcttcgtgcgctacagcgtccgcgcccggcaagtgcctggggcgggtagcggcggcggggcactgggcgacgcggcctacttcgcggtggaggagctgagcggcgtggtgcgagtgtggagacctctggaccgcgaggcacaggcctggcaccagttggtggtggaggcccgcgatggaggcgccgagcctgaggttgccacggtgcgcgtgtccatcgccgtgctggacgtgaatgacaaccggccagcaattcacgtgctctttctcacagagggaggcgtcgcccgtgtctctgaaggcgcccgaccgggcgactacgtggctcgcgtctcggtgtctgacgcggacggtgactgggagaaggaagatgaggccacaggggagcttggtgtgggtcttggagacgggagcatctcgctgtccttggaaggcggagagggagacttcgcgttgctgcccggcggccccccaggggtatttttcctttgcgtggaggggcccctggacagagagagccgcgatctgtatgagttactactggtggccacggacgcggggtccccgccgctgagcacggaggagacgctgctactccgggtcgctgacctcaatgaccaaccacctctcttcagccaacagcattacaaggcctcagtgtccgaggccgcggcccctggcactgtagtcatgtgggtcagcgcctccgatgccgacgaggcaggcagtgatcacgcctggctgcgctacactgtagtccaactctcggctccctgcaatctcggctccctggaatcaaagatggtccacaccgcagagtgtggaccatcttttgccattgattccgaaagcggtgtgatcagcactatccgggctctagaccgagaggtccaggaggcggtggagctgaaagtggtggcccaggacctcggagagcccccactctctgccacctgcctggtgagcatcaccgtagatgatgtgaatgacaatgagcccatcttctggaggcaggtgtacaatgccaccattgcagagcatgccccggttggacactgctttctgcaggtgacagcctctgatgcagattcaggactctatggctttattgaatattctctttatgatggattcctgagctatgaagcacctcaggcattccggatcgaccctcatgatgggcaaatctgtgtttctcaagatatcgacagggaaagggatccagctacctatgatctcctggtggaagctaaggatgggggtgggctaagtgcccaagcctttgttcgtgtggacctggaggacgtgaatgataatcatcctgtgtttaacccatcaacctatgtgacgagcatcagtgatgagacccagccaggcaccgagatcatcaatgttcttgccactgaccaggactctgggatatatgggacagtggcttatgagcttattccaggaaacgtgtcgtccctttttaccattgactccaccacaggaattatttacttaacattacctcttagtcatttggaatctaccacacttttgttgatggtctctgctcaagacggtggtgggctcacagctgtcattaatgccgatgtcaccatacacattttccagacaactctggcacctgctgagtttgaaaggcctaagtacactttcttagtttatgaagatgtgcctgaagatagtcccattggaacagtgaaagcaagagagcccttgaactcctcagaaccaatcttttacaggatttcttctggtgatctcggcggaaagttctccattcacccgcggctgggcactattcgcacccggaagcccctggatcacgagacgcagcccgtggttgtgctcacggtgcaggcgcagctcggcagcgccccagcctgcagcagcaccgaggtcaacataacagtcatggatgtcaatgacaaccacccagcgttcctcaggacctcggatgagattagaatatcccagaccacgccccctggcacagccttgtacctcgcacgtgcggaagacagagacagtgggcggaacggactcatccggtactccatcgccagcccgcagccaggcgtctttgccatcgacagagccctgggggtgctgttcctcaacggcagcctgggcgcgggcgagcagcgggagctcacgctgactctcagggccgaggaccaaggcgtgcatcctcaggcagccctgctggtgctgacagtcgttatcgagaaacgcgaacacagcccatcctggactttcgaacatttggtctatcaagtggaagtcagtgagtctctctcaccgatgacacaaatgctgcaaacacaggcgcacccacttggcccccagcgtgcagcctcgcctcttaggtactcgctggaacccagcgtagactctgctatgtttggaatccgcccttacacgggctggatttatttgcggcgacagtttgactatgaatccacccaaacatataattttagagtgtttgcttggatccccgaggacggattcttgcaaaatgtgagcactacagtcattgttcgtgtctgggatgagaatgacaattcccccaccttcttgcatgatgtgttgtttttgaaagtcgaagagagccctgttccccaaggggtaataggcaaaattacagctattgacatggactctggaaagaatggacagctattatatttccttttgtctgatggaaaattcttcaagatgaatcctaatacaggagagttaatcaattgggtggcactggatcgtgagcaccgggggcaccatgagatgactgtgctagtgacagaccgcggctccccaccacgaaacgccaccatggcggtttacgtctcagttactgacatcaatgataacaggcccttcttcccccagtgtctccctggaaaggagttacacgtgaaggttctggaaggtcaaccagtaaatatgttggttacaactgtgtttgcaaaggatcctgatgaaggaaataatgcagaagttacatactcagtatcttcagctagacatatgcctctgaagggaaaaacagcatttgggaagcagtcgtgcaaaaaacaaacaaacaaacaaacaaaatcctgacctgaatctggtcagttctctagatctgcctcccaatttaaggaaaacataagaatagaggaacatattatgctacacgttggagatgcaacagcaaatctagatcatggaaaatgtcaggatacaagttccagtttattcaacaaataaattgcaaggacaaatagagagatgggtggcaggaatccatagattaaagaaatatgcaatatatggactttattttgatcttaatgtaaacaagaaaaataaagagtatttatgggatggttgaaaatttgaaaacttactgaatatttggtgatactgtgaaccattattaatttttaaggtataatatggtactgtgatgattgtgttaaaatatttattttttaaagatgcattttgaaatatatacagaagaaataatatgacttctggaacttacttcaaaaaaaatgggagaagcgaagtatatacatggggaatagatgaaataagattggccatgagctgatcattgttgaagctaggtgatggactcgtgaaagtttattataccattttgtccacttttttgtatgcattttccataataaaacttttt
